United States Patent Application Publication US 2021/0254056 A1 - sequence listing, part 29

SEQ ID NO: 57335 - DNA, 561 bp, Homo sapiens
aaacaattcatatcatctagatggtaagactgtttttaattcaagtattcaagaaactgtcaccctaagccattgagaaatagtcattctacagaaaataccatttacaaagctgtaatgtaaatgctttttattggctttaagcctttataattgacttagagactaaataataaagtaaaacatggttacaaaacagaaggttaacatcagtggaagttaatgtttaaccaatggaggttgggagatggaagagtgaagtatgcaaacaaggctggctcagtgctgagttccattttgtaaatgttgagtaaacagatctggctgaaagttaatcatacagaaccagcgagtgtgtatttatttattttacttggtgcaggtagtactttgattaaaaggggtgatatagtttggatatgtgtccccacccaaatatctattgaaatgtaatccccagtgttggaggtggggcctgctggcagctgattggatcatgggagtggatttctcacggatgtttcagccccatccccttggtgctgttcttgtgatggtgag

SEQ ID NO: 57336 - DNA, 547 bp, Homo sapiens
aggtcgatctgactttccaaacaaatttatgtttcttagaaaaaaaattcggtgccaattaattttcagaaatctatcagctagagaattcagcacaagatatactttctaacaccaaatacaatttatcaccaaaggaaagaaagaaggagggctgctccagatgagaagagctgctgctgaagctgcctggaggtctgcactgtggcctgcacctcccatgtgcaggcaggtaatgagagcagagcagactcccaaactcactccagccatgtccttgaccctggtgtcactgacctgggaatcccagaggctcagaagcgctatccaggaagtagcatgtagatttaagtgacctgggctgcagcgaagatagtccctgctaaaagactgtgggaacaaaaatctatctatctgttgtctgtctgtctatctgtctatttatctatctatctatctgtctgtctatctatctatctatctatctatctatctatctatctatcatctgtctacctaccatctgtctatctaatctgaaaaagcc

SEQ ID NO: 57337 - DNA, 879 bp, Homo sapiens
acaaccttgctctccagctaactttctggctgattcttatgtttcattcatccaagctaaagctactaagtattaaagatctccaagactctgtctaaggcactgtcttcttaatttcttctttatcctccatagagctaatccacacccatgacttcaggggcccacaccacttaagagcctagagctcttctgagcagcagaacttgtgatggttaattttacgtatccacctactggattaaggagtacctacagaactggaaagcattatagtgggatgtgtctgtaagggagtttccagaggagattggcatgtgagtctgagtagaccaagtggagaagatccaccctcagtgtgcttggcaccatctcataggctgggggcccagacagaacaaaacaggcaaggcaaataggtttctttcctggagcttggatacactcttatcctgcccttggtcagcagaactccaggctcgctggcctttggactctaggacttacaccagcaacccccactcctaccccaggttttcaggccctggaacttggcctgaacaacactactggcattccaggatccccagcatgtagatggctgtcacaggacttctcagcctcagtaatcaggtgagtcaattcccctaataaatcccctcacatatatctatatatctataaatagcttgttggttctgtctttctgaagaacactgactagtgcagattttagtaccaacagtggttctagaggttttcataattggtttggggtttctagaattggctatctaatctggttaaatctaaaaatgccaaagactctacttctaacagcacagagagcactgaactctctagtgcaaactgctcata

SEQ ID NO: 57338 - DNA, 940 bp, Homo sapiens
taggtactgattcacaggctggatggtcagggacttgaaaggaacatgattagaaaattggtggcaaaaacattgagagaatagatatgtggatagatctctctgagtcggcaaaggatgtgaagttatttgtttctcatgtaaatgctcacccaaagatgagctccacagaggagtatgttaatattcaggagggtaggatgacccattctgtgaataccagtcaatctcttttcccagtcatccctgtcattgcccagtgggctcaggaacaaagtggctatggtggtagggatggaggttgtgcacgggttcagcagcatggcttctactcaccaaggctaagctagctacaaccaccactgagtgctcagttggcctgttgcagagaccaacgctgaaaccctgacatgacatcattccccagggcaatcagccagctacgtggtggcaagttgattacattggatggcttccatcatggaagaggcagcattttgtcctttctggaatagacatttcctctggacatgggtttgccttccctccatgcaatgcttctgccaatactaccatctgtggactcacaaaatgccttatccacgctcatggtatttcacacagtgtatctactaaggaactcacctgacagccaaagaagtacagcactgggcccaagttcatgggatccactaatcttaccatgcgtcccaccattctgaagcaacaagcttgacagaacaataaaatggccttttgaagttgcagttacagcaccagctaacgttgcaggactggggcaaggttttccagaaggctgtatgtgctctgaatcagcatccaatatatgatcctgtttttcccatagtcaggatacatggagtcaggaatcacagagtgggagtgtcaccactcaccaatacccctagtgacccactag

SEQ ID NO: 57339 - DNA, 957 bp, Homo sapiens
caggggtagtttctgggtggtttctgcccaaaataaacagtgaatctctgtatctacctgtctctagtttttaaggtagtggccttatcctatgacttcaattctctgacggatctgagaagaattgttgattttcagtgtgttgagggttttttcttgttgtgaggatggagagccagcccccaagctccttacatgtcagaccagaaggtagaagtctctgtccatgactctgttattccctaccactcattctcttgcttattctggcccagtctctcctttctgttgctagaacacagtgagcacacatttgccatgaaccctattcccttgccatccctgtccctggaacacttccagtaggtgtttgcatagctcacttttgcactttgatcaggtttctgctcaaatgtcaccatcatcagacacgtggttcctgaccaccatggcaagaatagagacccttgtccctctcaactaatttaccctactcttttattcttcagagcactcatcactgtgtaacatgatattgtgtttagatgcatttaccttgtttattacctgtctttccaccctagattgtaactctaaagatgtcagaggcatgttctgtattgatctctgtgatgacgacctcagagtccagaaaccaaaagcagcttggatctcaggcaaggggaggctgtggtacgcatcaagacagcataccttctgcaagagattacttgcagagaaaaataaaagaacatttaaggcccctgagaagaaactgtagtgagactctttgagaaattgagacatttaaaaatagccatgtgtatacaggaatggaaaaaaaggatgcacacaagaccaggagaggcatataccaagaaaaggcctaagaacttaagccatcacatcctgctgattagtgaaggtcttcccttgcatggaggcagcttacaaaga

SEQ ID NO: 57340 - DNA, 782 bp, Homo sapiens
agagcttagatttgggcagaatgctgggaagcatatcttgacactgtctgcaggagacttcatgtccacgtgcttcatactttaggggacatctgcccttcaccgccagcccagtgtcccttattttgtccatggcacctggatgttgcctttagagagcaacctctatgtccagatcagttctgctggctctggagccaggcatgtgggccagtccctttgagaacactgtgtgtccttggggatagtgattgtttcccagatgagcaggtggccaaagtcaagcaatgagagccacccagccacatgagactttgactcctggattttccaaatggttggaagtgagccatgatctgctagacgccagcacatggggaacctgccaagactgagggcaacagagtggaaagcagaggcctgagcccagggatggagaggatcctaattacaccatttgagcccctgaatccagttattctgaagtcagttcttcttagagacttttgagatatctgaattaaacctccctcactttttcactcccttgagtcattttgaggtggtattctattcattgcaaccacaacaggtcttgactaacaacagttaagaatttcattcattttcagctggcctttgaacaggaacatctccatctgctgtgtttatgacacatcttggttggactcccagttcatcattcaccagatttgggaccctgatccttagttctttcacctctacactggtgataatgtcagagccttctttctaggttt

SEQ ID NO: 57341 - DNA, 1214 bp, Homo sapiens
gagccactgagcccagccccggttggtgattattaataccagctagatcttcaaagccattcctgaattgagaacgatttcatgggtgtttttgtgaaacgggctagctgtcagccgggattgatcacttgactgtgtcagttgcagacagggctggaagatatggctttaattttctttctttctttctttctttaaccacaaaacaaaacacaaaactgtttcctcaagccccttgtattggggcctattgcaggtgaagggggctgaccaaaggaaggaggtggcgctgatccagaggaggctgagtgaggggtggagcggagcccagccgagggagggaaggagaggaacgccggcccactagccgaccccagcgcaacccagcgcggttcccagacgctgccgggtaactgatgccgccggcacagcttctgttctcacttgtggagctttgtctcccctcgctgggcagcccctggtaccgcaacccgcctggccgccttcccggctgaggcccccgggcagagctcctccgcagggagcattcccgtggacaaacacccctttccctggtagctgtggcaacagttgatctgtggcagcggaccaggaggagggtcaaatgggagaagggacggccagctggtcctaccagagactgtcgctggcgtcctcaggggccgctgcagggccaccttgtgtgcttgccctttccccacggtagactgccccgggagggggactgtgctgcctgaattcttgtccgggtgggactggcctcggtgaaggatccgggaatgggacttccgggccgggccggaggggaagtgtcaggaagagctcaggctttagcgagcctggagggaagggaaggctgaggtctcctctgcctccgcagccacacggcccggcgcggggcgggccggcagtaaacctaagaaggctttattcatttcctggaaacgtttcctggaagcctggcatgtgctaacgatacaacattgaacaatacaaaggtccctgacacggagcttacgttgcgtccaccaggtagacaggacacatacaagatatgaagcatagtacatgtttaatctggatgagaagaggagaaaaataaaacaaggagggagaggcgacctgtcaggggccagggtggggtgagtggaagaaacggtgtccctgacaaggtgcctggtggcctcacccgg

SEQ ID NO: 57342 - DNA, 596 bp, Homo sapiens
agccctcggcacggcacggccctgtcagctacgaagccgggcgaggggctcaaggcccctctggagaccgcttctcccccgcggcccgtcccgccgctgcggaccccatgcgcggcctccccgccccggcgcctgggcctcctcgcggcccgggcggggcccaccaacccggagaggtcgccagcctgcagggtgccgggggcccctccgagccgacctcgtcccaggcagacgcgctgcccggagaccgccgcaagggggcgccaggggccggggcggacgtcgcgccagtgcctcgccgggaccgcacctcgtccgcgcggccgccagagggcgcccgtcagcgccggagcccgcggcggacgccccagccgagcccagccactgcctggtggagccacagggcacccgcccggaaacaccgcctgcgccccgacggcacccgtgtgcgcaccacactcacatcacacacaccacgcacacacacgcacacacacacacgcacacaccccgccgagcgggccgcacagtcactggggcgccgctcgctttgctgcctttcccgcgggtgcactgagcggcgggagcgggagccg

SEQ ID NO: 57343 - DNA, 1177 bp, Homo sapiens
gtatatgactgattccagaaaggcagcccctttctcccacgcaagcagaaaaacaatggtgctaaatcagtggtgctcattctggacttagcccagcatgggtgcaaggctttgtggggacacgagatgatgttgtagtttccccttgggcctgggcaaagacgaatctaacctctagggatgcattcatcagcccatgtgtagagaaatcagtcaggcccctttctaaaacatgttcagtagtgtcaaagaggacccctctttccacaaaagaatattctgcagccaaacaccattcccggaagttctacttttagtagtgactgcaactgtaagaggcaggcattatcagccaggcctggtcttcacggagccagagagcacttttagcttcacttgaggctccgtgttggagctctttctgaacccgtttcaggtctctcatcacaacccaaatggcaaagtccacgttctctggcagggctcagctggggaaagataagccacttcccagtgttctccatgggaaaaaagaggcaaaccaaacattgactcatgcctgggaagtgaatgcaggagttccctggataggcctcctgctccaaaacaagagtcacagactctttggcatgcactccactgctagttatcatcacaagccgtcctagccagagagagaggaagtcacagaaaatggagagagaaatgcccagacaagggtcgccttccgaagcaaggcaaggagacctggcaacctggaactgcacagcacttcggaaggggtgtgtccatcgggctcctctcctgacctttgggtccacttgcgaattaggcaaaacagttcttttggattttacagagagaattacaggtattcaatacattaaactgcttgcccaagatcacttggctcataagctgtgaggcaaagtcagaggcaaagtcaggggccacatcctgggtcaggaagtcagtgcttccttccacacggtgaaggcaggatagctaattgtttgctttaaaaataagtaatttcagtgaaagaagaaaagaaacagtcatctgggccataagaaagaagtgacccaatcttcatggacattgtgggctaaactgatggcagttataaggtagtatccattgactctcaagaattcgcaccaaacaaaaggagggt

SEQ ID NO: 57344 - DNA, 1976 bp, Homo sapiens
caccggcaccccggcccgggcttaggcatcgtcggggacgcataggaccctcgccctggcccccgggcctcccggctgcatctgctcaccgagtctaagatccagcggacaccagggctgcaggccgctaccaaggccccgcaacgccaccatgatcccagggcaccggctcgccgccgccgtgctcaactttcaaagctcgctcccgcgcgcgcgccgagtcgttcctgtggaccaatcacaacgtacagaatttcccactggccaaccaccgcgccgagccgtttccattcgctcaaccaatcaccggcgtcgtccgccgcacgctcagagaactgggcgggccgaaaagtggaagccaaacaaggctcctgcgggtgttccgctaattcgttcgagaaggagccagggcctgagttaaaccctaacagcgtttttcccgcctcgtttttcttcaatgggggaaaatctaaagggtatctgagatagggtacttccggtagtaactgtcacctttgccctcgtcaggcgacatttcgcgtgcgtgtcaaagggctgcctttcccgtcagcactcgaacagcgtaatatccgaatgtgaaaggcagcccaacgtgtatcgagctaaagtaataagggaaaagtagccgaaagcactccgagaagacaagacaactgcagttctgtagggactgcgcggcacgcgtgggcccagagcctgtcccagcgaggtagcagctgccatgccgaccgctggagcgccggccgcgctctccctgcgcatgcgcagcgagctctcctccgggctgccgggagtcccaggagcgttagggggtgcgcctgcgcgccgctgctccagcgcatccgggctggagctcgcccgccccctcccccgcccggagccgccgaagcgcctcggtgcgttgcaccgccggaggctgggcagctcgcagcgctgctcggcgctggaccccacccggcaggcgcaggccacccacacccggctctgtgcggctgccccccgcagcattgcacggccgaccctcgcccgcccactgccaccggccgcgggactggctgggactggctcggccgagggcactgctcctcggtgcattgctgctcgggcgccgcagcccgcagccgccagcctcccccggccgtgcccctcccccgtggagccggctgtccgtcggcgcccactgcccggcggcagcggcggagccaggcagccccgcggcggccgagcgcgctcgcgcatcgggccctctggccttctttacctagggcagcccgcgccccggtgcgagggagcggtccttaccgagacccgcccggcccggcggtgcgatgagcttcttcggcttcgggcagagcgtggaggtggaaatccttctgaacgatgcagagagtaggaagcgggccgagcacaagacggaggacgggaagaaggagaaatatttcctcttctacgacggggagacggtctccgggaaggtgagccttgccctcaagaaccccaacaagcggctggagcaccagggcatcaagatcgagttcatcgggcagatcggtgagtcgacccccgggaccccctcccccagcgccgacagccggccggggagcagggtgattcagggcccagctcctccggcgaggcctgtcacagtcgcttgtcaactgcagtctgaggcctggggttcagctacaagtcccgcccgtgggcgactccccctgcgttactgtcctccctgccaaaagtgacagcgcgctgccagggagatggggacggcgagggcgggaggaagcgccctgctgtgcctcgtgggatgggcaccttgcctatgggttctccccattgtctccggcatgcactcggctttgcttcttgtccccaggatttctgggtgaggtgctctggccatagcctgcaggtgggtttgttagggggagaccgctctgccaatactggctttc

SEQ ID NO: 57345 - DNA, 393 bp, Homo sapiens
ccctgaaatatacatcaactgttggcagggagacacctaggagcatggcaggtgttcagagaaaggtaacctaagattgaggttggcagactatagccttcaggacaaatctaaccccatgctggattttgtgaataaagttgaacttgaacacagccacagctgtttacttattatctgtggccactctcttgctacaagggcagggttgcaacagagactgtaacacgcacaagcctacaaaatttactatctggccctttgtggcaaaggttagccaacccctgccctagatacacaggttcacaaaccagctgatgataataaaccctgccgattttattcatttttacctttttccttcccttcaaagataagaagctggggatggaa

SEQ ID NO: 57346 - DNA, 1954 bp, Homo sapiens
ttttcttagtactaaactttgcccgtggaaagtctcccattcttcaaggctgggctcaaattccacatccttctcgaggccttccccgtgattcctccctccataaacttaacaatccattttcctgaaccccatcacatctgtttgcagttcacccgcaagcaggcgctttatattctttagcacgccacctggtatctcaaagagtctttgtgcacaacaaccattgcctgaataaacaagaaaaaggaactgtaggtaggagcttggtgagacaagtaaagaagatggagagtgattaaggataatggagtaaaaatatcacaaagggttctcaaaaagcagggagtgaaaaatgagtactaaacaggctcttcgagaaaagttttttcttgggctgcctttgtgcagcctaggggcagctcacctgaaccagaagtcccagccagcctcttccggggtctcgacatggtcacgctgcaggggactttagtgcggacgattctggaatcaacggagatacaagaaagaatgctaatgtcctccaaaacccgcgcagagcgagatggaggcaacgagaggcagcctagaacgtctccaacttttgcgaaacacagacgcctacgtttgagccctcaaatccttccctccgttatctgcgccatttccatctcgcataacctgcccctaaactcttctcggttctgtccttggtccttctcatccaggaacccctatctcagtatgtagttcactgggaagtggctccacagagacacttttgttgggtgaatataagtaagccttgtgttaccttgttatccttgctaattaggatcaactgaatggataatctagatgatgaagtaatttgctggctacagacccaacactctgcagactcgactgcggtccgcctccgctgcgccgcaggctgtgcagcgcgacccccgcggcgcttggtgggcggtgcatctctgcggcgccgaggccccgaggacttctgggaattgtagtcctgtccccttgggagcccgcctggcacctgggttgttagggctcgtgggaggactacaacccccagggtgcagtgggacaggcgttgccgggtcgcaggtcccgccagtgcgagcgcaacggaggtcgaaggcgttcagactcttagctgaacgcggagctgcggcggctatgctgtggagcggctgccggcgtttcggggcgcgcctcggctgcctgcccggcggtctccgggtcctcgtccagaccggccaccggagcttgacctcctgcatcgaccgtaaggatctcctggcgggcagtaggacaggtgtccagaaccccggcggacatatgtccgcgaggggctgcagtctccccgttccatccagtcaccccggcgtcagctccccttccggccagtcacccccccggcctggctccctactccggccggtcacccccggcctggctgccccctccggtcggtcaccaccatccgggtccccatctggcccgtcacccctgcccgggtcctcctccggccggtcacccccgccccggtcctcctccggccggtcacccccgccccggtcctcctccggccggtcaccccccgcaggttcccctccggccggtcatccccccgcaggttcccctccggcccgggtcctcctgcggccggtcaccctcggatgcttagagaagtgaagaaacttggggcttggttgttgttgggttggttggtttttaatcataacagtaggtcataaaagcagtgagaatataagaagctggctgggtgctgatggtgacaactgcacaagaactccaggtcatacaagatttgctcacacacaaagatttggtatcttaacacctctggctataagacacttttagtgttgaaactcatgcaggaaaaataattattattgccagtgggaaactctaccag

SEQ ID NO: 57347 - DNA, 1151 bp, Homo sapiens
tccctggccatctctgccccgccagcttccgtccctgaaattccaacatggcatgcttttcctcgtcctgtggtgagatgcaacgtggcccatgccagagggcagtgccccattcccacccagagccacagggggggccagagggcagtgccccattcccacccagagggcagtgccccattcccacccagagggcagtgccccattcccatgccagagggcagtgccccattcccacccagagccgcggggggtccagagccagggagagggttctcaagttgagtcaagatgcccaagcgcaaaccaggcctggccattgcaaaccagcacctgtctcgtttccttccagctgtcaactgctcccttgcctgggcctccatgccctgcctgctcctctctgccaggacttggccagggtacagtgcgtgtgggggtatacctgggcctgagtggcagttagggggccccgcagtgaggaacagcaagcatgggtttggtcccggtgtcccctcccccttgcccagcactctcttgaggctgatgatttggggagacgccagtctgaccacagcgactcaggtgcctgctccctgcctgctccctgtcctcctcaatgcgttgcttggaattcgactcaagaaaacccctggggttgagtattctgttctgacagggcatcgaggctgtgctggccaccacagaactgcccgcctgagtgacttcacagggcagctggcctgctgcttgacacccatgtgcatgcgtgtgtgcatgtgtgatcatggccggcaccccgtgagtcagcacacgtgtattcacaggcacgtgtctgcacgctcttagctgggtatcagtgttgctctgtgccctgttgacaaatccacaattgggtccctgttcaaataagagagtagctcacgtgcctgtccttggcacccagtggcttcggatcctggaacatagatggggtgaggccaagaggccagttctactctctctgcagccctggggtttgcgggggctgctgctcctaaacctactaaacacaacagctcacacgcagtactgatttatggcttccaaaaggactgcacgttggttatctcatttaatgtttaaacccttgtaatcccaaaggtttgttcatg

SEQ ID NO: 57348 - DNA, 813 bp, Homo sapiens
cctgtttgacaacccaccctctctggccacagaggagggacaggtcaggccggagtagtgtgtgctgtactcaacgctgcctgcaaccctgaggactgatgtaagtcttccaaattcaacacgcaagctctgcctccagttcagatcagcttttaaaaggggcggacaatgtcttatctagagggaaattccacagatgcttgttctatttccaggtcttgccataccagggtgggatgagaatatttgtttattttacttctgaagagatcatttttatttaggatatgtgataaaaaggctgcttgaaaatgccacatcccagaggcaagaaataccatgtgggccttggaatcagaaagtgctggatttgacattccaccatcaactagtggtttgtttgtttttaaaatttggtaaaatacacataacagaatatttaccatcctagccatttttaggtacatagttcagtagcgttaagtacattcacgttgttgtgtagccagcagtgaggtttttaacctctgagatgttaactctctgagctcatcaccaccatcgtcatcctctccggcaatgctaaatatggaggctcctagtgccaggagtgaagcttgctgagatctggtgtcagaaagaaaccactaacatccttgaagctctaaacgcgtgcctcctaggctcacagccttaccacatgccagtctcatctcagaggcactggggtctgtggcttccaaaggtttattacatatgactttttaaaaacactcaagcatctgtgcacaaatatgttaaattattttcgca

SEQ ID NO: 57349 - DNA, 787 bp, Homo sapiens
aagagaggcaagggcctgcaacctgtacccatctgcaagcttgtcctgattaagcatcacggaggcgccagatagcctttaagggaagactaaataagaacagattcagaaactgaaacagaaaatgaaaataggcttcaggcctgcctctatggccacttagttataaagtgtttctgaactaatatctgtccattaggcgctaggaaaggcagggagagtttttgagcaggggatgaatgtgacaggctggtgcttttgaatcatcatttttgaggctcctactacacactaagcagtttatttctgttgtgtggatcctcacagtgacgctgcaaggtaggtgcattgaccccactctgcagctgaggctcggagttcagccgcgtgtccaggtcgcgcatgttagaaactgtcattttcatttacgtttgattctatactttccactggagagtgagagaagaggttctgtttatttttttctaaggaaacaatttaaaccagggtaaaatgggatccatcggactggactctggaactcaggtaactgcttggtggggaggggcgcgtggaaactcccttccttcaatctgttggcttatttgagttcagtggtgaaacaaacagattcttttcaagggctggaccggatccccagagaggccgcctctgctgtttttctggagcattttcaaggaagcaccttgaaatggcttcacgtctctcattgtctaactgtcccagatggctccgcactgccctggggggccgtagcacaccaagt

SEQ ID NO: 57350 - DNA, 1606 bp, Homo sapiens
gcctggggaagggcccctccccagccagacgagaggcagccaccccagagaccacaggagccgtaccatggcctgcgcagtcaggccctatcaggatgtgtctgtcccaagcctggccaggctccagtcctgtgccagtagctcactgctgtcctatgtgcaggtcccccaacacttggagcctgtggttaaggcctcctgggagaggcagtgagcatgagtcaaaggtgacatggacttgaatctccccaccccgccccgcctgcagtagccgggccaggtaggaggcaaggatcattccctgctcccagaggttccagatgacctagtttcgttttgtgtgtgtgtgtgtgtggtcacccagacgtcactgtgatatcacctagtgaatctatttctggccctgtcttcgtcggcccagtttctgtaacttgcagccaatttgccctctcccctgtggctgccagcccatctgcccctctgtgtccttgctgccctggccctcctctgttttctgtaacagatgctccagtcattgcctttcagagtggagcagatgacagatggggtgcacgcattcagacacctctgatgcccttagccagggcagggatcgtccttaaagtgaaggcctggacaggaggagtcagggacttgggaggaggtggagctgtggggatgggagtggaggaatcaaaatgagggaagctgaaaatagaatgaaaacgatgactaagaggcagggagtgcgaggtatgggggaataggaactatgagctaaatatacttatggggtgggggccgtgggggccagggacactctcccagacagccctgacccgccaggcaggaccccgtcccctgctcacacagctcttcaaacttaccaaggacaggcaggaccccgtcccctgctcacacagctcttcaagcttaccaaggacaggcagaaccccgtcccctgctcacacagctcttcaagcttaccaaggacaggcaggaccccgtcccctgctcacacagctcttcaaacttaccaagtgccctctcccctgttgagggcacagcaaccccaggccctccctcccacctcagctgaagccccaatcttccaaatcggaaccagcaagtcttagggctggcacgcatctgggcctctagctgagaacccggactctcaggcacctcagtgcccctgccccagggcagaggcccaccccgtgggttggtgcagtggctgccctgggctccacgggcagcacagggagtctgtccaggaagcagcccagccggggtcagtattccgtggagccagtcctgagctgggaggggcatttaacacccctgagggcctggggcaggacacagctggccctcctcattgtcaggggaagcaagtgcccaacatctgtaacctcccttccctgctcagtccccaggccaaggttgggacccctctccatccctgtccccagagcctagacctcagggacctaggaaaagcctcctgctccctccccacggcagcagacagggcagggcctccagcccccagagggccggtggggggtgctctcgggccttcctgctctcctaaggttgcggg

SEQ ID NO: 57351 - DNA, 883 bp, Homo sapiens
ctccgctgtcagcatattgttgttcttcccaagtgctccatggcatttacacctaaagttccagttcgttctcgtaactgtaagagcaaaccttagttttctgagtttgcagatgaggaaatccaggccttggcagatgaagtgattcacccaagaccactcaggagtggaaccgtgatgaaaactcaggctcgggcttttcattttcatgtccctttttatctgtacagctcgccaccatcccagccggcccatctgcccaggtccttgatgtctgctgagtgacctcagcctagcctctggcctccaggtcagaagggatcaaagcctgccgaggtagcaagggtcaacgggcaggtgtggccgaagtgactgcatggttctctcctagccagctgtgtgctaaggtgatcgatcagctcagagtaaacaggggagccagcagctctgggcagctgattgggaggaaaagagaaggtggggcctctgaacaaggccagatgacaacaacgattggcaccaggggcaagtgtgagctttcgagggagccccagctcctcttctctctgttgtatctctgtcctgagaaaaactagggggccctggtgccagaagggatcaccagaccagttctcacctggctggcagtcacctccggatgacccccaaggtgaccaaatgacgggctcctcaaaagggaggcccagcagtggctgcccctctcagcaggtcactgcccttcccttctccctgccctcctagagagcccaaagctccctagacctccagaaaagtgacgtggggcattcttagttctactctctgtcccttggcctgcttgtcaactgccaggagacaaatccgcttctgtcagggtgtatct

SEQ ID NO: 57352 - DNA, 2272 bp, Homo sapiens
aacttgtggttcagaatgaaaatccagaacggcagaatgaaagcaagagcaagtgaaaaggacagctggccccgagccgtggtaactcaagagggaacacgcttaaactgcagcaagagggatttaagttagactcagggaagaaatggcccagaggatgttagacaccaaaacaagctgtactgagttctcctttctgggctacttttaaaaggcaaaggactacacaccccacccccgctgtgcccttccacctccagcttcggctggccgcctctccagcccctcgagtctcctccaaggccgcccacctgctttgctaagccgggacaggggggtgaggggtgggggatgggcctcatcatacttcagtgccctccagaagcaaacacaccaatttccacaccgggcttggtgctgcccagagagcaaatcttcaagagactagaaagtccaaagttaagtctgttttcaggagctgggcatgtcgccagaggcccagctggggctagcagaggtgcagacgagaccagaaatgctgctgcccatgtgctgctgggatcccagctctgtcccctttgctccccagtccagcataggaatagctcagaccctgcacacggggggatgggacacccagcccctgcttcagtccacacccacataccaacacccattcccatacacacactggtgccatttcccgtcacgtcccttcgcacacacatacctgtgtgcatggcaccaaaacctggctctctctgtagtccttcacaccccgtgagtgccggtctcagctggtggctgcctgcaactcccctgagtgcccccctcgggtacaagcacacccatagcatccaccgcccaaagccaagacagcttcctcctgggaggcgcctggcacccagctcgtcacgctcagccggcaggcagcgggcaggaacccctcacctgtgatcatttattgcagttcctgggccctcgggaatgccccgaggtttctcctgtccacttctccttccaccttgctgggcaccacctgcttcccctcccctcgtcagatgaccacccctgctttcacccactgccgtgaccagctgcccatcgctggactttcctgctccacaggctaatcactgagctgctcccacgctggatggggcggagctagggggcaccccttgtcctgagagtcgtgggcatcagacttgccctttggcctgaggttattgcaggtcctgccccccgctgcagacacgcagttccacagagtctcgcttcccagggctctatccctccagcccctctgagcagcagttggagactgcaaagacagagccagcccctccacttcccgctcacctcagtccccagcaccggctcctgtggtcagcttggctgtgggcatcaggtctccaggagagtcccaaggcagctgcttatgggaaagccaagagagccgggacctgaaagggaaactgccctccacgttcacgccttaccctgttcctcccagcgcagaatcccatgtgacttgtccagggactcccagacagaaagaagccgtgtgtgtatgtgttggggcgggggctgtgtgtgttggggagtgaaaggacagagaaataccaggagcagcaggagggactgaggccaaaagtttgtgaaccgagattacaacatccaacctcaggaagtcaagtcctctgtccccagcgctcccacccccatcccactcccactgtgaacccactgtctccagaccggtgccctccccgtgggcacagtcccatgatggcccctccagagctgggctgagctgctgctcccttgggcaggggaaggggctcagagactcacaccctgacctcatctcccctcctcctcctccttgcccttcccccttcccccttttcccctatccccctccagaaccatctccttcccagggatgaggagacgggtatgtgcagcacaggggacagccctctcttaccagagactccaggctataaactgagaaccttgggaggggaggtgacctcactgacgagggcaagggaggagggtgaatcacacgctggagttttccaccaagtacctgccctctgtggcttctaggcaaggccctggaccttcacaacccttctccttgggattttcctagagaaagcacccagagcgtacctcaagaagcaatgtagagaggacccaggattgggaccagacagacctgagtttcttctcctcctctatcatgtatcagtcacgacag

SEQ ID NO: 57353 - DNA, 2010 bp, Homo sapiens
aacttgctggtctgagactcaggtgggcatcgtggccctaccaatatgtgatgtcacccccagcggcccagctgtaaaattcctctctttatactgtctctctttatttctcagccagccgacacttatggaaaatagaaagaacctactttgaaatattgggagcgggttccccggatatagttccatctcccctatcccttgagccacagcctcccctcttcccttcctccctccagctaaaagctcccacctcccctgacacatattcaataaatatttgttgagtggctgaatgacatttggcattctcccaataagtgtgcttagcgttcatggcaaggattgtcagatatgaaaagatttgtgacacatgacctctgtcctcatggagcttactagcttagcacaaccaggcagccagattaggagaggcccccagggcaagagttcaggagaattcagaatgccctctttgctccagggcaaagagtcccctggaattcttgagttgattaagaatcattttgagatgaagagtcttcatggaattctttttccaaagaactgttgtatgaattagggaaccatgacttgtgttcaatttgcaatgtgcccacccatcgtcagttccaagatcagattaccctggaggtgtccttcctgcctttctcgctctcttccagtcccaaaaaccagaagtatgtgagtctaggagaggcggagaatcaaggaagggagccacatcaaatcctcgctgggtcatcgcctcccatcctcaacggggccacagcttagagaactcctgggtgacagcccccagtgagggcaggagtccgggaatgggaggggcaggagctccccacacgaaccttgcctgtggacttcacccccttccagatgcagaagtagcagatgacccaggccagcaggaggcacagagccagctcccagcgcagggcccccaggtgctggatcccatcagagatcttcaagacccgccgcctggggagagaagggttgaacctggcttactttttctgccagcctcagttttgtggccccgtcctgggacagtggagctgagcctgcctccaggctcttgtccaaaggcttctctgctctcttcacatgaggccatccttagcccagagctggaggtggacataaaggtggagaatggagactgttccaggtaagtttgctctgagtgctttgtccccagccaagggaaggaggtgcaggcacctatgtttccaaccagggtttcaggaccttttgacagcaggactcttgccctgggtgaatatcagtactggggggagggggtgggtcagagtccacactcttgcagccacagggaggaggaagtgcggagtgagagcacatatgcacacacactctctaacacggggcgggggtgcgggcaaggaaggccaggcacagccccaggagaactgcagaagtctcatctctgaaaccagtcctgcaataaccacaaacataggcaccacagaaaaaagccacttagtggaaattcttcccttgctgtccattgagagtgaccttggtgtgtactcctccccatacccttcttctgaacacacggcccacagtgggtggggaagggtctcacttactcccagaactcgatgacaggagaggtggcattctcagaggtaccattcagggagccgttggtcttctggaactccatacagtgttctacccatgggtcacgaggagggaaaaaagagaaaaatcatcagccagcctatgacacaactggagagtggggtgaaattctaggagaatgggaaggaaggtatttggcaggagccaggctaaggttatctgtacaaaacatcctcccacacgtaataacctcaacaaatgcagctcactctctcccgcacacttggacatgtgggtacatagatgcttgggtatacattctcctcaagcatgatcagatggcaacaggaaaggtgctcttcaggtcagctgctt

SEQ ID NO: 57354 - DNA, 1159 bp, Homo sapiens
ctgcctccacctccccacacaggacccacgtgaatgaccaagggctgtgggtactctgcgttcccacacaagacacagtcaacacgttccagacccacacagactcaccacgcagccctgggacccaaacattgccagacaaaggaccggggagagtccctcatcccccacgttccagtcactgctcccctccactttcccctgtcagcccagtgctttgcattagacctggaaggcaatctctcccacctcttcgtgccattcctgctaattcccaggccaacctttacccaattccagagaggcttggggaaagctgctcacctcctaatctctctgccatgtgaggagctaagctggttaccaggttccagacccagagtcccaatgccagattagtcccccagcctccagctttcaccctgggccagctccgtctctcctgattctccaaagggagggtactcaggcctaaattcctaaacaagcacgtggagcgttcggcactaggtaaaaagtgggtagaccttccctcttccctcacagtgcaaactgagcaaagtcctatgatttcaggccactggccagaaagaaattcctaggaggaagggacacgacagcccattttcatccctctggaaacattcaagttaacctccaacccagggacaatccccagttgccacagacctgggaaccagactccatgggcccagggcatctctcgtgttctcccccagttcccacacctcccctctgtattgaatgctttctctctctaaaatcattgtgagactcaagctggatgcgttcggcagctcttactcacctgcaaaaggataggtgttgctttaaaggacctcaaatcctgtagcccatgaacttatcactcctctcatcattttccctggtgacctacctctgtattccacattcctccagtcccggctgcagtctcactacaaaatcagacctgggagccccaatcctacaagctttacccataagcaaggagatattcctaacccactggtcacccagaaccctccagtagttgggaaatccctctagctagggcttcccacagagatacaaaattccctgactgtgggttagtggttgcaaaatttctgtcactgctgtggggatagcagagtta

SEQ ID NO: 57355 - DNA, 667 bp, Homo sapiens
taaaaaatatttggcatagtatattttgttcatttcttagagaatagtactgcactgggaaaaaagaaaatctggtaatttagtgatattcttagcttactaattaaactgagcttttgttattttggcatttaatatcttttgcaccccaagtttcctagcaaaagctggatttgaaaaaggaaaacaattcactaagtgaactacaacatatgttcagaatccttgtgtatattttcttggtgctctcaatattcagtgaccaatcctcccaatttgccaaggaatgacagatttctcagcatgtgggaatttcagtgccaaaactgggaaagtcccagggaaactgggacagttagtcactctagctcaacatcatgcgcgtgcacgcgtgtgtgtgtgtattacacacatttaggtaacttaacctttgcttatctgtgctaaaaggagatatgaactagtaaagccgctggaaatgcaaatactttgattgaggcaacacccccatgaaaatcttaaatcagagtggctaataaatagtaaaaatgagagttcatagtctcttaatttaccacacaaaacttctcatggaagtaggaatgggtaaaggaaaaggccaacaataagagggttaaaaaaagtgaagagaaaaagactattttca

SEQ ID NO: 57356 - DNA, 2208 bp, Homo sapiens
tgaccttgagtaatcactcaacctcttggggcattaatcccctccacacaagggatagtatctgttttccttacctcaaaggtgagattataattaaccttataggcaaacctagttatctgcaataactgtgattctaaaatcgttgatcttgagttccctacgtcaagagatttcaacatttccttccacctccactataaaccaatttttcctaaacctctaaattttagaattattgctgctccttctctttccccgctaagactttttcactgcggcaataattagtctggagttcttgtctagtaataccatccggtgagactagagctcagataaccttttcagaaaccctagccctgagatgaggcctgcaaatatttgatccaaccaggtcttgaataaagagatagccgactatcaaaccataatgaggatacgtgagggaagaatacgtcacgtcataatactgtactttaaacaccatatcggctaacgaaaggctttaggcccacggctgagagaaaagtatcagttcccaagttctaggcggaagaggcccaagagacaccactttctcgctttcagacgtgtctacataagaccacaaaagaaaccgaggcaaaaacatccagaaacaggctccagttgtctcaaaagagagtacatatgaaacgagacaaggatcagaaaagtaaagctaaacccagtgtacggactcccccattcttccttctccccctctctcttcacagactgaggtaccttgggcggccgaattttgcagatgccggttttctccgccaaaggccggatgcggccgataaagctgagcggatctgtgaactcctcccaactcggctcaaagacggggcactctggcggtggcacgaactccgccgcgtagccccccggccccacgcccgccattgcaacggccgggggggggggggggtccccgtggggaaccggtggagaaaagctggctgaagcccactaagcccgttcaagtcccctgacagaggccgaagcgcatcttcgcggacaagaaccgttcaacacagaaaccccagaatcgcttcctcctcccgtttgttattgtttcttgcaaggcttttccactgaggttcaggacttttccggaagttaccgtgctgtcaaatccctccgccccctgcaggaaacggaatccttccgcagctgcacgacgcctgtgtgtctggcctttccttcttcttctcttccccggcagcacagtgtggctgtttgtctccttgcccgccaaagttctgcccagtccaacgactccacgcagctcgcccttggtaaggggtcggggaggggcacaagctcttctttactagaggtacggattgagggaagccgacggggcgaggcggggcgaggcgcaacgaggcggggcgaggcgcgacgcgacgtgacgctttcttccggcgcggaggaatgtgtaatgccccagagggcagaggttgtgcttccggtgaggagggtccctttcccttttgtgtatcagtgcactcgaaaacacgccgggcttaatcttaagcaccgcgcctcaccgcccgtgcttcgtaatttgttttaacctaccctgctgcgtttatagcaagtagcctttccagcatttctctttttttagccctttgaatgcagatattttacagtaatctcactctgccactttatacccgcctcttctccatcaaaacaagtgcaggtctaacccatcccctaaatcctgccagctggctttagccaccatccatgaattgcttttccttttacacaggacgcagcagctctcctgaattaccagccagtatcgtctagctacctgcaggacatctcactttgataactcaaagtactttaattgttcactgtttcttcagtgttcctggtttccattaatgacttcatctattcagttgcctgagcaaaaaaaaaaaaaaaaaaaaaaaatcaagaaataatcctaattctttctgctctcacttcccatgtataatcgtgtgtctctccatccccgttaccagtatcctaatttaaatactcttactgacaacagctgatttctcctctcaaatccctctccatccacacgttggattgctttgtctaaaatccagaattcatcttgtcacttttcatctccaaactcaacaactccaaacatctttttta

SEQ ID NO: 57357 - DNA, 506 bp, Homo sapiens
gaacagcctgggaaacatagtaaaaccttgtctctaccaaaaaaaaattttaaaattagccaggcatggtgacatgcgcccagctactttgggaggctgaggtgggaggatcactagagcccaggaggctgaggctgcagtgagctgtggttacaccattgcactccagcttgggcaacagagcaaggccctgtctccaaaacaaacaaaaaacccaaaacttgtaagtagccagatagggggaaaacacctatcaagaagcaaagataagaattaacatctgacttctcagaaaccgggtatgggccagtatggtgactcacgtatgtaatcctagcactttgagatgcaaacaagaagtgagtcaagtgaaatatttaaacagctgagaagaagaaaaaaaaaaaaaaccccatcaacctagaattctgaaccctgtgaaatgattcttcaaaagtgaagcagaaatactttctcagacaaacaaaaattgagggaatttgttg

SEQ ID NO: 57358 - DNA, 2583 bp, Homo sapiens
tggcaggggtgagtacacgggcagcacggaggtcttcccaacctctatggaaggtattgccatttgtaagttttaacagagctggttggcttttgttgttacattaatctgagagccattgcttcacagaggacgtgaggctcgcagtgtgcttagggggtgcgcctcatcctttcctcgctaaatgcggggccgactcgggcctgcctttcactgcgggtgctgggcgggatcagggtgtccccgcctgctccagagtgtccacacggtggcgcgcgcggtccagagacgtgacttgggcgccgcggctgccggggggcgtttccaccccgaggaacccacgcgcaggacgggattaatgggaaacctggacccctccgaggcccaggacgggagcctcgcccgcaagtctggatgggccgaactaaaacccaccaaacgcgtgcgtcaagccagagttcgagaatcaaccgaagctgaaatggagccagcgtggggtggggggacccagaagggaggggcctccagcacaacctgcagccgaggggacggcgggcagaagggccggcagtgaggccctggcgaaggtgcctggaaaggggtcctctcattgcagcatctttaaaagcagggaccgggcttttctaatcctcgtgggccagtttaggtgcagccctgctctgcggcagagggatggatggaatgacctgagggccctcccttctagcgggaggagaggatcagataaagtcctaaatcctgcagggggtcatccttttcgcccacagcccagggactgggagcaactccacaggggtcagggtgacagaggagtggggagcgcagcagggtggcccccgctcccgctcagaggagctggccctttaaggccaggcccaggcgggtcgggaacagagacccgggaatgtgggctggactggggagcagagccacccagcatgagtcattcccgtttcgccggactcttcgccgctggctctcgcttgccgccctcccctggccctggccctggcctctgcgccctccctgcagagctggtccgggtgggctggcggcctccacccgccacaagcgcacagggctctgcccactccccgccccttttctgctgatcctcgaggagcaggggaccggtgggctaggactgctggttgctgggcccagctctgcctctgggcttggaactttggtgctgagtttccacatctataaaactggaggaaaatcccatctctggagggcagaggccatggacagcagaacgacactttgctccttcacagaaggaaggacagaatccaagcggttcccattttcccaggctgagatccctctctcaatgaggctggctctcggtatcttcctcaggtctcattctgccccgccccacttgcccctcccctgccactcaagggcggcaggacactgacccaagactcatagctttgggctcccagagtccctgttcaaggcgcggttgcctgtgggaaaggctgcccatcaaaatctggccaaccaatgacacctggacagacggggagtttggggcggcatgaagctggagcgcggccagtgcagggaaggtgggagtagatccagagtttgatctggacgcccttgggcatctgggcaacaagaggacgtgggtttgatgattggcatgggatgaggcaggggggtgggggacaccagagacccagcggtttgccccattcctgggcctgcctggcagacgtgggtttggtgattggcatgggatgaggcaggggggtgggggacaccacagacccagcggtttgccccattcctgggcctgcccggcacagtcattaccctccctcttccgcgccctcctctctcgttccagctcagacttccctgtcacctaggcctcttgccaagtcccagctcctaaggctggtgcgattccatcccttgaagtcaaggattgcttcattgttctgccagacagccctttatcccttaatccttgttggcctatatttttgtttatttacaggacttaggttggataggaaaggaatgccttttttaacagaaaagtaaacatgtttttcattgtttatcgactttatggtcagtggggaccataagctccaacagatcattctgctctttcttggaaacaagattacagggctgttctcccagagggccatggaggttgggtaaaccccagagtggtaagtaactgccctaccaaaaagccatggagcccgcagatcagtgtgtttaggccctggggcctgtggcaggcagtgtgtgtcccaagggaagtataggcatggtgaggggagttgtagcagcccagagggcatcaccaaaggcaccttgaccacattccagccctgctttaatgagtgagcaatccgggccgggagcactggacgccttttcttatcatctgcgaggtcgaagggactggaacacaggcttccttgggtccttcctagcacggagtaatctagggatgggaaagccggctctgagcggagaatcccgggggctgaggacatcgctgagaggccgctgcagggcatg

SEQ ID NO: 57359 - DNA, 1538 bp, Homo sapiens
tcaccatgctccccccagggagagcctcccctcctttctagaccctgtccccaaatgcactccaccaaggccctgtttgaaagaaggtcgcctgctccctggcctgtgctggccttgggcgttgttgagtcctcctgagacggctccttctgctgcccactttagcacacggaccccatcttccacaggcctgagtctccatggagcctagctcagcaccttgcccacatgaggtacacaatgaatgatgatcgcattgaatttttatgagacagctttttcaaaaaaggcaaaagtaaggctctttaagggtggggcttcaggcacagtggcttctgggtgggggagaggagtttggggagtgaatctttgctcttaaacacccccactgcagggagagccctttttcccctagatcctgccttttctcagcagtcctgagggagcctcagggaatgaatgactggggctggaagctgcagctggtcttcaggccaaaagctgtaaaagcccagacccctgaggccttctgtctggggcaggccgcatgcaggctcctgactgcagccaagagcagtgatctcgcccttaaaaatcaacagtctctaatccacgtcggggtggggtttcttttgcgtgttattccagcaataatacgtaactggtccagaaaccgcctctgagccctgggcacagtctcactgagagttccagcccttgccccgagctgcaaactggggcctaaagctgcagcaccgagaggccacgtggggcgaggcctccccggaaggcctgcggcgccgccgttgtccaccagggggcgccaggaaacggcgcggcgaggccccagctcaacccgcccgcgcgggcacacccgggctttgacccctttgtgatcgaggacacggacgggtttctctccaacaaaagggggccataaattacaaacggaagcagagtgtgtagggaagaacaggaaagcacgtgcgttgaaaccggaactcgggcctgcttgcttgcttatttattttagttattactgttttcttggggcaggcccttgctctgtcgcccaggctgcggggtggtggccccgtcatagctcactgcagcctcaacctcggggctcaagcgaccctcctgcttcagtctcccaaagtgccggggctgcaggcgcgagccgccaccccggcctccgtgctctttctcagggagcattttccacctcccctgcaagaggccgttttgccagtggctttcagaaaagactgttgtcatctcggggttcagagttaatcgtggatttacctaccacacagaaatttccaaagaatcgatctgctccctctcaatatccaccctaaacaagagcactttcccaatcagcgccttgtcctggggcttccagacccatctggccttttgctctttgctctatgcccacttgagctgtgaggttctcagagacattccccaaagccctcccagccgatctctgctgacttcaatcctactcatccctcaggggctaacaaaat

SEQ ID NO: 57360 - DNA, 1034 bp, Homo sapiens
ggcaggcaggcatgctagtgtgaatgaatgaatgggcgcaggcaggcaggcatgctagtgtgaatgaatgaatgggtgcaggcaggcaggcatgctagagtgaatgaatgaatgggtgcaggcaggcaggcatgctagtgtgaatgaatgaatgggcgcaggcaggcaggcatgctagtcctgcctttagcgctggcccagattcaggctagaagtgccctttccacagctcagggcgatgccccagggcagccaggcaagtgtcaggtccctgctgtgccttcaccctctttctaaaaatactaacgagcgagagacctccaaggccaccaaacagatatccagttgttctctggggtcagtccttcacagcctgaggctgccacctggcacctgccgcctctgggcctcccgcctgacagctgacccctgtcatcgctgtgactgttcactgtaaggcaaagtccagtttggcagaggtggggactcctgagcagccaggtccagcttggcccagccttgcccatgctgaattgtgggataccaggacagcttgggggtctccaaccctgagcccaaccaaagcaaacccttcttttttgctggggctctatttccacagccatgaaatggaggcggtcaacccctgcaaagcctcgaagtgtgagtggcagcctggcttgaggacgcggacacttagaaccaggacagcggagtcgagacctggccctgccccttcatagctgcatggcttgggagctctctcagtcacctactaaaaatggggatcgtaagattacagaacagtgatagcattaacctatttttaaggatctatatttatatacttagatcaatctgatagggtgcagactaaaatattaagcatcgtcttgaggcgataggatatcagatattattttctttttttgctttatctgtattttctaatttttcttcaatgaacatttggagtaaaaaaaaaacccaaaatgttaaagcaacaaccagataattagtacttaagtatttgt

SEQ ID NO: 57361 - DNA, 923 bp, Homo sapiens
tgctgcaagctcttaacccttagcgtgagcagatggtagaactgcccatgccaagaggggtccataccaacttccggaataaacgaggccaaagggaaagagtaggttcgccggggacaatcccacaccaggaagccccacgattcaacagcaccacccaggatttcagtgtcagtcctatcctcatcaggcaggcaacggttggaggaagggaacggttggagggaagggaagggaacggttggagggaagggaagggaacggttggagggaagggaagggaacggttggagggaagggaggctgagcacaggcacggtcacgctgtgttgcaccctggcctgctctgcggatgagtcagcagcatcgattaagcacccactgtgtgcaatgtcctgaactctgtgctgagatgatagctctgtttgctttccagccaatcagcaaatatttattgagcatctgtctatttggggcaagtcagagtacagagggcatggcttagaaaggaatagctcagacggagtttgtgattaattacgggaatgggtgccaagtgagagatacaaagggtggaagagcaggagcgcctccatccaggggcgtggaggaggctctgtggatctcagggccatctcagctggctccagacagacaagaagactccttcagtgttcttctggtaatcacagaagctctgcgctgggaaccagtaccctaacagaggagactggtaaaaggtttccagatgagcattaatgtaacccacagtaatttgcatggcccagtaaaaaggaacatatggggcccctcgttcaagttgattaagggtgagcctcaggaatgaagtctaaaacaggaaaaaagaaaaaaagactcggaatttcaagatggcaaaagcagagaattagaccaaatgcagg

SEQ ID NO: 57362 - DNA, 1334 bp, Homo sapiens
atggcgtgaacccgggaggcggagcttgcagtgagctgagattgcaccactgcactccagcctgggcaacagagtgagactctgcctcaaaaaaaaaaaaaaaaatagggaaaacaacaacagcagcaataggggacttgtcccagctactgaggaggctcaggcaggaggattgtttgagcctaggaggtctaggctgcagtgagtcatgatggcaccactgcactccagcctgggcgacagagtggcaagaccctgtcttaaaaaaaaaaaaaaaaaaagacgaaggagagaaataatgtttgaccatggaaggtcacacatttttgttgtagctagagcatgatccaagtcgattctgagtctgggcctctttccactcccagctgtcctactagcctaattcatctggcatcactggggccaaaagctacaaagtccattttgagctctaactttgcagagtcatttccatcctcctgccttccccatcctgacaagtgcacatgcacacacacattgccagacacccagcagacacagaatcaatgcttttgcgtgagtgaaacagcccctctggcagccctcttcacctgcccagtccccagtgcccagcacccagtgctgagctggtgaagatcccgtggccagaggcacacttaccatatacatcatgactcagatcccatttgctgacttggaactgaagcctcttgccccaccaagcaattactggagaacaggaagtctcaacggaaaatgaggtcagcctggtggctgagaggaaaagggtcagcgagcacagccttctgcccccgtgggtccccacagcggccagcccagggccctgcatgcagcagatgcccaccacagcttcactggtgggttagctgctctgagcgactctgttcagcccagccacaggagggggttaccaggcagggacttaatatgtggctctagagtctgaaggagacaacttcaactcaaccttgtttagcagaactgggctatgacaaggacaaccacagcactggaaatctattctttttttttttttttttttttgagacggagtttcgctcttgttgcccaggctggagtgcaatggtgcaatctcggctcactgcaacctctgccctccaggttccagtgattctcctgcctcagcctcccaagtagctgggattacaggcacccaccaccatacctggctaattttttgtctttttagtagagacggggtttcaccatgttggccaggctggtctcaaactcctgacctcaggtgatccacttgcctcaacctcccaaaatgctgggattacaggcat

SEQ ID NO: 57363 - DNA, 1195 bp, Homo sapiens
gtgggtacagctgcagcatactgcacacacattaagggtggcacctctgtgcccagacctgggcttaagtggaaccagactcgcctgggacagactttgggcgcagtgacaggagcccatcagctgctcaagagacccctgccaaaatctcaactggagctgggcacagtggcgcatgcctgtaatccctgggcacagtggtgcatgcctgtaatcccagctacttgcgtgcctgaggcaggagaacccgggaagtggaggttgcagtgagctgaaattgggccactgcactccagcctgagcgatagagcgagactccgtctcaaaaagaaaaaaaaagtctcaatcagctaggccaagtccttcctgtcctgtccctgtccctgccgcatcctccccgccctgcccccggctcctctttcacaccctgtgccagacagaaggcctgggagtgaaaagactggccatggggacagagagctggatccaaaggtcaaggctgagtttgccagagcctgcaggatccctgcaccgctttactggatccccaggttgagctgagatgctgctctgggtggagaaggggccatgagcctctggcaggcctctgtgtcacacctttccaccagggaaaactgggtgtggatgtttccccttcgtatgtactctgagatctctatgaggagtcttcctagaggggaagggggaagcctcctcatagagatctcagagtacataggaaggagccaggtctttccgttcttctgcgtctcctcacagcgtcacctacaagggtctggcacacagtggacactcttcctggcttttctggtacagagtgaccaacataacagttaatagcatttcctcattttacagacagggaaagcaaaaaacataagcatggtaatgcatatataatacgtgtctatggcagaggcattcgaaccagaatgactccatcttgaataggggctggtaaaatgaggctgagacctgctaggtggcattcccaggaggttaggcattcttagtcacaggatgagataggaggtcagcacaagacacaggtcacaaaggccctgctgataaagcaggatgcagtaaggaagcctgccaaaacccaccaaaaccaagatggcaatgaaagtgaccactggttgtcctcactgctcagtatatgccaattatacat

SEQ ID NO: 57364 - DNA, 2629 bp, Homo sapiens
tgctgggattacaggcgtgagccaccgcgcctggcctgcctctacctctgatccctgggatcagaaatgagaaatgcaaagattgtccctgtgttatgtgtgtactgtttgtaattgtaattcacaatcccctttcttgctcctcaccccatattcaattaagagagaaaggtgaaaaacacaaagcacaaaatgtttccaggaaactatctgaaactcctggaaggctagatttaggtataaacagagtagaactccagatttctgcaatgctccttaggggctgagcttcctgcatgcccttgacaattagaggagttttttttaatacttcaaaattattccagaaaggcatgcagatgagaagataaccaggttatgaggaagcccaaggtatttggtaaggatgctcaagttttggggaaggtcagctgaaatagcaatttgtgggtggactattagcagggagttgactggagaattaatcagacgttgaagggacatgggggacccgggaggatgaagtctgaactcgggctcaggatatggaaaaagattgagtaaagctgagattcctgtgtgcttaaagtcctaaccagccccagggtgtctgaggcacgctggtaagtagaatcagagattccattcagcaaaagcagacaggaaaacaaatctcttttctttgtttgtcctggttgaaaaccaaacacggtagccgtttgatgaaattccagtgtcaggagtgtttgggcagggaagggagggtaaaattgcagctagcctctgaccacagggaaatcagcctaacggctccattcaggccattcttcagccctgcactctggaatgttcacagggtgtctgtgcatctcccctgattccagcccacaggacacttgctctctctttcttgtgaccccaacatgtcagctggcaagactcaacattcctgtctgggactgagcagcttgaaccacttgtatgagtcacaggtaattttcagcagtgtgagaaaacactgaatgaagagaagtactaggtcctgaggaggcttagctctggggtaatggagatgggggtgggggtggagagagggttctaaaggtcaactgcaatgtcccccagttttcatgtatcttcatcaacatagacaaatcccagcggatctaagcttttgaaaacttgaccttttgtaaaaatgaggaaactgaagttatagccctttctggagtgtggaagctttggaaacatcgcaccacagtgaagcaagccggggagggtgccagcccaaaccagaaccaagtgtgggcatttcatgccatgaacacaaaaggttagtgggccgggttgagcttgggcaagatctcacaagatcttagatccagtgtattttctgtcagtagatttcaatcagaaaggtcgtgaaatatacctcagcctggcattgggcttggggcaaagatctaggactttcttttccagggaagttctctgagaactgaatcaattcctgccctctaatctatcttgcatcccttcctgaaccaacctccctaaaactgtgccccactcctccattaaaaaaaaacaaggccgggcgcggtggctcacacctgtaatcctagctctttgggaggccgaggtggatggatcacctgaagtcagcagttcaagaccaacttggccaacatggtgaaaccctgtctctactaaaaatacaaaaattagccagacatggtggcacgtgcctgtaatcccagctacccgggttgctgaggcaggcgaatcactggttccaccaggaggtggacgctgcagtgagccgagatggtgccactgcattccagcctgggcaacagaaagagactgtctccaaaaaaaaaaaatcatgtcatttaaaaacttctgaggctgggcccagtggcccatgcccgtaatcccagcactttgggaggctgaggcaggcagatcacttgaggccaggagttcaagaccagcctggccaacacggcaaaatcccgtctctactaaaatacaaaaattagctgagcgtggtgccacatgcctgtagtcccagctactcaggaggctgaggcaggagaatcatttgaacccaggaggtggaggttgcagtgagccaagactgccccactgcactctatcctgggtaacagagtgagattgtgtaaaaaaaacaaaccactttagagttttccactgtctgctaaatcaagtacacattcctttgcctggttatttaaaaatcccccataattcggccccaccccacctatccagttgtgctttcccccacacacaccgtctgatctggtcagaaaggcctttgcactgtcccagatagcttactcattcctgcctgtttcattcccagttttctccacattcattcctgaatctgaatttattcttctttaacaaaaccaaaagaccctaccttaggatatttggccaactacttcagtttgcatttctccttctccaagtaattaccaagtcacgccttgatatatatacctcccccaatagactataagccaccatgagttcagcacaacttatgtaagttatagtgcctcacataagttgtgctcactaaataaatgttgat

SEQ ID NO: 57365 - DNA, 5186 bp, Homo sapiens
gcctgagatgtgaatcccggttgagccattgactagctgtgaccttgagcacattcactttcctgaacttcaagttttctcatctgtgagtcgcggttaataatacttacacagtggccctaaaaaatcagagaggaaaaaaaagtctatgcaaaatgcctgcttcgtacaaagggcccagaagtggtagtttgtttgtttgtttttgtttttgaggctggagcgcaatggtgcgatctcggctcactgcaccctccgcctcccgagttcaagcgatcctcctgcctcagcctccagggtagctgggactacaggcgcccgccaccacgcccggctaatttttgtatttttagtagagacggggtttcgccatgctggccaggatggtcttgaactcctgacctcaggtccccccgcctcggcctgccaaagtgctggaattaccggcgtgagccaccgcgcccggcgctattattattaataactaagggaagcccagggaaaactcagcagaaatcaaggactctcgtgagaaaaaaggaaccgaaatagcccagactggcgctccccggactctgcagcgggcggcgctgcccacggaggggggcgggctgggagtgggggatccgggggagacgaaggtgaaggagctgcggggctagttctgagccgggaaaaggtgagggcggccctgggcctcccgcgggggaaggaagagatgaagccacgtgacagggcccaaagccgggccccgagcgcgccgcagaccggatgcgggaagtgggctcggggccccgctcccctgcccggctcgcccgcccgcgtcagctgacctggcttccgcgggccctgcgccctcgcgctcccgggccccggccgcccccacgccccacgccgcgcccgccggcccggccctccctccccagctggcccggccgccgcggcctcttccgcccggcgcccgcgcattcctgccattcccccgagtcggcccgcgggctacggccgcctgcggagcgcaggaaccttcacctcccgaggacaggcgccttcccctcgggacccggctcccctgctgcctgcgccgctctgtccccctgccgctgcccaagcctccagcaggggccaccgagggctccaggagcaccccaggcccgttcttctggcccacagcgcccctcctgtgaccctcagcgaccctcctgtcctgccctccggcggcgcggctgtctggagactctgcaccgtcgcggcctcgcagcctcgcagccccgcgccgggtggggaggggagggtggcgttcctgagtccgcggaggaaagggtcgcagctgcagtcgcgccagccctcgggcctacatccgctccgccgcgacgcggctcacaaactagggaggggagaagggaagaaagacccgattcgggaacacggctttgtccctggaactgtacctcatgtcccctcacttaatcctcccaagacctgtggggcgtgtcgtcattttagggctggagatgaggaaaccgaggctcggagagatgaagcgttgtacggccaccgagcggctgctttgcaacgaagccaaagccaacgttttgttcttagcggcggtcgtttgagccacgcctcaccgcaacgagtctgccatcagccaagaggtcacatcttttctggaactcgctcccccctcacatcatgggagcagtcagtctactcttccagtagaaactgttttgccacttttggggggaatcttgagctaccagctcatcgctcaggtcttagatgacactttccttgaccccaccgggtgctccagcgcctctgcttccggttttcatagcccttataatatcacctattgcaattgcccatttccttgtctgtctccctctgcagatggagtgaaggtacctgagcgcaggaaccatggtcttcattgctgcctcagcattagcggaagtgccacgggccggctcccagggggccagagtttcccaggaacaccattgagtaccactgaactagagtctgcaagttaaagtaaggcaagaaggaaaaccggaaacaactgtaaaaacctgacctttcgtcaccttaatactggccatcatttatcgagtgcttattatgtaacagacattgttctcagtgtgtgagtgcagtgttcctcaaacctaaatgtgggcctgaatcgcagcggatcttggtaaaatgcagtttctcattcagtacctctggggtgcggcctgagattctgcatttccaacaagctcccaggatactttgtatagaaaggctttggtgtattaactaactcgatcttcttaataatcctatgaaatactactgctattcccattttacagatgaggaaacagaggttaagcatatatgaacttacatcaaaataaatagactgcagggcaaggagggaggggagaatagtgtgggcagtgtacagtgcagaaacaaagttctaggcagaggaaaaaggatttacagaaagcctggcatacagggcagggggacggggcctgcacacggggctgtttcaccgttagacgttataagcacagtacttggggctatgggcttcctgaaggtcccaagtatttgagacctgaaaaaaatttattgacacctacataggaaaagtgaacttttaaattaataattccaaaattcaaatcacgaattgtttcaaaaattttacatgatagaattcatatttagtaagcgatacgggtatattttaatgcatttgattttaaaaacggggtagggcctactaagaacaggccaagccctggccccagtgggtttggatataatcctgagggcagctgggaaccactgagagaagcaggagaatgttctctgtggctacagtgaggagaatggattggagggaggccagactggaggcccagtggctagagaccagataggcagttacagtcttccagactgcgagacaatctctctttagtgccaagattagcataaaatcatagcattatataacccaattattctttgattcctgcatccccaatctgactcagcattctaaatttacttaagatctggggacaagggtttttggcaaatccttgaaggcaaatgatgttacagtcaatcagtatatgccttgagccagacagacatgggtacgggcctcagttctgctgcttgctagctatgtgactttgcacaagtgatttaacttctctgggccttggattccttactggtaacacgagcataatcgattcctcacagaattaagtgagaaaactatgtatgtaggacttcttatggagtgggtacttagaaataaatggtagccgttatcatttatgtgcctttgttctgaaatctgcttaagttttctctaggaagtaacagagggtagaataaattatttagtattttcatcaatcttctgagataaaaattattatcctcattttgcagataaggaaaagggctcagagattagatcacagctctgtgaagtaggggcacaaagtggtcaacctggaagagctggactttattttgcttgcacttctgtccatgcactctctccagcagttgacatttgccctctttgatggctccacgaccaatttcccttagtcatggcatgagtcagctgtgagggctgatggcacaccaccgaatactctgctgtggcgccactagcctccatttaccttcttctccaacgttttccagcctccctcataccttgccccccagttttatagcttctggattttccttattaaagagcttgtttctgagactcagaaccgcccccgactgggatgtcttccagagtacctccctttcaagggagcagataagtaggtcacatcgggatggcgagggaggaagctgacttcttatgggaggaggaaaaatactgcaggtcacatggagaatggaaaacaaaataacagggtttctctcttttcctaattctctcacacaatctcacagggacagcccgctgccagccactactactgtgactagcattctggaaacagcacaggcagtactgatttcttggaccttgaggacactagtggcaacttgaggataagccttgtctaccctgtgctcccctccatcctacctgcctcctcttcaggctactccatagcccccaggatatttttttctcctacgcagtgaagcgaaatctcagcttttacaggagcgtccacctcttggactgccccttgagggcctgaaagcacagagctctgcagggaagctctgtggggcaggagggcactgcccgtgagtgcctggagcagcccaggatcccatttacagagactcctttgcagcaaccgggttaggtcatgggctttgcaagattcctgctccccttcccaaccctagtgaaggcagttcacaacaaggaatgtgggtgagcattaaattacgtagatcaccgtgaaagccagagaaaaagagggacagaggaagggtgcggcattaaagatccaatgctaccaaccccaccctgccccactatcccttgggacggagccctgtttgaatcataacactgggcggtcacatttctaggaaactgcagctgaagaggaaaggtcctggttgtgtgagtgaggctgtgtacagattaggactgaaaatgtgtatccgggcagacaattggtctctggactccacacccgaggcacaagacaagcacacaaaacaaaatgaccaaagcctgacccctcaaacctgagggtaaacaaacctgcttccctggacaagggttgtggaaacagggagttcacctctggagaggcgcaggggttttccattctcctggcgtggagcctggtcaacttctagctcagagactcgctgttccaggatactgggagctctttcacagaagcttggaggtgatgctgcagactttgggctggcactctctcccacctgacttccacattgccccctgccctccctacccctgttcccaaggccctcaaactgttcaggggtgccaggcccctctgttccttctcttccacccctgcagaaggcatattcccccatccctcaggtgtctgtgcccaggtgccccgtgggaaagcccactcttgccttcagtagctctcttccctctcctgagacgcaaggctggg

SEQ ID NO: 57366 - DNA, 613 bp, Homo sapiens
acacgcacgcacacacacacacatcattattgctacctgtacggtggagttcaacatgttgttgataataactcaccatcacctaaggagacagacctagtcttaactcctggtcctactatttactaggggtgtgtgtgtgtgtgtgtgtgtgtgtgtgtggttacatagactttgttttttagagctgttttaggttctcagcaaaatcaatcagaaagtacagagagttctcctctatcaccccaactcatggcctcccccactgtcaacatcccacaccagagtggtacatttgttgcaatcattgaacctacattgacacatcattatcacccaaagtccacagtttacattagagttcactcttggcatgatacattctgggggtgttgactagctgtgtttttgagcaacttactttgcttcctttctccctgtgaagatgggatcgtagtgcctactttagaaagatcactatgagaactaaattaaatcagatcatgcatatcaagcaaattacctgcctggcacagggtaaaagaacccagtaaatggagctgatgttaatattcatgcaaatcccctcactatgagcccagctgtgtaactg

SEQ ID NO: 57367 - DNA, 3835 bp, Homo sapiens
tctaaagcaatggaacactaatattttagtactctagttgtccctgctgaatcggcattttaaaatgttcgtaacctgtcagcttcatgaaacctaacgatcattggtttaaaacatttttgtaaacttgaaagtgtagcttgtgataaacaacaaaaaaagaaagaaaagaaaaatagggttaagtattttacgtatcagatgaattaacatgaactgcagggcaagacttctgtaggtggagctcatccgataactgtgctaaggaacctcctgccgagttccttgctagctgctcgctcgcagcgtggtcctcggccccgacgcgcgctttcgagcttgttccgcagcgggcgctgaagagaggcggccgcgtccggacgctctgatgcggttgcgtacgttttcagcgcttcccgctctccaccggttggactgaggcttttaaactgcagtctgctcccgagtccggcttcctactcggtctggtgcaccctggtgctcgtcccctccacatcttgagtagttgcgaagagcacaggggtccaggcagacaaggatgctttcaagaaaaacattccatggcggcaagccgcatggatccacatttcccgggcccagagcctttgtagacattgcatgtggacattcaggagctctagagaaagagggggtgttgtttcacgaagccaccagcagaagaaaggtggaaaataagtttcaaccaactacaaaggcagaagtcagcccagccccccaagtgtggtcaaagacccatagatccgtagaccttatcttttcttgaatccaccgctcccccaaccccccttttattatttttcagacaaagcaaagatagagttcactaggatccccgatttcagtaaggcagcccttttttgagagccagaatatccgtctcggccgggagctgagaatgtggccttaattgatgaggggaggaggatggaaggtaatcctccgtgtctcctcctccaatccgtttaatcaatattaatttcatgcacaatcttcacaaagtttcttttcccctcctccgactcagagctcaggctccggttatcctgctttgcccttcccttccaccctcacagccctgcagtcactcaacactactgaggctctctccattaaagatgaacaacagatcatttttcattgcatggcaaccctaagagctctctagcttagcagagcatgatgggagtctttccatccccccccccaccccccgcccgctcgttcctcttcttttttttttttttttccttcctttccttcttccacaattaatccctaaataatgattttcctaagctcgcgcggacttcgggatggggttgagcgacccgtgatgacgctcccatcagcctttcagaagggacggtttccaaagaaaactacaactcccacgaggcattaggctacagcaaccgcaaggcatcacggaagtcgtaggcacttttcttctaggtcccgttcatccccgccaacccgtaaactataagtcccagggtgcctcggggctagcacgcctgcgcaaaagccccggagcgagttggggggtggggctgctccgggcggcggggggcgggatccgagcgggctgtgtggaggcttcagactcccggcgccatttagcgcggagagtttcccgggtggacgcggctcctctctcggccactccgcacccccatcttcggtgacagaaggcgcctggtgggggtggctgctcttttctctccctgttccccctcacccagtcctctaggtctcctctcctcttgcctcagagaagcagcggagctcgggccccgcggtgagcggccctcccctccccgccgttccctcctccgtcagcccccggcaccggcccgggaggagacgggtttgccaggcctggggcgggcggggaggcctcggggaagggggggcccgctcctcaggcgccgaggctccgaggctccggcccttcgcctctgggcgatgggcgacctgtgaggccggtccccatcgctgggggcgcgtgtgggaggaggcggccgcccgagtgaccgggagccgggccgcggccttccctcgcccgcctcggcccctcccactcctctgccccggggccgccaccgcccgggcgtcggacctggtcccgtgctcgcggtgccgccgccctctgggcctagcccgcccagctcggcgagcggcggcagtgggagccgcgtccgccgcatccgcctcgactcggtgccggcccctggccctcccctcatgactgcggcgcctctgctgccaccgcccgcccggccgccgctcgccgcaggatggatgcggaccgtgcggcgctaacccccgtggctcagctcccgaatcgcccgccttcgagccctcctcgtgagccgcagcagcctcggtgccagcccccgccgcagctgggcccagcggtccgcctgtccctcgttgcggcttgtcggtgctgagtgaggcgtcgtccgggtcggcgcgaacccgcccggccgcggttccctgcagacctctgcgcgggcggctcggcccttcacgcccttttcgttcacgaatccgagcccgctcgcctctctccagcgaaccgaccatgtctggcggcgccgcagagaagcagagcagcactcccggttccctgttcctctcgccgccggctcctgcccccaagaatggctccagctccgattcctccgtgggggagaaactgggagccgcggccgccgacgctgtgaccggcaggaccgaggagtacaggcgccgccgccacactatggacaaggacagccgtggggcggccgcgaccactaccaccactgagcaccgcttcttccgccggagcgtcatctgtgactccaatgccactgcactggagcttcccggccttcctctttccctgccccagcccagcatccccgcggctgtcccgcagagtgctccaccggagccccaccgggaagagaccgtgaccgccaccgccacttcccaggtagcccagcagcctccagccgctgccgcccctggggaacaggccgtcgcgggccctgccccctcgactgtccccagcagtaccagcaaagaccgcccagtgtcccagcctagccttgtggggagcaaagaggagccgccgccggcgagaagtggcagcggcggcggcagcgccaaggagccacaggaggaacggagccagcagcaggatgatatcgaagagctggagaccaaggccgtgggaatgtctaacgatggccgctttctcaagtttgacatcgaaatcggcagaggctcctttaagacggtctacaaaggtctggacactgaaaccaccgtggaagtcgcctggtgtgaactgcaggtaaagccccacctactttatttgacggtcctttggatcccaaatttggctcggcgaagccagttgatcgagttcacccttcacttggcattctctgttggactccgagtgggacggggaggccaacttttgaaaggggctgaaattaggagaatgtggagcatgtgcctaggtgttgggataggataagaattattggtagccagagggatttgctaccgggcagcggtggtgaaggtcatcttagtacaaacgaattgtctcctggtttagagtctggcaggaaacttggaatgagtggggaagttgaaagtacagatgcttcttcttctgtgcatttcaatctcatcaaaggctctgcagtgatgagctgcgtctgggtgtagaagcgtgttttcattcctgagatcaggctgttctttttaaatgagaacaaccttgtacctt

SEQ ID NO: 57368 - DNA, 2018 bp, Homo sapiens
ggattacaggtgtgagccaccgtgcccggccaatgatcttttttttttttttttttaaagtcattcgtagaaattggaaggaaatatctatcgtgctaacattcattagagtttaagattatgaatgacttattaaaatataaaatgataaggacagtacatgtaaactctagaacgaattttaaattcttagtaatactggtaatagttattaatacaggtatgacttctctctcgtgctgtttctggtgaacaccaccacagggtcacagtaaggttctaaaaatatgagcaaaagctggtactaccaggaaattcaaattccatacctgggaatctcagaactcagggaggaataaacattacagggggagcaaacaataatggggagtattgtttgagaaataagaaattaagaattttactgctctaaaatgtaaaagtaaaacaggtgaagtctggattttcttttgtttttatgaagttcagtgggagagcattctcttctgttaaaattgccactaattatgtgttttttctaaatcatattgtctgcttttctccaaaacagttgaataatgtactcattttcataaaattttagaaaaattagtgagtaaatttttggcagttattttatttgacatgtgagtggtatttgccttcagatttcgaattccctgttgggaaagtaatatggttatgttgctgtgactataatattaaaatgcacagacacactataaattccctttcccttaattttctttgcctttcttttctttcttttcttttctgttttttttttttcttttttttttttgagacatagtttcactttgtagcccgggctggagtgcagtggcacgatctgggctcactgcaacctctgcctcctgagttcaagtgattctcctgtctcagcctcctgagtagctggaattacaggtgcgcgccgcacctggctaatctttgtatttttagtagagacagggtttcgccatgttggccaggctggtcttgaattcttgacctcaagtgatccacctgcctcaccctcccaaagtgctgggattacaggcgtgagccaccgcgcctggctcctttcccttaattttctgaaagaaaaattcacatacagccgtgtgaattgactggactgtgaaattaaaataatggatttttttggtctttatactgcaagtttgagaaataaagaacaaagcattttctctgtggatgcgaagaactctgtacttgactcagcttcctttttctcttgcctgcattttttgtttacttcactggcttgattagtcataataaggctcagtacctctgccattcccaatgttaagcaattttttaaaatttggaattttgtggataatcattaacagagttgcttaatgggtaatgttgttttctttatggaaataatttgaggcaccttttctggggttcttggcaagaaatatgagtttattatggatatttaggaaagaggatgtagaaataaacctttgtttgtagtatgaagctgtgataatctgccccatctttgtctaattccgttttaacttctgtccttaacatgtttctcttcttaatcagttgtcagtgaagatttatttatcaggagatgggaatggagtattttggatatacttcaagttttgaatgataaccgttaaaatacatacaatgttttaatagtgagatacactgatcacaaaaatatggtctgatttaactttattttgtggtacttttcttctaagtttagacagatgatagaaattcacaaaaatttcagtcatagttatggccacagttaggcattcccaaaggaagtgtgttgcattcctaagtgtagtgtgttgcatgcactactgagcataatgggaaaagaaaagtgctataaaaacctaagtaccaagtaactagctagaaaaagcttttaatgggagagctggcatggtcattaatctggtagaatagtatttgaggaaacagtt

SEQ ID NO: 57369 - DNA, 889 bp, Homo sapiens
gtctaagttagaacccaaaattcttttttctgaaatttaaagaagaaaaaaaaattcttttcgccacctctgataatatcgatagtccaaaattaagaaaatgctaacttctcctgatgacttcttcaacagcctatttcagcctgtgaaacatattcaggaatacatatgggagaataaatcaatgtgaatggggtagctgccataaaaataatgttcttaatttgtgtaattattttcagttttcaaagcacacttacaatatgtcgagccctcagaataattcttagctattcaggaaagatggtgttttcattttacaggcaaggaaactaaaactcatggcagttactttagaaataggagtgcaaaagaagaaataagcatggcatgtgagaataacaagagtccttatctgtagtgggttgtttttggaaagtattgagaaataagctggatccaagggactttggaatttggatttgatgtaatggagcattttccaaacttgctggtcataagaaatcccttccttggagactggggccagggtcctagaatcctttcgtaacaagtgcccctgaagattcttgtacttcagcaaagttggttaattatgcatttactatttttgagcaaggagcttggtgtcataaaaatagtgtctgggggaatatctttatctaaagggtaggttgaagggtaaagagagtcatcaggcaatgtttattttgatatgacgtagttgtggcttttattagtttgtgaccatggaaatgagatatggggaatcatggaattatagagattgcctgggaagacaaagggaaatagggaatgagtgatttgtggagagactttataggcttggacatatattgagtctttg

SEQ ID NO: 57370 - DNA, 1698 bp, Homo sapiens
catatttaaatacagcagtactgagttttctgatatactgtaaataacctaaatgctaaaggattcatatagatactttgtaattgctactttctctaatggattgtatgtatatatgatttgaggtataccctgaaagaagcataagactcagttgactgaaaaaagggggcagaataggaaaagtattcttgttggtagaagtgttcactaaagtattcagtgaacaagtaaccagtttgactgaacttactttggggagattgggtaaagatgtgggtggaagttaaattatgattttcacaccacttttaaaagcacaataacatggaccagaaataacattaaactagatgctggaaaatctggattctagtttttgttttaccattgattcggcccgtacttaactggagtataaattatatttatcttctaggtggtgaaggtggtgcagtgtatctagcagattgcctgatagctgttagactagatgagacactccatagtcaactagttgaattaatggattaattctcttttttttttttttttttttttttgagatatagtctcactctgtcgttaggctggagtgcagtggcatgatcttggctcactgcaacctccgcctcccaggtttaagtgataactcctgactcagcctcccgagtagctgggactacaggcatgtgccaacatgcccagctaatgtttgtgtttttagtagagacggggtttcaccatgttggctaggatggtctttcttgacctcctcgtgatctgcccgcttcggccctccaaagtgttgggattacaggcgtgagccaccgcgcctggctggctaatggattaattctaactttgacatagaattaacatttctgttatttgaacaaggaaggactcttaatctggtttattctagatctgtgatcctgtggtcatttagtaggtgtggagaactattaaccgtttttgagcagtgtgattatgagttaaatgataccagatgattggaaatggttaaatgtcagatgcttaaatggagtcagatggtaggagctagccacaatgtaaaacacaaattggagatgaagagaatggaaatatgaggcccatcttaaactggtctaggcttaaagagatgaggtattagaaatcagaactttgatggttacttttgtaatacaaaaacaatgacttgtgaggcagcaaagaagccagtaaaaacttttttttttttttttttttgcttggtcagagatctttggctgttggagaagagtaagaatactagtcacaaaaccatttcccagttgtttttaactttatctttgtgttaagagcccatagagaataatagtagtacttaaatattgtgggggaagaagcatccaatgatgactaaggtttcttctctggactatggaaataatgacacgattgaaagaaataggggaaatccagagaaaggcactgactttgagagaaagaggaataagtttagatatgtaaactgttatctgtgaatggtacttttgttgtaatatattgaaaactcttattttgatttatagaaaaggttgctctttatagaatctagatatttgtgcctacatcgtacctttgtctcctcaagccccccaaagccccctcagtttggtttatttgttgcctaatagagttttaaaacta

SEQ ID NO: 57371 - DNA, 2175 bp, Homo sapiens
atttaaaaaatgaagttgatacatgctacatacaacatagatggactttgaatcatgaagtgaaataaaccaaacacaaaagaacaaatattgtataatacagtactgagaatgggtaaattcatagattagtgctgctgggagtaggaggaaataatgggtgtctgctaatggttttaaggtttcttttagggatgataaaaatgttctggaattagataatagtggtgattgcacaaccttgtgaatatattaaaaccactgaattgcacactttaaaagggtgaatttagactgggtgtggtggctcacacctgtaatccctgaactttggaagggcgaggagttcgagaccagcctaaccaacatggtgaaaaatacaaagtagctgggtgtggtggtatgcgcctgtaattccagctacttgagaggctgaagcaaagaatcgcttgaacccaggaggcggacgttgcagtgagccgagacggcgccactgtactccagcctgggcaacagagcgagactatgtctccacttttttttaaaaaagggagtgaatttaattgtacgtgaattataacttttttttttttggatggattctcgctctgtcccccaggctggagtgcagtggtgcgatgtcggcttaccggcacacctgcctactgggttcaagcgattctcatgcctccgcctcccgagtagcggggattacaggcgcccgccaccaggcctgcctagttttgtatttttagtagagacggggtttcgctatgttagccaggctggcgtagaactcctggcctcaagcgatcctcccgcatcggccttccaaagttctgggattacaggtgtgagacgccgcgccagacctctatctcaatgttataacaaggctcaatactcagctaaagtgagcgtcaaatttttatttttattttttcccccgtgacagggtctcgctctgtcgcccgggacggagtgtcgtggtacgggtgcgatctcggctcactgcaggcttgacctccagggaacatgggggcatgccgccaccatgcccggcgtcaaattccttttaaatcaatcatttcttcccagcgtcccccgctccctgcaactcaacttcgtttagctattaacacaaacttcagattccccacgcctgtctgcaggcagcatctccaaggaagcgccaccacggacacctggctgtccgcaccgcggtggggtcccggcgcgttggtgccaagtttcctgtaccccgccttcctacccacctctcgggaggcccggatactgagcccctcactgcactggtgaactagaacaggcctctggactcagcatctctacgctgagacctcaggatcaggtccaccgcagccccaggttctcgacccggaagctgagccttcccacgctccacacccacggctagaaccaccccgggggaagccgctctcctcccccacttacgcgcctcgggcagcgcgcggtgcacacagggagctcgatctaggctatggacaaggggaagagatcttagatggaggccgcgcagaggagaatgggaagggtgcgcgagcgtctctgggaagaaggtccgaacccacgcccagcgccggagggggaaaaaaaaaaacacagaccagagaaggaaccgtaaatcaagtcggaggggaaaagagccgcaaagccttctgcggcagccgtaaagcaacctggaggcgcggtgctggcttttacgttctgagccgctcgccctgccgcttccctgcgcgccctctgcctcctacttcccgccagcttccctcggtccgcggccgtcggatctctgctgccccctggtgggcctggcggtttcgtcaggccttcagcggctagttaggcccgggtggttcacacttcacatgcccagtgcccattaggatgcggggcccgcccacccatgcacaattgggaaaatctgaggatgaatggttgtcagagaccttcccagattccgcccgggccgaggcagcggtggacctggtggttctcgcggcctctcaccaccgccgcgcacatccagtcgtcaccggatggcgccttcggttagcgacgaccgcagggaaatggagaagtgcggcttggggggcgaagtcccctctagaatgtcccctggggccgggcgtg

SEQ ID NO: 57372 - DNA, 3097 bp, Homo sapiens
tagttatctccaaatctccgtctccctaaagcacttctgggctgacaggtccccttcctttctacagcaccctctacacccattctacattatgcttttctccattttattttgtcagaccacacttactttttgcatgtcaaataaaaaaaaattatcttccgatgtcccccttctcattttctattttgtatcacttttatttatcatcattttatggggtctcaggaagaagagacagtaaatacatgtgctcggttagctagctttaatcaaaaatcctaaacgtaggttttaaaaaagataactggagcagggcaggaaataatattttttgccagtgtggtggcaaaaaataaaaaacaaaaatctgaatctgtgttaggacagtatttccgtgtataacatagcgcttagcaacttaattctccagatccacatattttaaggacatgatgtatctcagacacctacttcaaacctcactttacagttaagtaagaccacaagtagaatgaattgcctgaggccacacaagtagacagtgggagaatgagaacagaaatatctattgactcctagttgaattttctcttaccttaccacactgctagggagtaacaagatgggcagatcacgagtcagatgagaaaggtcatgaaaaatagtcaaaggatgacttttcctgggtaaatagccggatgtccaagaaatgaaaggctggtctggcagcagcacatcgtctaacagttggtagtcatatgtgggaagtactgaagggggagatgacagcaggcccagaaactgcaatgatccaagtgcatgtcgatcctgggagggaacagttaagagtccgggcaggatgaaacagtagaaactggtgagtgaatgaatgtgaaggctgaggagcgactgcaatttgttaatgggattatgaggcagtataaagtggttaattacggtggcggaggtaagcaggagtaaaatgatggcttttaactcctctcaaggacaccgaaaattattttaataaacactggaaggctgggaataaatataattcacaccattcttactttcttggtttagagatagcttatctacatccttaaattaatggctgtagctaccctctgcatggctccaaaaaaaaaacaaaaaacaaaaaacaaaaccaaagccggctgcgagtctgcacgagaaaatcgggttgcaccaggccccagccgcccgccgattcgcttagctgtcggaggctaaataaacagctcccgaagcagcgtttggcacagcgcagggtcggaacgtggacactaatttccgcccacgctccccgcgtcctggcgggatcaccacagacacgacgtccattgctggggtcctcggcgatgcccgtgtgcgcagccccgcgagtctcaggtcagaagaccactaatttcgcggccgcgttccacgaagctaaggggcaaaaaaccagctttcttgggacaaagcgtccccccagcagccagggtcgatcccggcgctgctcccgcggcgcttggctgccccgggcgtaacgggccacgagaagtagggggtggggcgccgcttaggtttgggaagacacgaagcggctcctcgggcttccagcgtccacttcctacggcaagcaggaggagacaagcgccaccctgcgctcgcggagccgaccccggctctcccctcccgtggccgcaggggtcgtgtgtgtgtgtgtgtgagtgtgtgtgtgtgtgcagggacgctccgcgcccatcactctgtttcggtgctaatcgaccgccgtggcgccgatttcccccgcttcccagttcctcacccgcgtgccccggaaggcgcccggaggcccccgggccgccgcgtcacgctcccgggaggctgagggaaagggaggcagccgagccgggagcccggggaggcgcgctgcgccccgcggcggggctgggggcggggctaggtgtctcgcgcagggggcggggcgcggtgacgtcgcgggcgcctgggccgtgctgtggcggcggcggcggcggtagtggcggcggcggcggtgcctgggcggcagcagcagcagtagcggcagccctgaggacggtgagacggccgcggcggcggcgacagcgcggaagtcgcgcgggacccagagcttcccccctgtcgctagtgctgaggctttcgcctttcctacccagcttcttgctcacggcccgggctgggctgggcagggcaacgcgcccccggggaggggcggagctgtaggtgaggcttcgcgaccccctccccctcctcggcagcccggggggtggggaggggcgggccccacccagaccaccggcgcccacccgcgggctccacccagccgggctccgggatcgggcgggagccgaggcggtagatgtggggatcctggggcgggaggtgggggagtggggactggggctctgggcacttggggagcggagggggggaggcttaggactagtgaagccgcggacgaggtagtggggagacggagaaattggggagccatgaggttggggtgcggtcagggtggatctttgggttaggtgagtgatgtaaaatgctgaagatgattcttttcttttcgatgaaatggtgagataaaagatgaagtgtatttcaaaaggacgatgagctgtgcatgttgcctttgaggcagttgcagaacctattttattgcactagatctcacgtttctactttagggttcgattctttttcttctggcggggtgggtggggggtcggagagggaagagaatccccttactttggctcaggtaaattgtgagcgtggatgtatctgaaagttttacaccgaagaagagggagatcttcggtttagacaacttcgttccggcagccaccatttgggtcgcattacgcttagctccttcaaggtggtgtcttccagttttttttccccccaatgcctaaaagatctctttataccacccttttacaggctttatcctggccccttgagagaaggccccaaactcaggtggttgctttggaaggcacattgctgaataatagttgcaggtggttgtggttga

SEQ ID NO: 57373 - DNA, 471 bp, Homo sapiens
ggtctttatttaaacctgtagtttataatgagacttaaaaaaatgtaagtttttttttttgtttgtttttgagacagggtttcactctgtttcccatgctgggatgcagtggtgtgttcttggctcactgtagcctctgcctctggagttcaagcaattcttatgactcagcctcctgagtagctgagatcataggcgtgtgccatcatgcctggctaatgttggtatttttggtagagacggggtttcaccatgttgcccaggctggtctcgaactcctgagctcaggagatccacccatcttggcctctcaaagtgttgggattacaggcctgagccaccacaccaggccaaaaaaagtaaagtaatacacactcactataaaaagaaaatggaacagagaagaaaagtatgtaagtaaggaaaaaggtgattccatctggtctttcagaaataggcttttaccgtaca

SEQ ID NO: 57374 - DNA, 898 bp, Homo sapiens
tcagaaaaaaagagaggttattatttttataactggatttcctatatttgtggataagaattccaaaactaacaaagagaaaatcatcttgactgttacgtgctgtaaaaatcatgtattcaaagtttgtactatcacaattctggattcatgaggatttgccagacattcaaattaaagcctaatcaataactttcttcttcgtagagggccattctaaggccagtgctttcccagggcctgggtatattatgtagtatgatgaatatcacagagcaattgcccttgtttaggaactgtgtattgggattcctttaagatttttgttttaacatacttacatttcactaggattcttccctaccgcacccccggctctttttaaaaaatttacctagtttgtcccttgcctgtttggctactagatatatttaactgaccttagacagtgctgcaggcagagttcagcatttaggcaaaacggatggcagtgttagctgtttttctcctggcatgtcactgtgcattatctgggatggcatgctttgtgagtatctgtatggtttcccaatgagagaagggaggtctggctgcattcactcgcacaaggtgacctttgtttctacacattctctgctttaacaaagcattgtctaatcagtctgtcaatacatatttattgagtgcctactgtgaatgcccagtagtatgctgtgtactttgagagatttttttcaaaagggggcagggtagaaagaaagagaaatatgcatttgagtttagaataatgttaacatgaaatatgtataccgtgtgtgattttataaacatgaatttctggaggagcagaattctagagtattctggcccacattagcttcaagaatggaattattct

SEQ ID NO: 57375 - DNA, 477 bp, Homo sapiens
taaagacctctgcaatggccaggcagagtgactcatgcctataattccagcactttggaaggccgagacaggaggatcacttgagcccaggagggttttcacatagagaaagctataaggaattctccctttctgtgagggttttcacatagagttataaggctttgttgatcttagttctgataccagaacgaggaagtgttatgttatgtgttggcttaaggggtcaaagtaggttggctgactgccatgctttatcaggtttgcagaggccaagagttccttggggctgcatacctgaatagcacttattgcagtatactttgtgtagccaatactgtgtcttctttgtctgctatgagttttcaagggaaaatgagtgaaggtatcaacattaatttttcagaatataaatttgcgaaacgtatagtctttttttttttttaaactatgtactgtggaatgactcatttctac

SEQ ID NO: 57376 - DNA, 581 bp, Homo sapiens
cccccttggcctcccaaagtgctgggattacaggtgtgagccaccgcgcccagccagaattaattgttttttgatcagaagtgagaggccaaaacagtagggtagccattttctgttcacttccattggtagagaaaaccttgtagacaaaagccttctgtttttattgaagttggcatgacctgtttgctacagacaaacttggcaagttgggcgaatgctgttcctgcagctctgctggtgtgaataaacaaggttttattcctcctgccaggactggtgtcagggcaatgactgtgtgtgtcctgctggtctttgaggggttttcctgaatatgttttttgtggtttgtaaaatatggacctcacgcaaaattatactacaaatttagttcactccaaaccaaaagatcagtgtagaattcagagcaattaatctggtagtagcaaagtggtttttgtggtggtttttatctcaaatctccagactagcatatttgaattctgtactgcacaaaaaagcagactaagacaaagtgtacacaggtgatgtgaattgaatacttagtcaataaaagatca

SEQ ID NO: 57377 - DNA, 500 bp, Homo sapiens
gggctgcccaccggtcgtcctctctcgcatcctctcagggctctccatgttcaagttcccccagctccagtcctccctctcctatttctggcagctcttaagacagctgctccccagagaagagactccccttcctctccccgtcttgttccagctgccaacctgcatgattcattcctgtctccccaccgcataaaaggcactcaggccattgcttgtgcctaagtaaatatttatgtgctcagcatttgtagcgagtgagtgtcctctgtctgtctgggtcactgttgtcagtcactgtggcaagcagggccatgccaagggttctctaagtgcaaagcaagaaggttttaaagtactgattgtggtcagatttattctgatcctttaattgttacaatgaaggcatctttaaaacacacaatcaaaaccccacccatggaggaagaatcctgaggactgtggattgcttgacatgggcttggttacctgggcagggc

SEQ ID NO: 57378 - DNA, 1883 bp, Homo sapiens
ccaggcgatgagcagaaggccagtgttggtgatgttgctgcaacctcccagctccagcacctccaggcccttgaggtactgggctatgcggcccaggctgctgtcagtgatctgcttgcagaggctcaggttgagagcgcgcagggagccgatctcctgcacaaacgcgtggcccagcccgttgtcggtgaggttgtagcagccgctgaggttgaggctctcgatgttggccatgccctggatcacgtagctgaggctgcggcggaggctcaggatctgcacccggcggatgccccgggcctgcaggctggggaacagcgacgggttggcccggcgcaggtgcagcttggcctccaccccccgccacaccgacttgtggtaggcggcgtcccgccaggcggtgcacacctgcgccgcgcgccccttgtcccggacgtccaggtagccgaagatcatggccagcagctccgggaacaggcatgagatgtgggtctccatcttcctcctcccccctccgcggcgctggggggaggaggcgcgggccccgccgctccggcctcgggcaggcgacgagagcgcttctccccagccgccgccgccgccgccgccgccgcctcgggcccaacggccggcccctccccgccttccggctccggccgccgccgccgctcctcctcctggtccgtccgtccttccttcctgccggctgcgcctccggcccggccctcccccgccccgggctccgcacggcgctcacatcccgggcggggaaggcgcctcgctctcgctcccggaggccggccgccgccgccgcctcggctctacccacgccgcgcccgggccgcgccgctccgcccgcgccgccgcgcccacgccccctgccgcatcctccgcctcctgccgccgccgctgctccgcgggccggcgggcggcgagggggccccgggggccgggcgcacgggctccgggcgcggaggaggcttcctgctgcctttgtctctcgcccgcttttcaaacctcccagccccgggccgcccgcactccgccgcccaggcggggggaccaggaggccaatcccggccggcggcgtgcgttccttctcccccgccgtccgcggccacttgggagctgccggcccccgcaccaaggacgccgcggccgtccggccggagcgcggctcggcgcagaccccgggcgagcaggcgggccgtgcgtttggtagcgcccgggccggccccggctccgccgccctgcagcgcgtcccctccgccgctcccgctcccccgcgcccgcgcaatggtacgggcctgcgctgccggaactgtggagccgttgccctggaaaccgagttcggcctggtcccgtggcccctgatttttaaccctgtgggcgccacgggggagcggcagctgtcagcagagcgcctccccacccggcttcttttcacccggtagcccgttattgagccgttccctctctgggccacgccccagccccgttccttctttttctttgctgttgaagtctgcgcagccccttcccacagtttacccctgcaattcgttacccttatttcacacccctctcccttgattatccctgcgagagccgcctcctatagcagtgctcaataatcgtcaccccaactctccttttcttactgtccctaatgccccttaacgcctcattatcacaccccctgctcccccggttggggctgtttactacgacgcctttctctccagtcttgtgtcttaaattggagagaaactcggctgtactcatcttaaacaatgaccccctccagtcggtgttctagaaatttctagaattatccatgactacttccttctagcatcttctgatggtttccagacacgctg

SEQ ID NO: 57379 - DNA, 1645 bp, Homo sapiens
agtgtgtgggggtgagagagtgtgtgtgagagtgtgtgtgtgagtgtgtgagaaagtgtgtgtgtgagagtgtgtgggggagggtgtgtgtgtgtgagagtgagtgtatgtgagagacagagggtggtgtgtgtttgtgcctgtgtgagtgtgtgtactgcagggtagatatcctgatacctgtttcatgccttcaggcccacagctggctgtggcctcgcaggaccaggaatgcgtttgtgtgtaattatgtcaccctctagcggtgacttccctactagccctttatccttgaaaagcccactcgggtgtcggtgacctctcttcccagtgacagcccgggagcagaacttcggggagattctggcatggagggacagtgctgggaaaagcggggtgtggccgggcatgaagagagtgccagggcccgggaagagtgaaaagtacaactaggactaatgaggagtgcaccctgccgagcagaaggggaagcaggagcgggccaggcacagcgtctggagaggagggaagagaaggcgctctcaaggggaggctcttgcgtgtcaatttctgccaagtgccattttatgtctgtggggtgggacggttatcgcagctagagctctttccagaatgtcagcactgagggccgaagtgggcgtggagaagcagtttcaattctgttttccaagggaagtaggcacaggtttagaggctgcctggagctgcctaaattccaaacgttcaccaccgtggagtggactgctgacttggctgcttctgcctagcctggggctctgttccctctgccagtaaaggtcattttatcaggatcctcagaggctttcgcatgttgataaatatttcaaaagacaagggggaatcaagatcagtcttactgagagcggatttggaactccgcgttcggcgggacgctgccgcccgaggcctgactgagccacagtgcgaagggtgctccctttttgaaaaggtgctggcgccaggccaggctttgctggaaagtcctatctggatgagtcagagcatttacatttcttacataatgtcagacccagaggagctttagggatcagcccagctacagagttcacagccaggtccccttttctgccaagaggatagggttaaaggttttaaaaaaaacaagcagagtctcaaggggcagaaaagcgaaggctcagagttaatgctgattaactcttcacaccccagaaaagatggttctgaggtaaaaccacacctttatgtcacatgatgccactgccttcctgaatccagtcattcctaaagaggtcagtaacaccaagcactgaccttcccgccttgtgtgcaggaaattaaagaggcatgaaaaccctgtccacattttctctaaagttggaacagcttgcctggggcttcagactgagcttcaatctcaagcttcagtgagattctttgttgtttattttttatttttaaactatttggccaggcgcggtggctcacgcctgtaatcccagcactttgggaggccgaggtaggcagatcacttgaggtcaggagtttgagatcagcctggccaacatggtgaaacctcatctctactaaaaatacaaaaattagccagtgtgatggtgtacgc

SEQ ID NO: 57380 - DNA, 1237 bp, Homo sapiens
gcacccaggcctgtctttggctcggaaacggtggcccccaatgtagcctagtttgaacctaggaactgcaggaccagagagattccactggagcctgatggacgggtgacagaggtgagaggcactggtgtgagggacaagtgtcacaggcggggaggaagaactccgctatctggtggtggaaatgtgtgaggatcaaagtccccagggagagtaggtgttgcgggcggcagggtggtgggctgggcacgggctgggcataggctgggcaggaggcttcggggccgcggggaggaggctggagaagcaggagggcacgggcggccctagctctgcaaccccgggaaggactggtaggtggagttaaggatatttggacaaggaaacgctttgaagcttttctctcgtcctccctactcgggacctggtcgcctcccctccataaaaccattagctcctggtgccagccctatctctgctccatctctcgtggttccagccggtgcattcacagaccttctgccccgggggacgaggaggatttatggggggagaggagagggggaggggcatcctccagaggagggggggtctgaggggagtcgggcgtggaagctgttagtcccgggctgggggccggctcacttccgagctggctctgcatgacaaaggggaaggagcaagtgtcttctttgatctgccccctgccggccccacacacctgcctgttggtgcccccgccccagccgaggcttcgagaaggaaaatcaaaagggggcttggggaagggctgtgtcccagctctcctggaccctgctcgggccactgtcctctcctggcggccccaggacaaaaatacttcccgggctgatgacccgaagcacccgccgccccctcccggggagcctggggacgccgacgcgcgagagtggcgcagtgagccggggcgcgcggggctgcgctcgtcaggtccggggccccggggaggccgctgggggcgcgggtcacgcccagacgggggccccggaggaccgcgggggagccgcaggggccgtgtgtcccgaggcgcaggctcgctctagcagcactgacctgctgcgggtcccagggcctggggacaggggctctcgggggcggatagaggaacaggcgtgggttacagcaggcaggaggccaagaggcgggaggcccgggagccagcagggaagggctgtggcatctggaagatgcgtcctca

SEQ ID NO: 57381 - DNA, 2922 bp, Homo sapiens
aggctggagtgcagtggcgtgatctcagctcacggcaacctctgcctcccaggctcaagcgattttcctgcctcagcttcctgagtagctggaattacaggcacgcgccaccacacccggctaatttttgtatttttttttagtagagacgaggtttcaccatgctggccaggctggtccttatctcctgacctcaagtgatccaccagcctcggcctcccaaagtgctgggattacaggcgtgagccactgctcccggccaaggaaacttcaagaaggcaaaggcaaggaggcccacccctgggccctcagaggacatggacagggagcggactctgaaaggagctctgggaatggactctgccccctctagcccccagggcctggccgcctacacccagctgcttctcctcactggcctctgccccaggacatggcagccacatcagggacgtggagctgggaagcgtccccccttctcacagaaggtctgtgacagtggagaagattcccaggatctcaggctagaagttggaaggcattttctgagggccacatgattccaccagctggagttttctgttcccattgtacagtccttgatttctgggacacaagatgttcttttaggctttcctgaataacaaagatcacacatacacttgtttatctggggagatgccttcccgttctaaacaactgacttacaaattctctttctgagaacaatgcccattcataagttgggaacattctgtatgagtgacttctggctgggaaggcacagttctcaggagggggaggagttctcaggagacccctgtaaagtgggcctgtgcttagacactcaggtccctgtgtttgctagaaacacttgggcacacacaggtgcctgttccaagccttcctcccaaggaacacacctgcgcatgtgagtcacatgtcccgccaacgtgccacctaaccttcaccctgagctggggagtattgagtaactgtgtcgtcagcaaagtcaccccactgcttgggtaacaccttcagatagtatccaggccaaaacatgttaagaaaaaaaattcactcacagccagaacacttattcctgtttatcttttaacaatgcaagggtagggaaattgtttggaaatcaaaacgtggaagttcgttcatcctcccaactcgtggagttctaaggcagagactggctaagcttttgtgggacctaaaagttatataatcagggtggggcagtttaaataattacaaatacggaattatgaacagggccttagaaggcgagggagaggccctgaaacttgagcttcattcacttaatggaaaatctaactctgattctaggggaagaatctagaagattccatgaaaatacaatgttatagagctttaaatgactttccctaaaatacttttaatacttcttgccttagtggatcctggcttttctttgacagtgtcattcagttgaaaaccctctgggtaaaggctcttcgcctcctggcagccccatgcgggcgggaggtgctgctctcagggtcttcacaccccactgttgcagccctccgcccacccgtctctccagccggaccatcctctctgcattttggtccctgtcctccgcccacccgtctctccagccggaccatcctctctgcattttggtccctgtcctccgcccacccgtctctccagccggaccatcctctctgcattttggtccctgtcctccgcccacccgtctctccagccggaccatcctctctgcattttggtccctgtcctccgcccacccgtctctccagccggaccatcctctctgcattttggtccctgtcctccgcccacccgtctctccagccggaccatcctctctgcattttggtccctgtcctccgcccacccgtctctccagccggaccatcctctctgcattttggtccctgtcctccgcccacccgtctctccagccggaccatcctctctgcattttggtccctgtcctccgcccaccctggggcccttctgcaaagcactgaggttcggggcgcatggacgtcttcctcccagcccctcatccgccagcgagctgagccgcgcccgggcccctgtcaccgcgccaccgctccttcgggacctgaagcctccgtgctcagcgatccccctgcagcccactgcgacccccacccttgctgcgccctccgcctcagcacggccctcccggagctatgtgccctccctgacttcctcttcgcccctcccctgcctggctctcccactgccagtcaccccaaccccgccccagcagcagcctcgagttccctctcccctcgaaggcctcgcggcggactcggagcggggcagggaggaggcgggaggcggcggggggcggggggcggggggaggcgggaggcggcgggaggcggggggcggggccgcagctccgccctcgggaaatggctccgcctccctcgccgggagctgccttcaggggccgtatgcagcgactccccaccccgcgggccatgccagcggacgggcacctccgcgggcgcagagcgagtcacacgtgcatcctctcgcccttcccccgctgcaccgcccgctgtccagccctctcctgttttctcccactgcagagctggctaaagaacactgcagacttgggccaatttgcccctgcccagattcctgattcccggcctcgcggccccaccgctgtcttcctctcccctcccggacttcctgtcgcccccagccccagccctctgtggccgcggcctgctctgcctgagctgcgcctccggaggttccgccgccccttcgcctccccctccccacttcccgcctcccccctcacttcccgcctccccctccccacttcccgcctcccccctcacttcccgc

SEQ ID NO: 57382 - DNA, 4872 bp, Homo sapiens
agatgaataaaaattaaaaattttgataaatttgtatgtgaaagaagatgtgaagaaataggtgttccatgcattattggtggaagtaaaaattggtgccctttctttgaaactatcaaatgcacatatcttttgatccagtaagcccgcctctacaaaattatcctacagatacactcacgcatgtgcacaaagatatcggcacaagaaatttcctgcggcattatttgaggagcaaagtctaaaagaacctgaatgcctgccagtagggggaagggatattaaaaatgattattgtgcaaaatgatgctatatattgttcacagatgtatatatgtatgtatatgacatataaaaaattacagaaagggtgtaaataatttccagtagcgctcccctctaaggatgggaggaaggatgcaggactgaccacaaaggccacagaatatttcagacttcatctgtagcattttacttatttttatgtaaaaaaagaaaaaaaacagctatactaaatgttttttatcaattctggttggtggagacttcatttattacactcttatttttatgtattttttccaaaaagcatgatacaggggggtgggtataagatgatatcttttgtgtaaaaagaggccccctgagcttgtttatgtgtaaatgtccctagaaagacagtcaaggtcacagtggctggtgtggcaaaaggcaacaaggaagtgggtggggagactggtttttcattgcacgttcttactgcttatatattttgccatttgaatgttctgcttacaaagaatgattataaaaacaagcaaacagaaggcatgcctcctgtgcctgagaggacgggaaggggaaagaaaaggctgctttcccttctctgaagcctttgcctgaggccagtgggtaaatactgatgctgagaggagggaggagagaaaggcagagagagacagagacagagatggagacacacacacacagagagacagagacacacagagatggaaacagggagagagagagacagagacggacagagacagaggcagagagagacagacagagacagagagtcccctgagaggctggtctgctttggaaatattcatggtttgcccagaggagcaagcaatgtgggccaagctaagagccttgagagctattaacacaccaagtaggtagtgacccaggcaggaaaaaacactaagaaatgtccagtgtgggccaggcgtggtggctcatgcctgtactcccagcactttgggaggttgaggagggagcatcgcttgaggccaggagctcacgaccaggctgggcaacaaagtgagacccccatctctcccaagaagtaaaaaaaaaattagccagatatggtggtgcatgcctgtagtcccagatacttgggagggtgaggcaggaagatcacttgagcctgggaggttgaggccgcagtgagccatgattgcgccagtgcactccagcctgggcaacagagggaggttccatctcaaaaagaaaaaaatatatatccagtgtggccaagatattttagggtgaggagaaggatcaggaagcctcctggccagactttcagcctgcaatcctatcctcagtatctgagactaccaaatcctcaacaagaaacaaaaactgagggtccaaacgatgaaaaacaaaccgtaaagaacgaattacccacgtgaataaactttgaaggcgttgcgctaagggaaatgagctagtcacaaaggacgactactctctctacgattccactcatatgaggtactacgaatagtcaaattcagagacagcagaacggtggccaccagtggctggcagggcaggatggggcgttagtgttcaatggggacagagtttcagttgggaaagaaagaaagtttctgtagatgaatggtggtgatggtggcacaaaaatgtgagtgcacttaatggcacagaactgttcacttgagcattttaaaattgttatttttttagagacaggttcttgctctgtcacacaggctggagggcagcggtgtgatcagagctcactatagcattgaactcctaggctcaagtgatcttcctgcctcggcctcccaaggagctggaactacttgcccagtgtgccacgatgcccagataattaaaaaaaaaaaaaccttttatttttatttttatttttttagagatgaagttgctatgttggccaagctggtttcaaactcctggcctccaatgatcctcccatctcagcctcccaaagcttgggattacaggtgtcagccactgtgcccaggcctacttaaaaatcgttaaaatagtatatgttattttatacatattttaccacaattttaaaaataaaagagttaccctcccagttgactgacaatcctggtatgcctaaaacctttcactagacatttaaccagtcttactacctcctcctgatcttcaactaaaccctcctctgtctttttcctgtaaattttctgccaacactgtgaaatacaactttgatacacacttacatatgttttaaaaacacctaataacaacaacagaactaaactaaaaataacagacaactcccatgtgctggaggcagtgaatctcaggtttccttcacacaaagcggaaatggccagtaaacccactttgtttccccactggccaagggagaaaagccgcactgcagacacccacccgacccttcgacctccagacagacacagtgctttctaacaaaacaaaaacaaacgaaaaacaacccaacggcttaaaaccacaaaagaaacctttacccaatccaagcgaccccttgcttccgtttgggcagatggcatttcaccactttttgacctttcaaccagtacccttgctgaatttctttccaaagccagagtcataatacgtgagagcgagcatttctcaagtgctgggcttcagggagggccctggtctttggacggtgaacagaactggggcagagggagtcctatctcgaggagatgacgctgctgccctacagtagccagcgctgcttttgtaactctagcgatggcccaatctctgattgcccccactctgatcagccctctttattttagtctcgcctttgaaataagtctgggtgacagccaagatgtccagtggccaagtcatgctatgccacttctaccaatgagatggtccctccagcctcagccagcagagactgtcctctggacctagagccccacgagtggtgccacgagagcagcacctggggccccacgacctggaagtgtaattagtttcagactcagatagagaaatggaaagtcctgatattgattggaaagcctagttataatattcctaatctggcttgatccttgtctaaaaagaccttttattttagttgtagcttatttgcctggcaaacaggagctctggtttagggaggaggaatgggaatggggagaagtaggctattataataattgagtacaatttgaatcctttacacattatggctttttcgtttttttttgtttttgagatagtctcgctctgtcacccaggcaggagtgtaatggtgtgatcttggctcactgcaacctccacctcctgggctcaagcgattctcctgcctcagcctcctgatcagctgggactacaggcacctgccaccatgccaggctattttttttgtatttttagtagagacagggtttcactatattggccaggctggtctcaaactcctgacctcatgatccacccgtgtcggcctcccaaagtgctgggattacaggcgtgagccaccgcaatcggccccacattatgtttttaatcaccctcaaatagatgctaataagttgtcagaaacatcatgagctgttgctgggatacagccctttcacagcccaaagagccccttgacacatcttgtttttttctggtgaaaaaataagaggactcattttagttagactcattcacaaaaaccaggcgggctcattctagagtcatatggcctccaaaagctcagaccagaagcgtactgtgctcctgtcacactctaatctgactctctttctggaagaatttggagaggtgagtgccaatatcatattactttctcaggctgagaatttgagggtggagtccggcaggctcctgagggaaagagaataaaccaggaggaaaggggagctcgagctcggccctttggttttccttggaggccttgcttgggggccaaaggttcttggcctgcgtcctcccctccttctccctgggcactcagtagcagagtgccagcctcgcttccactgcaggcaaccccacactgcccctcgggcatcctctccccctcactcactcacagctcattcgaaaaggctttactcaccaactttaagttaattgcttcaactaaattacacctttttttcatatgaagtcgcagatgtgttcccagatggtgcctggcctggtgttctgagtcatgggtctacagaggccgccacaccttgacacctggtgaaaggtcgccacagtgccctcgcttgtgattagccctttgtaagtgcagtgctcattttaccctgtggttctgaacaagcaggaatgactgaatcctgaagttgaagtagcgtagcttttccctgagattcagatgtgtttacttttacacctttaaaaaaaaacaactttatcaatacagcttcacagacatcactgctcccgccgttgctttttctagcttttaaggctggacatataccaagcaagctccccatcaccaccaggcccttgcccaggtccacaacagggatcagaaacttcagcctaagccccactgct

SEQ ID NO: 57383 - DNA, 2154 bp, Homo sapiens
caccctttgttatctcttgctgtggtccaaaggtaaggacagtaagccgtgggcacagactttccctaaatcgtatggatttcctttagtcaataacaagaattttgatagttaaggcatttacgccttaagaatgtgataaattccccctcctactgaatgtaaagaactatttttctacgcagactaactcttatattcacttttcttatagaataagtacgtaaccaaatctgttcttggcttctaagaagttagaactcaacgtaaagatgacttgtggaaaattacttactcattctgggtaaatggacgcaggtatttagtgcttaagtaggttctgatataccattacattaacatcattttaaaaatcgctctgaattatatgtattttaagagtgactgggttttaaaaaaaatagaagtggtagagcataaatcataatctttaataaggtaataaaaggcaaacactattgctctgggcaaaactgggctaatgcttttggatttctttccgcagtcttcacagacgacgctcagcatcctatcagcccttggcagagacacacgatccagcctaaatcctcaaattctggctcttgcccaaagtgtgtagccagtatccatagagactgcgaaaagcatccgcgagccggggcggccccctcctcctcagctccaaattgcttcctttttcggtgggagaaaaaactccgaggagttgtgtgagcgcctaaggagcgcacgctcctccggccctcaacacccagtatagttttcgctaagttcctggccgaaccacagctcccacgatgcacccaggttttagagcggtcagaggggcggcttccggtttaggacagcgcggctgcgcacggcgtgtggtcttattggctcgaaccgcctcgtgcgatgcgcgtcacggcgacgtgcggtcgtgggggcggggagacgcggcggcggcggtcgctgtcgcggcggcgagagcgcgattccagaagcggcatcgcggcggcggcagcggcggcggctacaccgggcttggccccctccctcctccgttcccccctcctcccccctcccctcagcggtggctcccaagaagtccgagacacgcggtgaggcggcgacgggctccgggtgagggtctctggagtgtgggcgccgtttcctgggcgcagagggagagcttggggtcggggggaggtgagagctgaggggcgaatgtccctggcgcgggcgggagagcgcgctctcggcccggcccgcaacttgattcctaactctgacctgccgcccggcgcgccttggcctgagggtcggccgtgtggggacctggagccgccctccttgcgaccgctgtcggaggagtccggcgcccgctgttcccctcgcctcgcctttcgcggcggagggtcggagcctgctgccctctgctcaccttcgggtgcagttgctccagctccctgcccgcggagaggatctgcccgcccctcttcgtctcttgtctgtttttatcacttctaggaatttgtttggtggaggcttgggatgggctctctcagcgctactttcacagtgactggggtggggaagagttccctcacctttttcaggtggcgcgtcaggcagcctgcttggtacctggagtcctgttttcccaagcccccgtccgtcagtgttcgcttcttctaaaattaccgatgacagggttataaatcagtttttagggggctcggagagagtttgggttggaaactgttagctcttttttcctcctggcttttgatcttgatttaagcgtttgcctctgaaattttgacaacttcataagatggtccaaaagtgaattttggtagaaagatttaaatgcacagttgggattttatgggggtacggtgacttcattgcaggttgttgactttttttttaaaataagatgttcttttaattttttgactctgggtttctgagccttggttattgtcccccatttctgttccaaaagcagactttttttttttttatcaccccttcccctcacccagagaatccctttaaacgccaagaaagctgtcataacatttagcattatttgatcacagaacttttccaaatgaaatgctaaaaattccttcagaaaaaagc

SEQ ID NO: 57384 - DNA, 1935 bp, Homo sapiens
aggtaggagaatcgcttgaacccaggaggtggaggttgcagtgaaccgagattgcaccgctgcactccagcctgggtgacagagtaagactctgtctcggggaaaacaaaacaaacaaaacaaaacaaaaaaaacaacctccttcccgtaggagatagttaaggaaaacaaataaacaaaacccaaaccagtgcctaattttttttgatatttatttattttaaataagtattttatttaaaatagttaatgtattaaaaacttcttagcaacatgctttgcaaagaaatcttaacacattctctgaagattgttagggaaataaagttagatttatttactgtttgttaaaggaaaatatcacatttactcacagttgactcttaaaacatttttttttgagataaattttacataccataaaattaacccatttaaagtgtacaatttaatggttttattagtcacagggttgtacaaccatcacttcattctaactttaggacatttttatcatcccctaaagaaaccttaacccatttgccatcacttcccatctctacccccaaccctaggcaacctctagtctactttctgtctctatggctttgtctaatctggacttttaaataaatggaagtgtaaggcatgtggtgttttgtatctagcttcttttacttagcataatgtttttaagtttcatcaatattgtagtatgtaccagtacttcattcctctttatgactgaataatattccattgtatggatatacaggggttctttcttatttgtggtttcacattctgtggtttcagttacccatgggtcaactgagatctgaaaatattaaatggaaaattccagaaataatttctaagttttaaactttgtgctgatctgagtggtgtgatgaaatctctcaccttccttgccctgtcctgccttacccaggaaatgaatcatccctttgtccagcatatccatgctgcagatggctggctacttagttacttagtagccttctggttataaggtcacagatcacaagaagcgtgagtgcaatacactaagatattttgagtgagagagagagcatattcacataacttttttttacagtatattgttataattgttctattttattattggttgttaatctcttactgtacctaatttataaattaaactatgttataggtatgtatatataggaaaaaacacagcatatatagggtccagcagtatccatgatttcaggcatccactaggggtcttagaacatatttcctgtggatggggggaaactactgtactatagtttatccaataatgagttgatggacactggattgtttccacttttcgactgttgcaaataatgttgctattatcattcatgtagaagcttttgtatggatgtgttttcatttctgttgggtatatactcaggagggatttttctgggttatatgttaactctgtgtttaacattttgagaaactaccagactgtttttcatagcagctgcaccagtttatattcccaccaacaatgtgtgggggttccactttctccacacccacactaactattgttactatattttgaatataactatcctagtgggtgtgaaacgatatttcatcatagtcagttagctcttgagcttttatgaagagacctgcctaggttaactttagctcaggattttaagtattaacctctttgaggaatttggaaatagaagctaaattcaaacttactataaaactcaagttgtgtcaatttcacttcaaatggtctcctcatcatctgttctgccattactttaatctaagccaccaccatcttccatctggaatacacctgacaggacttctgttttgtttcttgtgctgtccaatatattcttcgcacagttcctagagaga

SEQ ID NO: 57385 - DNA, 1068 bp, Homo sapiens
tgagttattggcatcctgcagagtgatgcaatagaaaaagttttagacacaaagtcaggagagttgtatcctggtcctaactccctattgagctttctctggacaataagtacaataataactaacatttagtgagcacttccttggtgctcagcatggtacagagtgctttgcacggattacctcattacatacattagccctatgtggtatgataactcttgttaatgtcttcattttacaaagcaggagactaaggcttagggaggtgaggccacttgtccaagccatgtggctatttaagtggtagaacaggaatttgaattaggctagttttaatatcagaatctgtgctctttttgacaatggcaagtcattttgccattctttgtctcagtttccttatttatgaaatgaggatgatagaccagattttcaccagagccctttttaggaccagatttctatcagggtctttttttataccgaaatttagtgatttgtaatgggagactgagtgtatgtatgtctggtggaagaagagggattgtgaagaagagggaactggattgaactggattgtggtcattggtaagagaggaggaaagagaagagggaaaagaaaatataaggactgatatagatagaaaaacttataaccaaagagggcctgaaatattttcaacaagacaacattggaaatacgcttaatgtgaaatctgacctttgtaattctgttcctcagcctattgctgattattatagactaacctgatgatctcatctctttaaagtttagtttagctatctgtaaaatgaagatgatcttgaacttaagcaatctttctagcttcaaattagctaatttatctttctgattcatcatcatcattttaacattggtatggaggggtttttgccctttatcccctttctttgggggaaattaatcccctttggtttcctaggaaacatctcttgggatgtgacttgatttcttctagtttttgcttctaaaatcagtgtttttctcttgataaatactgctttgccactgtactttttcat

SEQ ID NO: 57386 - DNA, 2166 bp, Homo sapiens
ggcggtgaaggaggctggccccgctgctcaaaatctgagccctacagacacctcctacagcccccgcccccaccgcacacatccccgagcattgcaggatatatttgacttctgtcgcctcctgcagcactggtgggaagatgctgcagtcacaggtggggtctgtcaccaggaggaggaggttactgttgggaatctgctgcaccacaaataccctgcagcaaagaaagggagtcgaggatggctccgtggcgaccacgagaagggcttctagggaaggaacttctggagactttagtgtggagttagggtggcagggaagcccggaaccatgaggcagggcgggtcggggcagctaagggaacgggcctggcagatggctcagtcctactggctttgctcacaagcctttgctgctgcatttcctttcctagcagactggagacagtgaggaagtccaaactgggccgctttggagagtgcagagttgctattaatatatgcagggacgacaggcgtaaatcaagaccgtccggagcaaatgggcgggcgaggcaacacttgctctgggtgagggtggcgggggcaggcccgggcgaagcggcagcgctggagcttggccaccaggtggcgcagtggccccgcgctcggcgaggccgccctgcgaggagtggcgcggagtggggcggagcccgcccgccaggcccacggccttcccagcagtcccagcggccgcctaccgagcgcctcccctgggatgggcggtctcacacacccaacgtgcacaccacagccgtgtatactctcagccttcacggctctgtatgaggctggtgttgtgcccattttgcagatgagagaatggagactagaggaggcgaagtcacttgcccacggtcataagcgggggagcgcagagccagttttcaattcaggagtgtctactctgaagccctcgcttcactccggagcccgctggctctatcctcgcaccgagcctttgcgacaagtgcacagggaacgctaaccccagccctcaacgctgcacagaacccggggtgaaacccgcgcagcacgacgcgcagggagtgggggagaagggagccccgatgccagcgccgcaggtgccgcactgttaaatggtgtgccacgggcccgggggtctagggaccgcctggcgagcggcacgtctggctgaggcgaccctcgaggaggccgccgcattcccagcgtgggggtcctcccgggcttgggtgcggggggtcagcaggagagacccttccgcgcggcctccctgcctccccggggccagggcgggttataactagcggcttccacacagcaggaagcctgacagaggctgcccgcggggctcccagcgacccgaggacatcgcacacttccggccttctcttctcacactccctctgccttccaagttctccccacgcagctcaggcgcgggcactggcaccgccctgggcaccgcctgagcagggctgggggagacccgccgaagggcccactcgcccagagacgccgtggggtcacggctgcggcctcggcggggtgggctcgacacacagggtcaggcctcgggaccacctctccccatcccggctgtcccggtccccagccgtcctgcccgcctcagaccgtccgcctcctgcgtgtctcctccactgaggacggcgggggaagaccccgggagcgtgggctctgcacttagacgcatcccctcctcccggctgtggagccgtttcccgggggttccggggccctgcccgcacttccgccttgccgagggcgggaggagtgtggcgggacgggcggcgccgccctgcggtcttacttctggcagggcccgcactccacgatcccgttggcctcccggatggccggctggtacacgaacacggggtactccgtgtcgcagggctgcagcgggtcctgcttcttgtgtttgtgggctgcgggcggagaaaggacatcacgccaccgaaggggcctctggcctgcggtgacctcgcctcggcactcccagggccagagttcaccccagtgcatttgcagagggtccctcctcaggcagttctcaggacacgcgtgggaggagccgggcggggggtgaggggagggaagacacccggagtctctggagagggt

SEQ ID NO: 57387 - DNA, 466 bp, Homo sapiens
ctggcagaaaatatccattctccccgtcttctttagttaggcagcctgactttaattatggcagccatgtgctcagcgaaaagactacatttcccagtagcccttgcggcagggactggccaatggaatgtgagcagagccgctgggagggacttccgggaagcgggcccaaggcctcctgcctcttccccatcctcgctcttgcgctctgggaagtggactcgaaggcaggagcccctccagctatgctgggatcgtgcggatggggacaggctgggcccaggctgccttcatccattcttttatgagagaataaacctttagttgtttaagccacttctcttctggcagcagaacacaattcctggctgatagtttcttttgaactttgtcagggcaaatccccgactcaaatacagtccctgaacctgcaaagcgaaggtccaaacgtcgacgtgggatgcct

SEQ ID NO: 57388 - DNA, 2549 bp, Homo sapiens
tacctactacgacttccacattacaaagggttattaaattcttaatgactgaaagaaactttttggactttgattttttatttacttgtattcagaagatggcactcctacaatacaggccctcaaacactttgtcagctcactcggccaaaagtgatacataaagaaaaagtgccatagcagactcgttaattcttcgttcagggagccacctatgtgtgtgtctctgcagtctcctcactaagaacttgcctcacccagccctgctcaggcttaagatcagcaatgggttcacactacaaatccataaagcttcaaaagacagggtttaggtttatatcatcatatttatattcacttaaactcttccaaggaagaatctattccatcattagggcatgcatttcctaaacattaacatttgttaaaatgctgacaccccccatagccactgataccaaatgcaaacacaatggcaaacactgtacaattttaaacacttggccaaacttcagaagtaaaacaacccactgtagtaagaaagactcacatctggcatttctgtagagaaggaaagggtcctggagttggaaatccaagtctttagtaataggttctgtcctattttccatgctcagcctattcataatggtgaatccatgctttggagaagcagacctaaaaatcacaaggagtcagggggaaatcaatagacaaattgcttagtatgctatattttcagtataagtacattctgatgtgtctctcaacctttgtttgtatatgcagctttatataagcagcctgtacacgtacttcttcaccactggcatcattatggactaattcccatgtaatgcagcagcactggcatgatgattcatttggtaaaattgagtcatacttcatttgtggtgtgtgtgtgtgtgtgtgtgtgtgtgtgtatacagatgttgtttatttcttaacctaacgttgtaaattcctttaaggcagagtaactactttttaaaacattactgacttttaaagaatactttttaaaagttaaattaattaaagatattttaaacaatcttggtagttaatattagagtgtacatcacaattatatgaagaaaattttcatagaaaattttaagtgttagtctgaaattgaagcctgcaaaatctcttagtgatatgaagcaactctgaacaatgaacttgtgaggacacagcctgaactagaagtttacataacagtgcaaagggcagatactttgttttcttcaatgcaaagcaaacagcttcacagataaaccactataagtttttctctataaaaatgtgacatttagtgatgttttattttcatttcactcaataaaccttgaatgcctgctctgccaggcagaaagaatccaaattatactgagtataaactctaacaactacatgtgcattcatctacccttgggtgacagccatatagtaattcaactgcgcaacttccggtgacaaatgaaacaccacatacttacacactgaagctgaagcaagcagaattcatttatttactttaaatgagggtgctagggctgttattaacaaacccacagaaatgttatgagcaacaggaagacaagttgtttatgtcttagttttattttacctctatttgatactgatcaaggaacacagctacataaccactaccaggattttcttctgaaacctccaattttaaaattgatgggaggcaatccttgcctagcttattttacaaaggggtaaagtggtggtaagcatacaatcaataccagaaataatcatgatcatcacttcaacttaaattcagaggaagaatgaaaatgtactcccaaagagctctgttaggggtcttctggaactgtcaagttcagaaatcaccagtgggtgtctctatgaactctctattacagaaaggaaggcatgggaggaaataaatgattttttaaatgggattaagtgttttcatacaagaatgagaatttgattctgcatgtatttcattatcacaacaggatctcacctctttaatagtacagctactatagcatctcataatttagaaaataggcccaggggataaatgtgccaactgctctaaagcaacttctgtaagagaagtcaaaataaatcactgccagctccattccctgtaacaagcctcccaccccccacccaccatgagttttacatgctttttgtaattcgctactgaagaaagccttcaacattctaggatctgggaggtttttgttttgcaggggataagggaggcatcccattcttgaggagttagatttggagaaaagactaaaaaacagcaaaggatttttttctcaatttaatgttttgtttaattgagagttccattagagacttagagtatagtaagaaatccttgaaaatacaaacttatatttggtctggatgtacaaaagaaaatatttgtatgatttgttcctcttccatagttaaaaaaaaaccctactaaaaattccccaaatcaatcattaatactt

SEQ ID NO: 57389 - DNA, 1953 bp, Homo sapiens
gtttatctgaaatccattcatcaaggctaagttctccatactgttttgtaacttattttaaaatgatggatatcatgtatgtgatacataatggatgatgaatattatttggacaaaactcattatgagtaaagaaacaaaattacatgtctctacattcgagtgggtgggttacaaaattacaagcagcaatccctgcaacaggattccagtgttctaggcttctaccccattctaactatgaggaaaatgaaatttcattccattaccatttactgggactctgctttgagaagagcactaaaataatttggctcccaaatgacctccaatatcgaacttggtgtgctgccgtgtaataatcttcccaagagcatcagcttccttctaagtgttagaccctgccccattttgtcttttatttgacgaggttggctcttttcttggtgtttccccttaagtttacaacttgcagatttctccccttctatcaagttttgatttctctttgccccatctaagactgacattccaaaatcagaactctgcacttttattcgtctgctgtccctgcctcccccatagccacagattcactgtaacagaactctgctctactttctcgagcacatcggtcttccggccataaggtatcaggtccttcctttccttcggctcttatggtgccgtacccgatcggtctggtctcccagcgttgggtacgttagagatttaagtcttttccccaactccaggtagctccacagatccgccttccttcccccaaacccccgagaccccatctccacaacttcggcctcagtccccagatccacccacttccagggcgtcaacgtctcctccccctcaccgggtcctcaagtcctgagtctgacgccccccgcctccaccccaaccctgggctgcactgctccgccgcgtccgcacgcacccactcgttggcccgatggccgaaggtgtacagagccacctggctggccacgtccacgatgcggttgatataggggtcgtggcgctgcagggccgctaggctgatgtcgcgcccctttcccaccaggccgcctgccgccacggctgccatcttccctccctcccagacataggcacggggctcttggaagccactctcaatagatcgcagaacgagcgagctgcctcgcaaccgagaacccacggcgaccacacggcccgggaggccttccggctccagtcacccccaccctcctgcccgccgacagacgcaaggcctcactaatcgatggccgcgccccgcccactgaggatcgttgccactggcaacgacaagcccaggcctgccctctgcatcccgtttctttctccaagagctgtttttctacgcgctcgagcctttgagctgtgtgtgcggtaggatttccttcttggatgtgttcgaccccttggcatatcttttctttggcgcttcagtgatcaaatctatcacaataaataagcctcgagcatcaagaactctgaagagaaagagaactgaattgatttctgaatgcgctaacacccagtggttctcaaagtgtggtgtggtcctggaaccctttgggagtttctgagaccctttcaggggatctgcaaggtcaaaaaaaaaacaaaaccttttatgacaatgctgagacttacttatttgacttgttcactgtggtgacgttttgcagacaatggtggttaaaagcgccggtggtttaacccaatcaaggcaggggcaccaaactgtattgctagtcaaagtacgcgtcactaatctgcactctcagttacaaaagaaaaaaaaaaaaagaagaaggtagagagccagtgtcacctgatggtgttcttgataagcagtaagaattattaatttcattgaagcttaatccttgggtacaattctttttaacattctgcatgaaaaaataggaa

SEQ ID NO: 57390 - DNA, 824 bp, Homo sapiens
ccactgaaatgtgtataatgctttaaaattgacagtgcattttctcatccatcatttgagcctcacaacagccttgtgacgtaggcagtattcgtattctcacttcaaagataaggaagcggatgctggaatggcttgggcaccaggccaggttcatacagtaagtaaatggccaaggcagggtgtaatctttggactccacacccagcgctccttttttttttctgtcatctgtgatgcttcttccaccctgctattgatagcctaggaacaagatgtgtgacttttcttaccaccccctggtgggtacatcctgggtacacttttctgttttctagtgggggtaaggaaaatggctttcagtggtgaaggttcacagaaagaatgggatccagaagcgtcttccagcatggtccaggtgccagaagactttggcaggcgagttgaccatggctgagtcaggccctcctcccccgctccctggattttggatcgattttgcagcggctctggcggctgcatgtgtttcccttggcctctgaggcattccagtgatgatgatggctcggcggggtcacggccctgtacaaagcaagggctatttgtggctgatctaaaacataactggagccacctgcatccgaggctggcttctcgggctctgggtcccataacccagctggagtaaaaagttcacgttcccgtgtggagtagataccaaaagtgacgtctctttctttctttaggtttggctgcgtaattggaaaaccaagctgcccgccaccttgccgtggcttcttctatccctagggcctggagtgggc

SEQ ID NO: 57391 - DNA, 2340 bp, Homo sapiens
aagagtaaaatgatcacaactgttcttagaaacattgctgggcatctgtatgaaggatgaatcaaaagaggtagaaagataggggattgatggggaaacagaattcagtttttgtcctctggaagatgaggggttgaactagatgatcattaatgtctcttatggctctagtattccgatcttcccattaatgactttacttggtcctactgtagccaggagttcccacaaggctgttttttgcagagcactatacacagcccttgaagcccaggctttaaaaaatgccatttagtgatattttatggcttgtgaatagattaaggtaatggaggcacaaaacaacacaaatgaatgcaccacgggtgggtaacagcctttgaatttctccagctctcccttcagacctcctgtatcacaacaggtatttggtcattttatgtgatcttaaatggcctactattaacctgactttgattttttttcagtcctcagagaggtggaggtgggcctagcaagaacccaatgctagggattcattgcaaagtgtacccaaattgggaagggtgagaagctattctatgatggtcttatgagaacctcaggagatgctggtggtggtgtgatgggcatgttggtttcatcctttcctgtttctgaaccaataggaaaatgaggcttcctgagcctcaggatgccctaccctttctaaggcttcctggagagcaaagagttcctgctctgccctggtgtgagtcagagactgtgatgacacactgaacagcaacacctgtccttgctggggaggggatccaaagtccagccgctcgccttcagcatgacacatttttctgtgctttgcctcgttaagagctcaggtcctttagtgcttgaaagtagctgagtgcaccacctctgtaaatcgatcccgcactcagttcgtgaaacatcaggttttaggaattggagaggcagcaatataatttttgtgtgctgttgcttgagtgaactgtaaaccaaggctttctacccaggattgcacggctttttactttgatgaatgtcattttactcagagctgactaaatgatattgtcttatatggctctcaaatttttctctgatctgttcccaatctgaaacgtgtgagtacatcacttcagatatttgctaggcatctgagcttggcctgaggatattcaccagcatgattgagaaaacatgcttgtcctcaggaaggcccaagtctaagcacctgctcatgccccttccttggctgtgtggcttttctacgctgcaaaccaagcttgtagacatggtgtacctttccataacaggtctctctcttctgtcatgttgtggtcactgaattggatttggcagaaataccagaaagtggaacatgtggtcgcagcatgtgaccttcaagtcaggtcacggctggcatttgccagcctctgtttgttggttctggtggaatcaggcctatgtgtggactctgctcctactatttgagggcattgtgaggccttttctgagtgtgtctcctgcctccttgactccgggcctgaagtttctgccattgatgtaactcatatgtgttacagcattgcctccagaattctcctatttgtgaaggcctattctgttagaacaggttgattgaggagcacattacctacttctggtgctccatctggggactgtggacagcagaagagtggggtgaggtgagcttgaggggttgagggagagtgacacagaagagcagggctggctcccctgaaacaggaggctcccctgtcagttgtggcaggctctctgcctggttttttccactcctttatccccagcacttaacctcatgtttggctcatagtagatgcttaggagatgaaagcctcatgtccaaccatggccaacagttaaatctgtgaatctcaggcttgatttcagcttggccaggtctgagtcattaaaggacgctttgcatttttggatagtggaacttttgccatcttattctttttccatggtgtcatggctttggcatgatcagggttatgaaaaaagggggataagccctctactctgctttacctgccgtgactgagatcagacactggtttttagagggaaatgtccattttagagcaagagagagaagaccttaagcatgacctaaagaaaagagagaggccaggctgtcccaccacttcatgcttggttgactgagccaagtttgactgcaagactgggtcttggcccaggatggagaatattcactaatgaggcaattgacttcaagaagatcaaaataattagtcagttttcactgct

SEQ ID NO: 57392 - DNA, 763 bp, Homo sapiens
aaattcttaggaaagctgcaagggagtctacctatgaaacacagaggccatgggacacagagggaggagtaagggctcgagctgggcaggcctgggtgtgaattccagtgtttctcttcaggctgtgctgcctagggaaatgtacttacctcttctgagcttttctttgctcttctgtcaaccaagggataatgaagctacactgactggttactcacagtgataacaggagtatctgttatttattaaacgcttatgttgagccaggacctttcttcctttcctttttaaaacctccataaaatgtagccggatttgtaatcacacattacttcacgtggactttggctggtttgtgtagtgtctctgtgagagcaggggttctacgggtattgcccggcgctgtgtttccaaagcccagcatgtgcctggcccacggtgggcgcttaagaaatgttcatgcagtcaagggggtgcagctgcctggcaaggagaacccgggaaattcatttacccttcttattattcagttccttcacctgaactctctcaggctggagctgagctttgggttcataatatataattattctccccagttaaaaatgactaaactgaggtcaggagaggttaagtgctgtgccctagatcactcaactaggaactagggaacaaagccttcttgtacagtacttgtcagagcctccttggaagcttgggaaaagggtgtgggcaggactgggcagggaggaaacagctgagc

SEQ ID NO: 57393 - DNA, 2263 bp, Homo sapiens
agacttggaaaaagaaatttaaaaaaggaaaattcatgcagccagtaactattgggacatcactcaccaggcactatgctaaactggggttaggtgctgagcaaaaccaggcccctctctagatggctctctaggtcccacgaccatagcttaggtgacaccggcacctgcgcgctccacagcctgtcgaaaaacactcgggaagcaaacattgagaagaaaatactccttctgtgggcctttaggaaaaccgagtgacttttttcgtgaggggaacccatctttgtaagcattcgcggaaacggcagttttattaccgccgggaagggtcccctgagtgtgtgccccatctgagttccgagctgggcgggccatgccttgccaaccccgctgctcgcagcatctgcaggcgctgagcgaggcatcgctgcctggccggggcttctcggatctggggaaatcgaggtcgctttccccggctctctgcagcggggcagcgctgtccactcactccccgctccccgcgcacgcccttgccctctttcccccaagtagggaagggtctacgcgggtcatagcagagaggccacgccgcccgtggtgacggccggtcccggggagggggcgccgccactgccatcccgcagcctgcgctccccacaccccgccgcaggcgcagcggactggtggagtgatgtcgggagatcgatcgagaagaatctggaagaatccggttagacagggaagcgggcggggatgggagggagggaggaagggccaagggaggccgccggggagatcccgagtccgagggtcccaggagaagggggagggggcaggcagccagaaggaggcaagaaccaaaaaaaaaaaaagaaaaaaaaattccgaagcgcccgcagcactgagcccgaaccggctcagtcccgccgtctctagaaagttctgcaccccgccccctctgtctgcgctcccgctcctcccagcccctccctcgcggcggggcgggaccaatcgctccccgagccgctcctgacccacctaccccagctctcgcgccgcgtgcagaggtgctcaagcctcctcgcggtccgcagtcagtgccgccgcgcccggcctcccgcacgccccgcaggtagcgcccccgcccgcggcccagagtgcgctcgcgccggcaccagctcccggataaacggcgcgccgcgcggagatgacagccgaggagatgaaggcgaccgagagcggggcgcagtcggcgccgctgcccatggagggagtggacatcagccccaaacaggacgaaggcgtgctgaaggtgaggggcggcggggcctgcggaggcgtcggaacccggggccccgcgggccgcccttccgccgcgcccggagcccgcggccgggcacgggtcgaggcggccgcctttgcagcctcgcggccgtcccgccgggggccggtggcatcgccgtcccggaccgggctgcgtcgtttaaggcaccgaggccggccatgcgctcggcaggggggcggcctaggtgcgcgggccgaggccccaggctccccagccggcagcgcccgggcccgggcagggggtcgggattgcagtgcccaccccggcgcgcgcggggcggcggagaggggcggggcgaggcgaccgccgcgggcacccgagccgcagcccggggccaggccgggcctcccacgccacgccgcccccgacctcgcggccccagcggagctgccagccgcgggccgcctcgttggtggcggtgccagggctcgcccacccgggcggtggaacacgggccaggacggggagcgactccccacagtgctttcctggcccttcggcctttgtgcgacgcaggcgcgacagggttccggcgccctcccggggtcccctgccgacgccgggacccagcgaggtccccactcgccgcgcggcgccccctccctcggccccggggaggccgggcgcggggcatgccgggagctgtagtcccctcccccctccgccgcctcccggagccagggctgcggggtgtggggcggggaggaggcgctctgctgtggagcctgccgccgagtgaccgctcgactacaaatagcctggggagctgcggggagggcatcttgacctgggccaggacaacctgccttgggtcggagcaggttccagggagaatcagagatggtgaattcccagcctgcgtcttatgccttctccccatccgctgctgcgtcctcatcctggcttcccaccgct

SEQ ID NO: 57394 - DNA, 1737 bp, Homo sapiens
cacatataagtatatacaattgaaacaagagtttcacaaaaactgtacttaccttactacctgggagtcacttggtatattactattgtatttaattttttatatgctgattgcaactcactacattgttttcactcctaatgggtagttttttaaaaacacttttcaaaaccatgcaattatcagttattacgaagattagtaagattctcaggaatggtctgatggctaggaatcttcattgccagggaaacaaaggaaaaaggtcaaggttattaggtcaagcccttgggagccctgttgccaagggaacagatcgacccccgtcagggttggtttacccacggtctgcagccctgtggagaaaaggagtggcccgtgggcctgtcactcacatcagagttgggaagcccgcctccaagcccggaagacccgcctcctctgtaaggttaaaggaggaagaggcagagattggaggttcaggcagtgacgtaacttgctgccttaggtggccttccgctctggcggctgtcgcgacgggggttcagggaatatttactgggcctctccgctccctctgctcttggaggtgccatgaggtcagttagctacgtgcagcgcgtggcgctggagttcagcgggagcctcttcccgcacgcaatctgcctcggagacgttgataacgatacggtaggtgcatgcgcaccgcaagagacagcctggatctgtgcagggacggggcaagggaagtggaagaggccgcccgagcgtgccacgtgagcgtgagcatgcgcgctgtggctagtttggagcgctagagagaaaaactttattgatagcttcagtgttcgtggttggttttgttccttgggaggttttgtttgttttttgagacaggctccgtctgtcacccaggctggagtgcagtggcttgatttcggctcaccgcaacctctgcctcccgggctcgagcgattctcctacctcagcctcccaaggggctgggattacaggcgcccgccaccacgcccgactaatttttgtgtttttagtagaggtggggtttcaccatgttggcccaaagtgctgggactacaggcctgagccatcgtgcccagcccttctcgttttttaaataaattaccacaggtcaagcaggtaaaacaatgcctggcacacagtttagtgctcacttaagtgttagtggtggtggtggtggtgttagtattttattctgtttttctgcaaatctttactgaactgctcattatgcaccaaggactctgctacattctaggaattcaaaaatgaacgagagagttccagtcctcagatagctcataatcaagctgtgtaatagtcaccggataataaaatgtaatgagatgcattgactaaagtatggagaggattctccggtggagcattaaagggaatagtgtctgatgctcttttttttgcagactttatcttttcatttatcatctatttcatagttctaatgcaaagcactgtattgcccccttctaccctctgccctatcttcctactcggcctccctgcttcacagttccttaactgtcctgtacttatttcccaccgccccctagtgctgtgatgcagaaggtatcttatgaggccttttttggctctaccctctctggggaggaaagagttattctcataaatttgtgttatgttttctgggctttcgtgtttcttcatgaactgccaagc

SEQ ID NO: 57395 - DNA, 812 bp, Homo sapiens
gagagatcaaagaagagatccagggacagtggagagacggggaaggggaagggtgatgccgctgtccacaagctagttagccatcaggcggcagggaatcccttctgtctctccacctaatcggatattgacctgtgccaaatggcctgcaccttatgtgtgtgtgttggtgttaggctggtgaaataatgtcgtgcagctagtaagccttccatccttttgacatactgcatataatattatgatccagatcccaatccagattctaactgtccttcaagtctcaccttttccactaatgcagtgacagtgggaaaatcacagaactcagctcaactggataactgcctcttctcagtaagcctgcggtattgggtcgaacagtaggaaacagacttttgtttcttttaacacagctgaatagtggccagttttctatgactcagcgcactttgcccctggttcggcagatagtcccctgtttgctgttgttggtttatgcaggggctctcagcctggctgcacattacaatcaccctgggagcttttaaacacaacccacccacactgccctcaaggtcagttagttagaatctccagagggaggctcaaacctcagcatttgaaaaaagagcccctaggccggacccagtggctcacacctgtaatcccagcactttgggaggccgaggcgggtggatcacaaggtcaagagttcgagaccagcctggccgacatgatgaaactccgtctctactaaaaatacaaaaattagccagacatggtggcaggcacctgtagtcccagctact

SEQ ID NO: 57396 - DNA, 1486 bp, Homo sapiens
gtgtgtatgcaggttggtctttgactcaatgtagtacaatctcagtcttcatctcagccacagtcggcctaagaaggtaggccaccccagccctcccgaggccgcgggcagggtgcggaggtcagacttccagggaaggccaaggggcgctttaagcagtgagaaggccacggccaggaggtggacgcagaaaaaacttgcaccctggctcagattcttcccgtgtgacccaaatctccactcgtggcccgtgccctgctgctagacgccctgacctccgcgcccggaggccttgctccccgcctgtgcccaggccaggcctgggactccattgctgcatcccgctcacctccagactgcagtcgccgccgccgttaggccgtagctccgaaggcgggctccgggctcctccaacctgggggccgagccagggccccggacgggggctcgcgccggaccggccgggtccccggcggtgcgggcggggtgggaaccccgggggatcccgggaggggagggggtcccgggccggggccgggggtggggtctggcaccggagctttcagtttgttccgctgtttgaaattggcgccggcggagcgttaaggtcacgtgacggaacgtcgccaatcggcgccggccttgtctcggcattccgggctcgaaggctgtgcggtctgccaggagctgcggccccgtccggcccgggctggtaaggcggaccgcaggccggcttgtgggggaagaagtggccgtggggccggggaggggccggaggggtccccgccgcgtgggtgggcgagccgagggagagtttggggacgcgcggaagcggcgtgacaggcccgggtccctgggcccgcttttcctgccgcgctggtcacgccaggcgacacgcccccgcttcccctcaggctcctctgctccccttttcaaagctcggctttagttgatttcctcactgggggaaatcgtaccccattttcccacagtgaacgatcgtctgctccccccgattagactaagttcctttgagggctgcgtattatctccgctttcttccatcttgaaaaaaaatgtcggcaccatgaaccctacctcagcgcgaaacctgtcttttgcccctcccgaagccaagccttcggatataatagaccgtagtgctttatttattgacttagtcaaccagtctagttgagcaactgctgtgcgccaggcaccgctaggccctgaagatacaatggcagacaaggttctttccttcccctgggctcacagcccaatcctggaagaggggcacagacattttaatcaaataaacaaatgtgggctgggcatagtggctcacgcctgtaatcccagcactttaggaggccgaggcgggtggatcacttgaggtcacgagttcgagaccagcctggcaacatagcgaaaccgcttctctactaaaaattagccgggcgtggtggtgcgtgcctgtagtccc

SEQ ID NO: 57397 - DNA, 2023 bp, Homo sapiens
atagccaggcagtagtggcccctgcctgtaatcccagctactccacaggctgaggcaggagaatcgcttgagcctgggaggcggaggttgcggtgagctgagaccgggccactgcactgcagtctgggcgagagagaaaccctgtctcaaaaaattaaagtctctggattccctcgtgtgctttaggggagtctgtagagcaggtctaggaatgacctaaaagcttgggctggagtaggggaagcttaagttctgtgcagttgaagttcaaggccagcctatggaagatgcgtttcactgggagtgactgatggagtggagagggtaccagagggggtccacgaaggccgctggtatcagggcaggggccagaatgggaagcggcagaggtctgtacatcctcacagggcagacctcgggaagcgctctgggtgggctcggtaaaaatggcgggggtgcgaggagccgttgcgtgcgtggcggttggtgcggtataggagactcctctgaccggactcgcctgctggccgcgcggcgggcgaggcccaggcaaaaacaaagtcttcccgctcagtaccggccccgcgaggcgctccagaggaccaagccttagctcgcgtcaccccacccccgcgcaggcgcgtttaactcccgctcgcctcccgccccttagcaaccctcccgcatcgttgggccccggcaatagccaatgagacaggagccacgagaacacggaccaatcggcggcggcgacagtgtggaacgcggttgccaggaggcgggacgcggcggcgtgccagcctagccactctagcgacggcggggaagagtgtgtacgtggtgggggcttcctcggtggcgggcatggaggcttcgcgctgccggctcagtcccagcggcgacaggtcagacagggccgtggcaggtctcctcctgagcgaggcggaggggcgaagcgagaaggcggaggtcctctccgggagccctgcggggagagggcgggactcgggacttggcgactcagggagggactggtttcggcggcgggaggcgaccccctcgccctactcccgtgtggggacccctttctcaagtggagcggcggcactacatcccgcgccgtgggcagagacctttggttcaggtccctgcttaggaacttctggagttttcgtgacgggctccctcggcccctctgggcctcgggtttccctcgggggagaggcgctggccccgctcagctcccactgcccggcggtgtcacagccgagaggggacccagcccctcccgggaggcggtgcgggtgatgtttagtagcttgttctgacgccgctgcttcggacgggtaaagctgaattctggagcagagtccgaggagcggaaacgcgaaacttctttttcctctctgctttccagtgtttgtccctgattcgggatggtctgactgatttgccagtgggccacaccccttgtttgtgcgcctctttctctgccagagggagagcctcggaaaaaaaaggatccaaaatctcagcgtgtcactttcttgttcgctaggttaatgagaagttaatgggaagccgtttgaaatcattggttagaaactttggcgtcatctgaggatttaagccctacacgccaactgtataccccgctttttattccattaccaagacaaagatttggggccaggcgccttggaacacgtctattatccccagcactttgggaggccaaggcaggaggatcgcttggtctcaggagttcgagaccagcctggacaagatagcgagacccccatctctagaaaaaaataaaataaaataaaatcaatcagtcaatcaattaaaatttggccggacacggtggtgcgcgcctgtagttccagcgactcgagagactgaggagggaggattccttgagcccaggagttccaaactcctgtgttgggccactgagctcgctagcctgggcaacgcagtgacatcctgtcaccttaaaaaaaaaatgatttgacgtgta

SEQ ID NO: 57398 - DNA, 2097 bp, Homo sapiens
taagatctagacaaccacccaacacaaggctaagtgataatgccccagaaaaggttggatttgatttttggaaaaagccaaaagtcctttggtttcagtctcctggccaggtagatgatggcgctacctgccagcacactgctttaagcccgtttgtcctaagcgtctccaaacaaggagcccagcgtgtttccagcacctcctgccccaataagagactcctgggcatgtgtgtctgaagtccagactctcaccgatggcagtatacaccgaggcctccccagctaaactctgagctctttgagggcaggtgctgacggctgatcctgatcttcacagtatctggactcatcacacatcttagatgaatattcattgagtcactgagcccagaaggcgtcccatggcatgccacatggacttcaaaccgagtgccctttctcccatgtggtttactcgtagtggcggttttacagatgcccaaggggcaggagagaaaaacggaaagagctaaagccggggagggcaagcgagggggcactggcagcggatctgggaatggagcccgcgagttcctgcttcctggttccccggagcaagtgtcctttggtgggagccgcaggaagggagcagcccttcctgcgcgccgggagcccgccccttccccggcctcccagggactcgtgcggagggacgccgggtggcggggcgggagtctgggccccgtccacccccccgcccccgggacagccccaccccggcgaagaggaaggctctcggctcctgggaaagggagtcgggaccccgccaggaggggagggcgcggggcgcgcaacgagcagccaaacagtcggagcggagagatcgaagggctagtgggcgtgggggccgcagccgaggcccgggtggaggggtccccgccgtccctcggccccctcccccgccgcccgccccggcccggcccggccccgccccgccccggcggcccggcccctcgcccgcccgcgcgcggcgcagtctcctccccgaggtgccggtggccccgccgccactccctccggctccctccctcccgccgcggcgcgcatctcattccagccctcattccgcgcattccagcgtcctcctcgcacactcgaggccagggggcgggagggccgcagctccggcgccgccgcgtcccgccaggtgagaggcgcccgcgcccgccgcacccgccggcgccctcacgggccgcgcgccccacgccgccgcagccgaccgctcgcgccgcgtgctcggctgctcttttctttccgccgcccgcgttcccgccttggacctctgcgctccgacgcgctccgtcccgacctctggcttccctccgcgctccggcgctgctcgctgcccctctcccgcttccctcctgtccgccccgcgctcccctcctcgctcccggttgactcactcctccaggaatagggatccccgtgttttcccgtcagtcccattctgggaaaactcctccctccgcgcgctccgctccgctccgctgggcgcaccggggccggtcggcgcggggtgggcttggccccgcggccccgccttcactgcgccgcccgtcggccccggccggagcccggctctgcgcgctgacgccctgtcgtccccgcagaacgatcgccgcggccggaagagttggcgctcggggcggactccttggaactggcttagcgcacccatcccaccttcccgcaccctgggaccggtaaggctggggcgcggggacttggtaggactttgccggagggcaggagtctgcgcggtgcgtgcggagctccctcccgggacgagactgggaagagcgaggcacgtggaggcggcgcgactgaggctgctggaggcgaagcggctccaggggcgggtaaggggggtggacactcgggactttgggggaaagggaggccggtgtggaaaggaccggagaggcagaaccgagagcatcggcaacagaagagacccagcacccatgcctcttttctgctgggcccttttcgagcctggaagggagagacctggaggtaagcggactgcctgttttaagtgcaaaggcgatgc

SEQ ID NO: 57399 - DNA, 2770 bp, Homo sapiens
cacgcgtgagccaccacacctggcctagaagacatttttgatgacagtaatgatgagaagagatggcgttttagtgctctttggaaacaagtttaggccttctagctttaagaatccgggcctataatcccagcactttgggaggcagaggcaggaggatggcttgagcccgggagtttgagaccagcttgggcccagggagaccaccgtctgtacaaaaaaaatcaaaaacttcgccggacgtggtggtgcgcgcctacagtcccaactactctggaggctgaggcgggatcacttgagcccgggaagtcgaggctgcagtgagccgtgatcgcaccactgcactcctgcctgggcaacagagtgagtccttgtctcaagaaaaaacaaaacaaaacaaaaagcaaaaaacacataaaatccaggcctgaaaaagcgcccgggccagacatgcctagctggagtttctcctgccttagcgcacccctcaggcacacggtgccctgtagtcgcccttggaggccgccagctcctggggaggcatggccctttctgcgggaggtgtctcaggcaggctccaacacacacccgcgctgtcagcatctcgcacagtccgcccgaaacaccagggaaggggttcgtaggtgtgggggtggggtggcgaggccaggcagcctggcgcgagggagagagccgaggcctgggccaggaaggcccttgggtgccgtgtgggcgcagagcccaggagagcgcactgccaggcccggacctccccgcccctaccccgggaagaggcccgttcgccgcagggggaaggcgggatcatagcacctcggaggagcggccggtccgggcatgcgggcggcggggcggggagggaggcttccggaaccccgagagagcacccgtgcctcgcgggccccgtgccccgtccccgggctccccttcctctaacgcaggggacccagcccggggcagtgccgggcactggcgctggcgccccgctcagccctgcgatccttctccgccccgcccctccccgctccgccccgcccctccccgctccgcccccgggccgccccgccccgcaggctcgccattcccgggcaggccccgccccctgtttccgctggcggcggcggcggcggcggtgccggagcgcgagcagagcggagacccccaggtcctgcgggcgcggtgagtgcggcccgggcggcgggcggcgaggcgggtctcgagagcgtgcggagtcgcgcggccttgagccggcgccgggcgggctgggcacccccaggccgagacccgagaagggggagcggccgggggcgcccacgggaggcagtgtgggcagggcggcggtgggacgagaggacgaggaacagagtaggcgccgtgcgggaagcgggccgggaaggggagggtgggtgcggggcccgggcaccgagcgaagtggggtcctccaggggatggctccgaggaagaccgtttcagaaagggagtaacccggggccggcaagggtttccgactgtgtgaccccgtgcaccgcttgggacagtccatacaaggaccccagagagggccagggggccttcgggcagggctgggatatggcctgcagccccccggcacccgcgaccgctccctgggccactgctggaagatcagcactccgagtgacaggactctggcacatcccgaagttggagatctagcccatctgtgcattcaagtttgggacttcaaaaaactttcttgtggtttttaaaaaaagatccaaacaagaaaccggcttgttgttgtaagagcaatatttgtacttgtacatcttggaactggagtcttggatctcctccctctttgaaaaatatacgagtcactgcttcatcttcccccaaatgcctgttttgtctggggaagcttgggctagtatgggatcccctgagctacctttttctcgcatcaccaaaacggggggtaagaaggcaggggcttacctgccttacctggtaactcttagttcagagacccagtctctcattatgtgcgcgtgcccttctgacctgcagctgtccttttccctggggtgactcaggtatttcctcctccaggaagctttcctggactagtggagaaaactgaagactcatgcgaggatccctatatatacctgccagctcccttctctttactgaaaatagccacagagaatgttgaatatatgctttgctatagagatacgcagccagcttgccatcataagtaatggggaggggaggagagggattatggataatttcaaacaatagcctggacaaatcatttatatttagctaaggaatgcagccagagaggcagacaattacaccggcttcctaccctcggcttggtcctggcatggctgatgcagctgggctgtgggttggagggagaggattggggtagataaaacttgaagtgtaattcagttctactctcactcactgaagacgccctgtgtgcaagtccctgaacaggtgagagtaggatttttttttttttggtctggtttaatcagattttaatattctggcagagctttttaaacctatgaacagatatttaatattaataacaataactagtgttgataaagtaatttatagttggccaagttttttctatgcacgttacattagctgtatataattttatttaattcatacgtaatcttgtgaaatttgttacttttttttttttttttgagacagagtctcactctgttgcccaggc

SEQ ID NO: 57400 - DNA, 3970 bp, Homo sapiens
tagagatgaaaacaacaaggtggccctttcctttatattgacctcatagcgtacgcgatgcaaacacatctcagtgagtttacacacttttacatatcttgaaactttgggtcacttgtgagtggccaaaattgtaatattaaatccttggatgacaaaggtctaccccagggatgacaaatacatggtgaggattctgttacttctgtaactgcccgtggcagacatcactaatcaatcgcagctgtcttttctgctgggccagggcttgggttctgctcataatgccttgggtacccaccgccaactgagtggcattagcacactgccttcctgtttgccatttctggctttctccatttgttgagtgagcagtttcttggtaggggactgctgccccaaagagtggtccttgatggacagaattcaccctggagtggcttcttaccaaagtgatgacctaattttttgccttcctgcaggaatatcctggaaccttcttttgtttgtcagcagccaaggtgtttccaggaagttcagagagaacaggtcagtgttggtccgggtccattgtggggtagggcctctgaacgtctgtgtgttataacctctgtctgaagtcaaggtctttcttgccctttaactgtgggttgggcaggatagaagaggatgctgacattttctagttgtcgtgccctgactcctggctttgattttctaagctccttaaattgggctttgggggccaggcaagaatgatctcctccccactgtttctgattggtggctgatggtactcttagattctttcttggccaccccatttgtgtggaggaagcctagggagaggcctgtaacttcctgcttcctgtctcctcccagcaggcttgggagccagggtggaggggcctcccacaacaggccagaagagaagatgcaggagtcctggccagtccttagtgtctccattttgctctgcccaccgccctccaccaggacccctacggggccctcttccctgatcctccaggctcctgggggtcttgctgatggtttgttcattgttcctagcacttgtgcatcgaggcctccgctgtgccagactacagaccaggcagccagacagtgggggtggacggtgctgattcaggttcccttggggtgctgtttactgacctgggcctttttatgtttaatttatgtgtgttttctcctgcggcttctccctgctgggtgatttgtaaaatcttaccttccctgaacccaatggtgtagtcggtggagcagggagagggggtggaatggtgctggctggtggctcatcttgccaaagattctcttgtctgtgagttccagcagggattatttggtgtcccaagagtggccaggaacctcttattgtcctgccatgccttgcacgttatacttaggatgccagtattcatatttgtcatcatgatcagactcagttttagaccctttacaaatgtccacaaccaatttaacttaatcagatgaagttataatttaaatctcatttaactttcacaaaggccccgtggggtagctgtcatgtcctcctcctttaccagcggcagcaggtaaggcccacatagtgttagccggagcaggggctccagcccagatgctatgaccctgcagcgcctgccttttctaatgcagacctgcggctgttcttaactgactctgggaatccgctccaggtccctccctgagcctgcttgtggcaggaatgcctgagctcccattttaagtcctcctcccgcctccctggggcccggatgggtgtctgctttcattcttgcagctctgggatttgaggcaccgcgtatcactggatggtgcagtgccgctaggcacatgggcttgggtggaggaaaatcagtctggtgaagatcaggcagtaaccgtccaggtgcagtggctcacgcctggaatccctgtgctttgggaggctgaggcaggagttcaagactagactgggcaatatagtgaaactttgtccctattaaaaaaaaaaaaagaccgggcggcagagagggaaggacttaaggacaagggaatgaccgtcctgctgtgcggcatgtcccccacatcccgtggggcctgttcctggtgggccctgccagacagaacttggtgaagggctccccaggaggcctgtatggccttggggagacacagatagcccctgacgtcaccagccgtgtctatctagatgaccgtctttcctctgtgcatctgcgttgaaacccaagtgagggagatgtgagtggaggcctcagcagacaggacgttgatcctctctgatggctgtggctccagggggctttggttttgcatttctcgtcatgctctggagccatgctctgggatgttgaccagctctggggtgggaggttcttgtcctggctcctgctcctacctgtaactgctgtgcgaacttgggcaagtcgattggcttcttcaggccattttcctcacctacaaagcggcaggttgggtgacccactgccaaggttctttctggctctgctggaggtggtttctgaggtgggatgagttggtatgcctgggttttggcttccagtcctgggcctgccttctgcctctgactagtgccttcccggcctctgacctggaggtggatggaggaggaaagagtgaagttaatgagtaaactggagatgctgacttctgataggagcggactgggggtggaagttgtttgcggagatggtcccctgccccgtgagtggcgagtggcggggtcctactgcctgacttctgtcctgtgtagacggctctgctgttgatttggtttaaactctcttcttcgtgcccgtgcctgaggcagtgaggagtaagcctccattgctggactccagccctgcatgttaatcatttcaacttcaatcatagccacagcataacgaaatgagaatatctgcctggagcaggttagcttccaaactctctccttgctctcaaaccaaaagtgtaaccagaattttagcctgaaccaggagggtgctcttcagaatgggaaggagatagaagaacccctttgctggcatctggagttgggagcacgatcctatctgcatttcaacccgatactttggagccaaatgtagatttttttttttttttggcctattgtttagtattatctgtgctttgatttaccacaccccttccgccctctgttttctctcaggctccctcacagtggatggctggaaattgatgatactttgaatattcactcactttctgagagtcttgtgaccatttctactctcaatggtcatcatttttagaacatctgatcttgtgttaggaacaggaaaagatctggtagagagcagtccagggggtccgaagagtcaggaagctcagtaagtgccccctgaaatcctcccacctgctggagaggctttgctgttattgcaggaaggctggagggtcttgtggcctttggggtacaggatcttggtgaggccttggccttggccttagtagcttaggattgctgctaactctcacagcacgtttgtgcgaaatttgaaaaatggcccttcttcaggttacaagcaaaaattaaagtgaatatattattgtacagctggaacaaggtccaactgtgtctgaggcaacccccttgagccctcgtgggcagtgaccctggctgtgcgcacacttggaggcacgccgcctccaatcatggggtgcacatgttgctggaaacacacacagtctggtccctccccttgcaatgtggggaatgtgtcaggttcagagtcagggagagggcctctgaggacagtgaacaggtgagggaagtgagctggggtgggagggattctcagagcaagattgaaacagggtgcagccatgcacatgtgtgggtgttagtgactatgtgcacacttgccttacatgtgtg

SEQ ID NO: 57401 - DNA, 1798 bp, Homo sapiens
ggtctcgatcttctcacctcgtgatctgcctgccttggcctcccaaagtgctgggattacagaggatctttcttaagtcaggagctccttgttaaagtgtctatggctctgggaggggagttatgctgcctttcccaaaagaggtggcgaggacgttgagggaagaggaggccattgctcagaatttcatgctgaggatactgaggctggctttccttgggtgtctgggcagttgagcagaggaggctggagccaggctttctggattgtgacccagattctgtcgtttctctccccctcccatgcctgcttccgtcttcgtcagctcgacccagggtcacctcagagctcccagcagagtctgtgggcagctttggaggaaaacatgcgcccaaaatggccaaatccatgaggacttgagagaggcacgtgtgtggctattttgggtttggtgggctgagctcagatctctctggcattcccagccactggcttctgagaattgagcagaatggaaggatgttaaaaagcgaggctccaggagcagcccaagaatttgctcattctttacctctgggaggaggtgctcaccccggaacccacaaggaggaatggggctgagggaagggactatggcagggagggggcaggggaagagagggaaagttcaagacgatttcctcttcctcttctgtgacttcctggaggaggggtggcaagtacagtgctggcccagggccaatctgataaggtagcaggacttagagcccagaggaatggctccccccgcaatccatgcctctgggggagttgcctggtaacagccattggctggggtggtgcatcagcctctctgcctctctgaatgtctctttcaatttctctatccttctcccacatcaggctagggacagctctgatctcaaatgactggggagtcttcatctctttctcccttccccagagtcaggcagagaagcccctttcactcagtgcacatgagggagacatgtgagcacctcctccgtggaagttcaggagctcagtgatgccggggtctgtctttgcccctgaggagctagtgtggacgtgtggagacacgcatgtgtagatgtgcaccgatgcaggacgtcggccagagtgcagagtgcagagtgcagccggatgtgacaggcagagcgggtcagtgggaagagctgcccagtaggagtcagggcccccagctggcctggggcaagtcatgtcatttcttggtgcctcagatttttccatctgtcaagtgaggggtttatgatgcctgaagtcctttctggcttaagagttacctgattccaggagttgcagggagaagagccttaaagatgggtagaatgttttcattgcctctgtctttgttccaaattgggtctacccttggacccatctcagctgggttgttcccatgaagagggggcaggctgagggctcaggtgttacactcggatcccagacctcgcttctgttctctggaccctcctgttaggaaaactgccaaatttgcctttaggttcagaaaatcagttgcacctgtctagaacaaggtggttcatccttggcctgcaagggagggctgagtgactgcctgagacccacagagcctgctggggactgacatctgctcccatccagcctcgttctttgcttagagtcactttgtccgtattgtttctgtaatgccaaattacttgtagctctttcttcctttcccagtcatgaggtttcatttttcattgttctcagtgtgatctaccttgcttga

SEQ ID NO: 57402 - DNA, 938 bp, Homo sapiens
tgaagcctcaacctcctgggttcaagagatcctcccacctcagcctcctgagtagctgggactgtaagcatgtaccaccacgcctggttaatttttgcattttttgtagaaatgggggtcttgctatgttgcccaggttggtttcgaactcctgggctcaagcattcctcctgcctcagcctcccaaagtgctgggattacaggcgtgagccactgcgcctggcctctaatcactgttagctaccaagtgcttatcgtgtgcctggctcggtgcagactctttgtggcacctcatttaatccgcccagcaactttactccaatttacttagcaagaagttcagagaaagtaaacattttgtccgaggatacagagctaaaaggtggtggagccagctgtcagcttaggtcaggcaggttccaaaggttgtgccctggactcttgtccatatttccagagcaaaagggccggtcatttaggacaacagtggacaggcgtgtgggggtgatgggcagggggaccctgttcctgttgtttggctgctctcaggcgttcagctggtcaccctgggagaggggtgagggcaggccctctgctttaactcacttgtgtggtaggaggaaaagcaaattgtttccagatgaggggaggctgcctggggagtggaatttgtgccccgtctgcgcacagcagcctctctgggcctacaggaccctgtgtctttgtgttcagacaagccctgctgtgtagaggcctgagctttctgccgccgacttgggctcagtgccccgaggcaggcagatggaggagtgcggcagatgtgccgtcctctcccaggggagggaagctccttctgtttccgagtgaagtctgggccaacatgccccgtattttacctatccctttccttctaagtagttcagatcactttcagaacg

SEQ ID NO: 57403 - DNA, 835 bp, Homo sapiens
caaatacaacttcatatgaccagaaggacatcagtaaagagtgatcaaactaagtggccctggagaaacagcctgcataattttaaacaagcactttccttctgggctcgtttcttccccgacattccgtgagtgcccttatcccagtcatggtcagcatggtgggtgtgggctctgagccgtgacaggcgctgaccttgggtggaggtcccggccttgccagtgtgcccagtggggctggggaggcggctgggcacagcgagcctgggctccggtgtgtgtcactgggctcagtatagaatggaatgctgctcactggggccgtgtcctggccgaagatcagtggagggcaaagtcctctcccctgccccctccccaccgtctctgccatgcagctgcttcggagttggggctccagcacacagggggccactcgccctagagaaagagaagtccactagttctcccaaagaccgagaattcttccttttcctctgagtggggtcagcgaatcgggggagagaacattcttgctccccgcccaccctgccacctctaatgttcctgaggccagcatcaggggtctcccggttagggcttccttggacccctgggggtgacattattcttaactttgttcccagcagggagaagcctgtgtgtgtagttggtccaagcatctagaagctgctctttcaaagtcatgagctgggttgggatggggttgagctgcttcagggcaaggaggcccttgccagcagcctgggagtggctctgccacccgccctgctctaggctggtgtgggtgtggcccaggccctggacatgccttctg

SEQ ID NO: 57404 - DNA, 1376 bp, Homo sapiens
agacacacttctgcatgagatgtgtgttcccagggtgctcccaggagaggtccaataagggtggaggtgtatgggccagactcatcaatgtgggtccacatgcacacacacacgcgcacacccccaccctgaatcgtgcagagggcacaggatactgacccgccggatccctgagtaagcatcagcatctctctcctgacagaagacgcgaagaaaccagcacggaatggctccaggcagccagcagggggcgagcagagacaagacaggacaagttccctgcaggtgccggagaaggccaaccgggttgggccgggccctggggcccagctgcatggtgtctggtgctttttttcggcagctgcctgggtgtggcactcggccacacgtgggacattttttttttaacagggaagtcgtcatgccttcagcttcttatgaggtttctgagtcagctcctggctgtcatcagagaacacgaaggaggggccagggaagttccaggaagtcattccaaagtgattgcttggtttcccttttcacgacctgcagatcccaacactccaggatggtgcaggacatcagtctcaaggtaattggtcacagaggtgagaaccttactgaaaaatcagaatgtgaaccctggaaggttcctgaaagatgagctagacggttttgaaactgtattgggaatcccaagtgtagctcaaggctactggtcttcgaggtaccaggctgggtatgtcggggaggtaggtgcctggtgtctgcctgctggcgacgatgactgcgagccctttctcaagacttcggcccacctgggtcttgggcaatgtagtgcccagcatcggccgcgagagggagctctaacctgagacttggcggccgcagggctggctcagtggaccgcaggggagaaaacagggcaaggggttgagcgccatcaggagccattccacagtgaccatggaggagcagagactgcatggtgggggttgtgagtggggagaaagcgtccactcacctgaaagcccaacgacctggtctcctcggcatcagacttacacagcagttccatccaccttgaccttagggctcagggcatctgcagccctactgccggccctcggcctcactgccctcatctggcagcttctatgtgctctcggggctggagaggtcaggaagaaatagacagagtgggccaggcttggtcggagtccatacagagcaggccccctctgcacggggagtcacagatttctggaaacctcagctgagcctggtgcagtggcacagagcagccctgccccagttcccagtggtgactcctctggggttcagcacatgggacagaagacctgccctggggaggt

SEQ ID NO: 57405 - DNA, 719 bp, Homo sapiens
ctcctgtcatctgtaacttctttgttttttcttgttcacttgctgctttcaactctaacttaagcccagttcctattattggtccccttagaggaacaatgaaaacattcactgttctaatacaggaatccctctattgttccttcttccttattgtgaatggcaacaattacagagtttccaacaggtggaggccaaaaaccaaacagatttttcaatgttgactttctcaggctgcatacagaagggcagcatctgccccacctcccagagcttcgccagcaaaggccaaatcaaacagcggcccagagcagagggctggccagctctacagagccagcaaacaccagagggaaatcaccctggatccatatcttctaacctttgcctctgtgagcatgtttgggaaggagacatctatgagattgcaggagccaattcaggctacatgcttatagctgcaattgaaaaattaggctagaatgcagggcctccctgaagatatttctgaaaatcatgtacttcctttaagggatttacaaatctggagtccttccaaaacaggacaagtaagacatgagcagtgactttctactctccatccagcagccaacaatagacttcgtcattcagatggagctgcagaggtacagacctgagagagctggaagtcatagagccaatcccatgtattactgacgaggtaactatggctcagg

SEQ ID NO: 57406 - DNA, 650 bp, Homo sapiens
cctgggcgacagagtgagactccgcatacctcccccgctgccccccaccaaaaaaaaaaaaaaaaaggttaaattagttaacatatgtgaagggcttggtaacaatcacccagtagttagtagcccttttgtttctttgctacagtgtactagcaccgtttttttcagggacactctgccatgaattataatgctcttgcatcatctattgatccctctaactgcatttcccacagctccccgccaacccccatccttcaaagtagcaaggccaggcagtcttttcaggcaggagtggttactgattagactggaatatgcatctgacccaaggtagctcaatcatagactgggattcaacccatgaggcagcccaacaagaaggatgttgtccaataaatgtagtaggattctacattaagcagtcagaatttaggttggggaatacggagggaatggatcaatgagtaccaaaggaaagaagggcagatacgcagagataagaaaattcgtcacgtgagatagtttcaaagggagagaaagcgggcaggttttgaaatcctgattttttttttccagttccagttcttatgtagtcctacaataaactcctttttctgctctttgcaaacaaaacacatacacacaca

SEQ ID NO: 57407 - DNA, 1971 bp, Homo sapiens
cacatttttacacagttgtctattcttcatgggtcctacgcataaaaatagagatctccctggtctctgaagtgcctggtggtgtaaaactttgattagatttgctctgcttttaccttgttaacctatcttctgttttaaggagtggtggctgtgatccttacaatgggtggtgaggaaaggtactaaagttttcggcccctacgttgcactttaaataaataaatgtataaaagcaaagtagacaaagacacatgaagtcataatgaaaataccagagtcagccaaggaagaaggcagacttgcagttgaaatgctccagatcactttgtccaccgaacgaaaacatctaagaacatacagtccatactccaagttttaaacgactgtccaccaagaagggaaaaggagaactgatggctcctcttaggcccattcaagacaagggggtcccaattcccttgctttagactggtgggactggcaggtaaacctgaggcaaatgactgactacaggttccaaggccagttactccaattagaaagcaaaacacaaagtttcaaaaaacagtgaaggcagtcgggaggctgaggcacgacaatcgctttaacccgggagacggaggttgcggtgggccgagatcacgccactgcactccagcctggacaacagtgcgagactccgtctcaaaaacaacaacaacaacaaatggtgaagggatgaggctgaaacatcacgggaagtaaaataaataattgtaacaagaaaacaataaagcattggagaatccacccaggcacttccactgcttaaaaaggtacagactacagaagccaaaaggcccgggaactccggtcccggaactcaacacccagactgaagcgagcgcggggaagcagttccggtgaccccctcccgcccctctctcatcaaccccgccccctgggcccgccccgtcccgcccggctactcactggattcgcttcccacataacggtgacaaaatcgagcggagagagcctgtgggaaggggctagccgcggggcctgggtgttggatttttttttttcccgcgggtccccgggagcgaagggacggagatgcaacctttacgaaggccttcctcctccccctccctgtcacaagccagcgtttacagaccacccaacctcccgacttccgcccgacgttggccagtcagatctgtctccgccccactcctacaagctcgccccgcccctgcacgcttatccatacgcgcgcgggcggtcgtcctgggcggggcttgcgagtctgtgtctgacgaaggagtttaaagggtttctggtccaactgtatcacccagtgatcttaaagccacggctggctgtatttctttcctatgaaacaaatttttattgatcaccgtgtaacgaccaagagtcacacaggcctggcaatggcatttgggagaaacttcataatctttcaatatcttcatcctcaaaatggagatggtagtaatatctccctatgagtgagattattgaaagcatttagcacagtatttggcacacagagttcaataagtgacggttatttgctcacaagggaacctttacatactatccctgccctcaagattttataatctagaaaagaaagcaaaaagtagtttagaaaagttaaaaagtgcaatatgatttataggtaatatggtgaatagagagtgctatgcgagcatatttacctagagtagagtgtcaggaaagctccctcaagatgtttaaaaccatgaggatgtattcctactgatgtaaagagagctaacagagtgaaataatcttccatgcaacaaaggatctaccccataggaaatgaaaattaaacagctcattatagatccttctggacttttctatgcctctacacattgaaaaaaatgtaatcaaagaatacctatagatttagaacctgatttttttttcact

SEQ ID NO: 57408 - DNA, 2616 bp, Homo sapiens
tgggattacaggcatgagccaccatgcccagcccatctacaattttgattacatgtcagtcctgattcatgactaagttctgctgctatatctaactgagtagatttttgtaatctaaggcagacagcaccaccaaaacaccaccaggctgccttactcgttgttgtaacccgtggcatagtgactggcatggacacaagtgtgaacttgactccacctctggacacagggctgggctctctctcactcacccttgtatgtacctggcacattgaacacactcactgagtgtattagtccgttttcacgctactgataaagacatacctgagaccgggaagaaaaagaggtttagttggacttacagttccacatgggtgggaaggcctcagaatgatagtgggaggcaaaaggcacttcttacatggcagcggaaagagaaaaatgaggaagaagcaaaagcagaaacccttgctttcagatctcgtgagacttattaactataacgagaatagcacaggaaagaccggcccccgtgattccattacctccccctgggtccctcccacaacacatgggaattctgggagatcaattcaagttgagatttggattgggacacagccaaaccatatcagcaagtgttggctaaacaaatgaatgaatgattgaataaacttaactaggtagaaactgaatgcatgagaaaattccagatctatagttatgaagagagggaaccaaaaggctatcattttggataaagaggaaaaaaattaattttcataacttgttttgggttttgcttcatcatgcatgctagtcttatttgtttgctccatccatccatccgtccgtccatccatccatccatttactcatccacttagcattcatccactcaagaaacattttccaagcacctaatgtgagccaagcactctgctttgggtttggagactttaggttggtgttaagaaaaacttcctggccacgtgcggtggctcgcgcctgtaatcccagcactttgagaggctgaggcgggtgaattacgaggtcaggagttcaagaccggcctggccaacatggggaaaccctgtctctactaaaaatacaaaaattagccggccatggtggcatgcgcctgtaatcccagctattcagaaggctgaggcaagagaatcgcttgaacccgggaggtggaggttgtagtgagcggagatcgcaccattgcactccagcctgggtgacaagagcgaaactccgtctcaaaaaaaaaaaaaaaaaagaaaagaaaaacttcctaattctctatctgtaaaaatgttatcattggcgtgctggaaactgattatttctcaaaactttcattccgtgatccatccatttatttgttcatctatttattcagcaaatatctttgagcacatcctgtctgccagacagtgggaggcaggcaccaggaattcattctttttttatggactcattcatttaattagtaattcttaagcacctaaaaagtggcaggcgtacatggggtctccatttttaaagagcttaagtaataatagtggtagggttcaggtggtagacaagtaaacaaacaagtaaataaataaatttagataatgataaggccaaaaataataataaaatatgtgctagagagataccgcctctgccctcagagagcagaaatttctaagtaaacagggctatcaccagattatctgagtaactgctacctacctgggttcttttgacttgaatgtgtgacctggcctgggggcagaggagggaggtcttggagagaatggagccagaaggccatggaggcctctccagacctgcatctcatgtcagcgggacagagctccttgccctgtggcccccgctgacctgcctgagctgtcttccgggagggcaaatatctgccttcaagccactcagatgaaacccccaccctgcccccttggttggaactttgcctcactggtgacctggttttgaactagtgacctggaggtgaatgactccgtatctcattactaattctccacagccgccacttcttcctgccagccacaagcaggaatgtttgacaaggatgaggacagaagtccagccaggggccctgaacccatcagccgtggcacccaccccagcttcaacccctgccatctggccttctgccattcctcccatccttggcctgactgaacaggttttgaaagaggccaaggtcaccctggggccaatctccacagatggattcagcctgagactcagctgtggtctggctgggacatgaatgctcagggccgacacatgctcctccctcgtggtggacgtaaggctggtgaagtctgcacctccaccaggtgggatctgactagatctagaaactataaactccccgcattagcctgactccctcttctctccaccctatttccttctgcaccccaattttctggtttcccagttctgctagttttttgagtactcttgcccttcaagagaccatcctcacctctctgagtttagtgttcagggcaggtgacctccatccaggaacctggacaaatactgataagaaaaagtcattgagtg

SEQ ID NO: 57409 - DNA, 1417 bp, Homo sapiens
ctaatagattcccacacaaagcaggcacgtgaactctgctgaaggaagaagaggaggaatcaacgacctatgctcatctgctggacgtctctctaagagcacggacccctgcctatggaccaggggcaaccattcaaggcctttacagagttaggaatgaagttatctgatccaaggcaggaagataaggatgttgtaaccgttcactatggtgtgctcctttcaaaggcttcttcatcatccctggagggggattgtacgaactctcagggttgggagaggaagggggcagctagagagactgcagcttggtgggtgaaatggaagcagggattgcatgcaccacagctcgcttctttgtaaccaaggcagaatggaagaggaaggcctttggaataactttcctaaataagccaacaggccatttaggcgaaggtgggggtcgggggacacaatgtgactccagtgggtggccgtagcagaggtgacaaagaggaaacggccccctggccttggccccaggcttcaggatgaatgaggcctctcccagcgacctgaaggtcaccccagggcatgtcccaagaccttgtacagacaaggcttctgattactcattagccagcctggggactggcctccatgttgctgtccttggccataaacagatgaaagccccagccgccagctcagggcaggcgggcctgatagtctagtagctatctcagcccctggaattatcaaagcctggagcagcccagacagaggagggaggctgggctttcaaacacttctgtgcccttcacaactcctcctcccctcttacccctcacccaaacaaacagaaggaaaaaaaaatcccatcatactagacaggattttaacagatggcttccagggcaaagattgcctgaaccagcttcggcaaggacatgccaagatatgctgatgagagggaaggaatccttctgaaacccctggaatggactgttctatccttgcttcaaggctgagaaaaaaggcatcttggatgcagattcagggtggggccaagacacccgaaggcctcggtcctgctcaatctctgccttctcacctccccccttctttagagggccgtgggtaggtacccatatgggcatgccttctgttgcttctccaagcctctcccactcagccctctctgactgagatttgaagtctagaaagcagcaagtccttccctccaccttgtctgagaaaatccagttatccactccaagtctctactcccctaccatgaacctggccctgggaccaaccccacaaccaggcagctctcttgaccctgggtctttgtccgctgtccataaatcaaagtggtaggttgatattctgtagagagaaatggaaacagaaccagaaagtcctgctattcaga

SEQ ID NO: 57410 - DNA, 1896 bp, Homo sapiens
aaaaagctgggggagaggggcagtaatttcaagcagcccagaaagaccactgggataaagctggatggagagggacagagatgctcagaggtactaaggtgggggaatgacatgatgccatttacatgttgagaaaagcacttgggccgctgcgtggaaaatcgtttggggctgaagtataagaactggatctcggttcttacaagaacctgaatcttagcgccaaggactctaatgatcctgctcaaacctctcatttgaaacacgagaaaaaaaccccaaaacaccagaactacaattgtgagaagccttggccaggatcgcacgttaatctggttgtaatgtagctgtgaactagggtctctgactgctcttccgcgatttatgagcccgtgcccccctccccccgctgccttctgcaatggtggagtggccaggagatgactgccgggcgtcggagttttgaggcaggcgagggtggctcgcaggccaggctcctgcggtccggggaagatgcgcagcaatgcgcctccaagccgggcccaggccgagcgcctctcgccgccgcgcacattccggagggggaccgcggggctcaaagggcctgcggcgtaggtggctcagccctttccttggctttccctccagggccatacttgccgaaacccactgcctgagcctcccgcccgcccgccgcgcccccgcccggggccgggaaacgagcagggacaactccccgcccgcgcctccccgcgcccggcggcccggctagcaacccagaggcgcggcgctgcgattggctgcgcgggggagaaggggcgctgcgctgctccaatcgccggccgcgcccggaggccgcgccgccaggaggccgcggacgcgtgctcgcatgcctgtggtatttgctcagaggggcatgaccacttcgggcaagcctttaaatgtgagtcagctttcggccgatccctgggaaaaattccttcggtgttgtcaggcagggttcgctagctgcagctttttttttttttttttaaacaattcaaaagggataatcccgctgaatggggaaaggcattcggaccccgtctccccggaggagaggccgtgggcagtgccgggggccaggcctccccgactctgggcggccccgaggggctggttttctggagggtcagggcacctgccctttcttccctgcgccctctccccaacttcagcagggcacaaagggccggggggcacgtagaccgcggggcgagcagtgccccctggagttgtgcccggtcccggcctccctttctcccctctctccgcgcttctgctcctggacccggcctggggaagccgagcggttctaggtcatctctccacctccctaagcttcagtttcctcatgggcgaaggggaaggcggacagtagaggaagtgagctggcctgggagtgtggaaacttggcgtgttctcccagcttagtcttactaacgtgcttgggcaagccccttctgcactcccggcctcagtttccccatctgtaagatgagagagccggtctggaagagtccatgagtgtagtgacatcaggcgatcgcggtaccccttcctggggcctgtgggcgcggggtggataaagccctgtgacttgcccgcctgctcctgcacaactccatagctgctcccccaggccacccagcttcccctcccaacgtcatcttagagacgcccagtaggcaggattgggagcaccaaggggaaagaagaccaaaaaaggccgagggctgagggaagtgagttgggactggaggggtttatgtgcaatttgattttaaacgaacatcttgtgcagaagaagaggcaatttggcacctgttactggtgggttaatagcttaggcactct

SEQ ID NO: 57411 - DNA, 766 bp, Homo sapiens
aggtatgtggctgtggtgtctcctaaaaacttggagttcaaaggtaatgccctctatatctacaaagtctcaagataccaacacataatagctgttcactaaatatcagttcattgacttttgagcaaagtcaaaatgtggcctttcactgaaggagtccgaggcctgggttcctacctccagtgggactgtgacctctgtacaaccccagggatcctgtcttatctctgcttttctaccagggaacctttttcccacctgatctaactccttttccctgcagcttgacatataagacgaccatattgcagctgtaccgcatggaatagcggctccaaggcccaccttcggtggtttgcacacccctctttgcactgttcagaaaagcaccccctccttcccgcccctccccctcctcactggtagggcccgcacaaagtccacagggctgaggctggcttcttgaactgagctctttgtgaggagccttcctttctggggctctgctgccatctagtggaagacatgcacaaggttgggggaggaattgccgagaatgtggagaggggcctgaatgacttcacctttgaaccgctgccaggttttagctgcttctggtttggtccgagaggcctagaaaggtgctttcttctgggagatctgcttcctttaataacggtgcaagaccagtggttcgtactcgcattaccctgtgaagaggaagggctggcatttcaagccatctttgaagatgatggtggtttag

SEQ ID NO: 57412 - DNA, 1888 bp, Homo sapiens
gaaggctattaaagagaaattattcatctgaggcttgttaaaaacggcaagactttactcaagactactgcaataggtgagagagactgaattcgactctagaatacaaccgggaccagtggagatttatagccagggggcgggatggaagggatgaaagagaagatgggaaattaccagaacgtggtaagctatctgggggagggggaggaggaactttactagatatcaagggccttagaagagagcatcaacagtgaggtctctcttgataaacaggcttagcaggattctttggtaaaaccaggctcagcaggccgaggatgccgtctagtatagaaaaggcctcaaaggagcccgactaaagtttggtcacggagggcgtctgtcccggcggagttggggtgggtgggtctaagtctacagacctggccgacgctacgtccctaaggttagggactaacagacctcatagaacacagtctgttggtcgctgtacacccgtgaggggttcatcacagtggccagctataagacgaacggttgcattccagcctcaatcgcaacaaccacaaatcagtgcgccggcttccttatctgccccgaacgcaggctgccggctatcgagggaaggaatcctaccgcggactccgcgggcggggcctcccgcacctgccgcgcgccaatcacaggccggcgcgcaggggcgcaagcgccgcagccctgggcggggcccccgtggctccctcgtctcccccgccccgtcggcctcgcccggccctgagtggccttcggggatgacgtgcgaggccgcctcggcctatggcggcggagccggccggctgcttggcggaagtggtgtgggggaggtagcccgcagtgcaggggcagcgcggcgcggggccaccgacgggacgcggctccgggaacatggctcgcttcgctctgactgttgtccggcagtgagtatggctgtggcaggatgtctttctctctctcttccttgagtgtgttggagcgggtgaagggaaaacgggtccaccaccctctcccctccctgctcgctccagcccgggagggctggcttggaagcgctttttccggggcgcttgccctggggccgtcccgtgtcgcccctcctctcaccccagcagccccgagggacgacggcaggtcttagatagcttcgttccgtgtttcagataaagtgaggcccggaggagcaagggatcggggttcgtaggcacttggtggctgcaccaaaaacggtgccagacatgtccacagacttgtctgggtaccgattttgctccccagcagattgcaaagagtttgcagaattgctcgtccatggctgatgtttttgatgccggctgccttccgctatcctctcagtttctgaggttccccctcgtttccccaggcagtcagccccccaggcacatatatgagacttctttcttttccccagaggttacagttctgggagagaaaagaggatcacagctctgatctcagcagaccgtatcatcccaaataaatgtttttattatcataacgttacacggagctgcatgctgataggtctttatgtatttgccaagtgttaacgggaggtgaaaatcagggtagttaagagcacagatttttatttttatttttttttttttgtgagatggagcctcgctctgtcacccaggctggagtgcagtggcgctatctctgctcactgcaacctcccgcctccggggttcaagcgattctcctgcttcagcctcccgagtagctgggattacaggcatgcgccaccacgcccggctaatttttgtatttttagtagagacagggtttcgccatgttggtcaggcaggtctggaactcctgacct

SEQ ID NO: 57413 - DNA, 1258 bp, Homo sapiens
acacacgcatatgttcgctaaagtacacccagaagaatgctcatataagttttatttataataccccaaactggaaacaaccaaaatgcgtattagtaggagaatagtaaacttgtttattttatgagataaatactacacagcaataaaaaagaatcaaccactgataaatgcaaaaatatgaatgaatcaggaatgttgaaaaaaaaaagagaaggcagacacaaaagctctggttcaacatttagacttgtgtttcaagaaactgataactttagttctttctcctctcgctctttttttagactaatggtctatcctgaagcctgggttcagttttagcaaccgtgaaatccaggaaggtttcccataagaaaatgggatggaaggtctggaccgaacacacacagccaacagagcggaggctctgaggctcacattaatcagggaaaaggaagacagacggtcgagctgagaaacttcagccgggtgaggggactaatccctctgtaacggttgtcagtctgaaagggcatcctcactcggttctgggctcacctcgtctagttccgaagtcctgggcagtccgctcactcgagctgtcagcgcgtcctgcactgggaaaccagctgacttgccgacatactttttccacaccgcggatccgcgaacgtagattcgccacatccttttctatttcctggcatcttgtagaaaatttctcagtccaagtgcccctatgtcccaacctgtttcaatttaacaatttgaaaggtgcaataaggtgtatttctattgttattctgtatttcagagacagggcaaatccgccgttgtgacgaaagtgcagggacaaagcacaaactcggctctggtggaccggatacggaaaagcggtgccttggggagggcgggagcaaattcgctttccccacagcgcgtgcgccgccgcaagcatggctggtgatgattggacgactggtaacagggggcggagggctccgaagtctggttttgggcgggaattgaaaccgccgctgaagccaacaagaatttgagaactgtaaataccaagccttgaaagggaccatggtgcggcctgtgaggtgggtagttcctgacattcgtcgggggtgggaggaaaactaagggaaaagacatgagactaaggggaaaggatcgagtaagaccggagggcagcgatggtggggttaggatggacggttatcaagaacccagtctccagtgagagccaccc

SEQ ID NO: 57414 - DNA, 902 bp, Homo sapiens
gaaaacttagtcttatatttgtcttatgttttgtttgtttgttataaacttggctcacttagattcactttcctacgacagtgcccacgttggagttcgttatcaataaagcagggacagtcacacctcctttataatcaggttgctggcggatttgatgctgtgatggtgtaatgggagttctaagtgctggccagctgcacttccctttcactgccagcgggggcgcagtctaactgagaagttgtcctgggggagagcgttctggagggtaagaagtttgtcccacgaggtttctcttactttgcctccgcagtatacacgtacatccaaagccggttctaccgatccccagaagtgatcctgggccacccctacgacgtggccattgacatgtggagcctgggctgcatcacggcggagttgtacacgggctaccccctgttccccggggagaatgaggtggagcagctggcctgcatcatggaggtacgcggagggctggcggtcggctcccacggagaccgtgggcttggccctcagacacggggctgcaccagactcgcccaggaccatggcctgcataccttgttgttgttgttgttgttgagtattccctaaaaggagttttgaaattgtgtactcccttgtacttgtcaagtcgacatctaacgttttatcataaatttaaatagttgcagaggatgtcatttccatcatattgtaaatagtgacattttaaaataaaattacaccgctctttcaaaaatatccaaaagaatgcaaaaccagacggacatgacacccattaaaatctatctgatagtatgtgaacaggttcttaagagttgtgccatgattttactttgttcttttttcccttttgtttctactcttttttc

SEQ ID NO: 57415 - DNA, 1913 bp, Homo sapiens
tctccttagacagatgttcagatggcacacatggccactaaatttgcataatatttcaggaagttcacagatttcccgaagcccactcatgaatcacacttctggttaagaactcctagattcatatgctagttggtgataagtgctttggtatataaacttaaaccaaaaattggtggaataattaccaccttggataggatggtcagagaagttttatccgaagaggtcacttttgagcagagacttgagctggtgcagacacctgagtgtgcattccaggaaacgcgaacagcaggcgcaagggtccctatgagagaatgtgcttggcgggctcgacgcacatttatttacttgggacacaccctattttggtttctcttctccacttttcccctcgttcttgtccccccttttctctctcctgggccctggatctcctgagcgcggagggctacgcctccttcttcctccggactcaccagggctgccagcttagcttacattttcagggaacaggaaactgagagtcaggaaaggtgagctcttctacctcgggtcttgccattttgcatgtcctgagtcagtcactggttaactctgaacttcaggttcctcggcaattagagattataaatagcctatacagcctattccagatctgagattccaacagccaaagtcttttcacttcctttcttccccctctccttcactttcccagctttcttcttaaccaacaatctacccgaaaccgtcgtttcttggttagcgcttgcgcagacaggcgagaaaggtaagttttgacccagcttagcagccgtagtcagccgggagtgctgtcgtgggggattgtgggaaaagatggcggctgccgcacaatcccgggttgtccgggtcctgtcaatgtcacgtaagtgttaccgggaacggcggcccctggtcgggattccgagacggggatttaaggttttggaagtggcaccgtgctgcagcggtcacgccaacttcctaggcacactctggtttctctaggtttggagctgcctcagtctggtttctcctttcgctttccgcttccccggctcacatattcaattgtgcaccaccttgggaggggacaaaagatcttaagcagctgtaagcgaagaggagaatgcgggggacacgttagggatcgagagaatcagaattctgatatggttgtaagggtttagggttatgagaaatatttgtatggggcggggggagaaatgtgtaagggagggaaaaaaggctagtggcgagaggttttcttagattgattttatgaccttgtgcaaacccttaatgggtctcaattcatatgagcacaatggaaatgataatattacaataccagggagtctctgataagattaaatgagctaatatttgtaaaagcatccttttacccaaaagcgtctctacggatgtagaatgtgttcggcaaagtgcgttggggtctgggggagagagtgatgtttgaggagagaagaatcaggagcttggtggaaaggaaagtgaagaatgaaggctatgttagaatttgttagcattatttagtttctcttctgttctgattggatctgctcccactcctcaaactgaaaacatacatttgtccttccactcactaaaaagcaaggaaattagaaatacggttacacttcatcattgtcctttcaccctctactcttccacaaacatattccaatcaaacccccaaagttgtatttttcttagtgtattttagtcgttacagaatatcatttgctttcaaaattggctcatgtcagaatcactcgtaaagctttataaaaattagaaatgaggactgagtgtagagctattgagtcagaatttgtgagattagctccttgcaccttaaattt

SEQ ID NO: 57416 - DNA, 963 bp, Homo sapiens
cttcctccatttctgtctggtttttggacaaattcttcagattgtaagatgttcagcattctgggttgtttgactgtggaaacgcacgggagctcttgcggtgtagactctagccccagttctattgccaatctgtcagggccctagcaggcatcactgctgttctttaagacttactcttgccaacctcctgttgcacctctggaaacaggacgagaatgattttttctgccagtgagttgagaaaagttgtcacactgaaagtaccaactgaataaggtcagagaatcaaggaagcaagtgcctgtggaggttgatgaatcaacagaaaaatattaccatattggatgtccacccgcctatgtttaaatcttcatctgagaaaggggtgaagtgttggaaagcatttaaaatctgcaaagatgggaaatgagataacgacctgggtcctctgggacaggacatgccagtgctggttcttgagaggacagctgctccaacagccgggctctccagaatatgccgccgtgggcttcggcctggcagcagggcccctggaggagcctggcacccaacaggcgctctgtaaatatttgggaagtgagtggacgagtgactgtccctggtttgggctggtgccatttagagggcaaccagagtgcagggaagggaggagcttgggcaagagggacattgctgtcgctggttgatggtgagatggcacttaatgagaacctggtcattgggaaagccccaagcctgcgtcttgctgtgatgccttccccattatgaagggtccattggcatgggagtggggagacctggactcagagaagctacaagggcaagggtggaaaggcatagcttctgcaagttgatgctgaaaaagatccaagactcatattcagcagacagcccataaccaagagccaaggaaaactttgcctctgcttcttctactgg

SEQ ID NO: 57417 - DNA, 1581 bp, Homo sapiens
atgccatggttacttttgccacggtaaggggaggcggcgggcaccttgggtgggcaggtttggggatgggggtccacgtggggagggattttccagtggactggtgcggggggccccagatccgcatcccgccccacccccatcgcgccgcgctcactcactttcccgggcttgtgtcttccccaaagtttgcgctgggatctgctcaggccgaagcgcaaccgcagccaccccgctacacacacacacacacacacacacacacacacacacacacacacacacacagacacggacacccttctccacctcctcccctcttgtccctcggctgcccaagaagcttccctcaatctgggaaagtgatcaggtttaagggacctggattggaaagggtgggggcagaagaggggaaatggggacgacgaaagagcaggaaagagattcaacagaatcaaccacccaccactcccaaccgacccgcctgctcctccgagaaagctcctagcgcatcctataacaaaagggggtggcagacagaactccgggcggggaggtgccgcggcagctcccctgcacacgccctgcactctgccggccgctgagcctgattctcagctcgccccagcaccactctggcccgggcgtgggctggggggaggggacgcgcagctcaggacccggaacctcgcgttccagttttgggagttgggactcactgccacgcgccgcgtacctgcgttggagttccccgaaagggttttttcagaaaagacctcgcgccccgggctcctcttggccagcgcccacccggtggccaccccaccctgggcctttgcgcagatgttggagctccgtacgcagcccgcacatctgggacccctccggggagcggcgggcacccgggcccggccatcccaggggatctccttgcggtatcgtccagcctgttctcggactttgagcggtggcgtgggaggccgggagacctgggcacccgcgcagccagccaggtcggagtttaaaggtcccacgacggaccgaactgtcccattgccccagagctttactcagtggtggatgctcctgatgaaatttgggacgcttgggagttgaaggttagggacaggaggggcgagggccgagggcatgggatgggggagtaggattctgcttgttgctctccgcgggagtgggtgcgcgtccaggaggcgctgcttctttgcgggagtttggctgctgcgttcattcgtcgtctgcgcttcagatgcacggcactgagacccttgcgtccgacggtgtcggggctgtggactagaaaggatcccttttgctggaatcgaggctggggtgggattgccggtgggggaaacaccgaaaagatcgtctggcctcggcctctggcggcgggcggcaggttctgagtccgaatggaggttgctcccgggagcgccgggctcagagctagagagctcgggagactgtgcgcctgtggacttgtttatgtgtgtgaagaggcgggggcgagggcctgctgagaggggaggggagcctggaaggggtgggtgtttctcctggagc

SEQ ID NO: 57418 - DNA, 2239 bp, Homo sapiens
ttgtaatctacgtggcaatgatggcacagtcttgaaccctcggcactagtctctccctctcccacatagcagcatcacatttcagagtgggtattatagtcctagttatatgaaaagcacagccctctgcatgggaaccttttgtcctattgtttcactgagccttcatcaagaacacaataaaccagctgataggacaaggagagtcttaggactagcccaagcccagttatcaggagctcgtcatttcaaagtgaccatttccctgggcttctagtaagccctccacccctaaaacagcaggctgagggatactgcagctgacgcatgtctataaagcttgagtctcaattgtttagccagcactgcaggagcaacacaagaatgtaaagaagcagttttatggccctggttaacagtggattctagaaagttggagaaatctgttgagttgccgcaaatgctccctcacctgcctatcatatggcctttctttctatcttcaggcctacagttgaggtgcctttaaggtcctcttctggaacttctgaatggtagagggtggtctggtttattagggagatggtcttcagtgacaggaccccagaacccagccttgcggggcactgaccctaaggagtagagctgagtcctgagctctgcctggaatgcaaggagtttgctggcttgtccagagcaagtctggagtagcatgcttctgggcaggtgcagctctgaggagaagagacttggggatgagacagaaatattcccaaaaggaactctgggctgcaggccatctgacggctcagcctcactcattcggaaggccagggcaatgtggcaatacccggttccatgtcagtaactttattcagatgctgccagagtcaacgtgttagctctggacccagggcagagccttctcgaggtggataggaggcctgtttctatctaatgtacacatttgccattggggttagttgaagattaaacccatctctgagataggagaggcttggagggctagtatctggctcctggaaaaactccactctctccttatcttcccttagtgcttagtttcttgcaggggcttcattaagcagaggtatattgcagtgtgaagaacttgagtgcacaggagaaaatggggtgtgggccaactttattgccaatagctgcatggccttaaataactcccttgtcctaactggggctttcaacatcatgagattctattgcagagaggggcagagtccagatgaataatcttcacttccttaatgaatgctagggtgagaagctctgttgcctgttgatgggactcctttctgccacatgtgagactctaaaattctcccctcttacagactgcaaccttgagcttattatctagtctctctgagcctttgtctacttgtctgtaaagtggggatagtggctacttcataagactgtttggcaatctaataaaatcatccatttcctggcacataagaagcctccttcagcgttaatgatgatgtttgcaaggtttgcaggatccctcattctgtaattttggtgggactttccaagctccgtagtggaggattagtcataattaacatgtattaatcatggactttacgggaggtggaccttagggtgggatttgcccatttcctttctgcaggtctcttcaaccaaactactgacccagtcttactgacaaggcctttaatcctcagttgacaaaccagggaaggtatttctaacccttccaggtagtgaaatgtaactttttgctagaagttctgccgacatgcttctctgatgtgtacatgtgtgagtgtgtgagtgtgcatgcatgttttgtttcctccttgcaaattatagcacggcttttctcttgtgtttctgcctctcagtctctgtctctctctcgtgttcaacaatgcttcctctaggctggtgttggtgttttagggtttggtatttctgaggacttttctgttgctgttccctttcctgtgttgtgtgtgagcacatgtgtgtctatatgtgctttatagttcatttagtcaatgtaaaaatcctccactgaggcttggagaagccatctgcatttattttatcgcttttgaacatgtgttcaggaatgaaggctgtgtaatcagtttattgttacctggagatttgtctggcttcaccaggaagacgcaccccctgcccaggcttcaaactctgaaggacc

SEQ ID NO: 57419 - DNA, 1181 bp, Homo sapiens
ctatatagaaagacttcgcgttggtcactcggtgtgggcccagcaggctgccaggtgtggtccaagccctccgggagctcacggttaatgacaagaaacacctccccacaacctgctgcctgccactcaggccctgggcatcactgaagagaaagggccacgagccacagaagactctgagggtgatgatggataggagtaggagtctgcagaggctctgaggcagcctgccagggtgacagcagcaaagcagcggcacagttcaaactccaggccatgagcatgtggtttactgtccattctcagaactgaacaaagttctgagcccaaagtgcacattcgggaacaaccagcagagtggagcccgcccttcccccacacagctgggggcatctgctggtttctacggagaggaccccgatttgaaggtggagcgggggctgggacccaggagtcctgactccctctccgcatgtcattaccaaggtgggatgacctccctgcgttctgaatccctcaggggctagggtcagctcttagagccccttttcagcttccagctccaacctaacaaaatgcagggttaacaatccagtagaaggtcccaggcccatagaaatcgaacccaagtaaacactgttaagaaaggggacagagtaatgtttccttgtttgcttgacaaataccaaatgttgtcacattaggccttctcccacctccttatttaaaatttaaatccccccaatcctggcacatcctgcccctttctctgctttatttcccccaggatctatcactttccgatctataatataatttacttgtttgctttgtttattgtctgtctctctccattagaacttaagctaaatgaggcaaggatttttgtctgttttgtctcactgctgtaatctcagcatccagaatggtgcctgtcttagcccttccaggctgctataacaaaataccacagactgcgtggcttatagacaactgatattgattgcccacagttctggaatctgggaagtccaagatgaaggcatcagcagatttggtgtctggtgaggaccctgctttccggttcatagatggtgccttctagctgtgtcctcacatggtggaaggggctagcaagctctctgaggtcttttaaaagggcacaaatctcattcttcatc

SEQ ID NO: 57420 - DNA, 576 bp, Homo sapiens
gccaccaaaggttagtactgggaaggagaagaaagggaagggaaaaagtaagaagtcaggcagttgtgagttcaagccctggctctgcctcgtagcagctgtgtgactttgggcaagtcatttaacctctctaggtctgtttctgctttcctaaaatgagaataaattgcacctgcctcacaggttgtaaccggaaagtgtttagcacagtggccagcacatagaaaacaccacgtgagtgagcacagagggcaaggtctgaggtcattggaaggtggggcagaagggagctttgaatgggcaaggtttgcagtaaatagaatagagttggggccaaacagaggagaaagcaaatggcagagattgctcaataatttttcctaagcagattttccagggcagggacaggatgggaggaatcatttggtgacctggttttccgagctcttggaccacgccatggtcttcatattaggcattctggaaagttccattagaactgtcccttcaagcctaaagaattaccaggcccttctacctcttaattttccaaagaatgtgtatcctctttgttta

SEQ ID NO: 57421 - DNA, 462 bp, Homo sapiens
ctttctctcacttaggaactctggacagcacttcagcatgatgctgggaccattttaaacagtggaatcaccaacacgcagcagaaaaatgcaaaacacatggtaccaagtagaccttgaaaaggacacttgcttgtggtatgagctgaaacaagaaggcagactgtcaccttgttcaccctctgctgggaatgtgcacatcctgccaaatttttctctgctctgtgttcatggatggccatgcaagcactgtgagtattgattttggcaatacaagtaaattgtatggagtagacaaatttttatttttttatttttatttttttgagatggagtcttgctcagttgcccaggctggagtgcagcggtgctatctcggctcactgcaagctccacctcccatgttcacaccattctcctgcctcagcctcccgagtagctgggactacaggcgcccgccaa

SEQ ID NO: 57422 - DNA, 1209 bp, Homo sapiens
aggatcccaatcatagagggctaggggcccactctcctctagtccaacctcattttaatttaactaattccctctgcagcaaccctatcaccaactaagttcacattctgaggcaccggggatgaggacctcaacataggaatctggggggacacaacacaacaggtgtgccgtgaccgagacagagatgggaggaacagaaaaagccaccctgacaggcagcatgggaggggtgatgagcaagttcttgttttgttgacccttaacccctctgtactccctacaggagccacttccctggcgtgcttccccagcccggctgactcactggacaggaaaaggaagggcaggaattcaggccgatgagccagggaccctcacctctggccgggcctggcacagcctcctggggagcccccgcacaccagccctcccggcaccactcggtgtgtcctgcctggctgatgggcagccacgtatgccccaccctcccctgaccgtgcccacttacccaggggcccagctgtcttggctggcaggcttccattgcaagtcactcctccatccacacagatcactcacgtccctcattccgtccctcgttccacagagcgtgttgacacccactgcggggcaggcctggctgcaggcctggagatgcaacagcagcaaaaggagcagcccctgccccaggaggctcccattcaagtgaaggaggcagacgaaaggccacaacagtcgagtgcacactgtcagatggcgatgagggccaaggaggcacagcagcaggggaggggatagggaaggccccggtgggctgggctgcgtgagccacctctgacaagggtgcctgggagcagaggcccaaaggattggacagaaccagccatgtggatcctgggggagaggatccaggctgaggaagcagcaagggctcaggcgagagcgggagtgcccccatcctttccaagaaacacccacgagtccagggtctgtgtgtgtgtgtgtgtgtgtgtgtgtgtgtgtgtgtgtatctatatgtgtgtgtctgtatgagtatgtgtctgtatgatgtctgtgtgtctttatgtgtgtgtgtctgtgtatctatatgtgtgtgtctgtatgtgtatgtgtctgtatgatgtctgtgtgtctttatgtgtgtgtctgtgtgtatctatgtgtgtatgtgtgtgtctgtatgtg

SEQ ID NO: 57423 - DNA, 2381 bp, Homo sapiens
ttgtgaggtgcagaaacacatcttccccagctggcctcacaggccaagaagcagataatgtcttccttctgccagcttccccgcagcttggttttcctgggacagttcctccgctggaggaagggacaggggatggggacaggggatggaggaggagttggggagacccttcagagagtgtggcagaaacacgtgtgtacaggctggcacacgagtcacagaggcaacagggtggctgcggggagaaatgtgagcagagctcatgcaattgtcgtgagtgagtgcgctctcgcggctctaaggatttgggaaaacaacttgcagatccaggcatgtttacgtagggaggggtgccgtgtgctggaccaggtccagaactaaaaataacacagtatttctgtgcccagcaagagcgctagcatctgtggggtttgcgtggtgggaagagtgtggtttcagctgaaccaggcgcagtgtgaccagaacagtaggagggaaggccaggcctgggtgggaggccccaggatgggcgggggaaggactgagggcgaaggccatcccaactcgcagcagaaaaagcctccaggcggtcacgggctgcccatctcgtgaggccagatgtgggtcctcctgcatatctgaaacagcacagagcattggggcagcctccaaacctcccctataaggagcagttaagggatccagagggcgtggcctggagcagagagaagggaagcaacatgtgtggggcattcacaagtgcaggatgccttctccgggctcccatgatgatccagacaggtaggcgttttccttccctttttgcagattgtgaaaacagcgttcaaaaaagactcatgggccgggcgcggtggatcacgcctgtaatcccagcactttgggaggccaaggcaggcagatcacaaggccaggagttgaagaccaacctggccaacatgatgaaaccctgtctctactaaaaatacaaaaattagccggacgtgatggtgggcacctgtaatcccagctactcaggaggctgaggcaggagaatcgcttgaaaccggaaggcagaggttgcagtgagccgagattgcgccactgcactccagcctggtcaataagagtgaaactctgtctcaaaaacaaaccaaccaacaaaccaaaaactcttgtaaccctggggccacccagccacaaagaggcagggctgggacaggcccctgcaagtctcctctggaaggccaaagggctgctactaggaaggggtggcagactcatcccatgtggcttcagagggcaggacatggacaaaggttatgggaagggagggaaactttccaataaccagactgcacaagagtggagtggcctgcctcaggaggggtaagctcatgcaaaagctggctgttggggacattgggagggactctgaaggtcaccaccactctgaatcaatgctgtgtgggaggatgccagggtccactggacccatgacgtgcctttagcgtgggaagcagggaacctcaactttggaaagagtgagggcacagtgatgtccagccactcccagaagccgtctgttaatagagcaacccctcgggcggtgtgcaatcctaatgaccagccccaggacattggaaacagggtcctgctgaccacagtctaggagacagggctgcacacagacggaaccaagcacacaagacgagagagggtgtgtaccgcagaaaccaagggctcatttatgtgctgcgttctcagtctgcaaggagtcagaagagaggacagtgaggccaggagaactcagggaacactccttgttgtaatcatcacagttatgtaactcatattaccagctgttctttcgtgagcattctctatgtgccaggctaagtgttttgtatgcactgtatgatttaatcctagaacaacactatgaagcaggagctcttagtattccccttttacagatgaggaggcaggctcagagaggtgatgtaacttgcccagaattatataactagtgtgtggcagagcctggactcaagcccagatctgttggactccagaccccgtgtagaaccataaggaactgatgctgcttcaatttctgcactgatacggaaatctctccgagatatcatgccgttgttttctattgttgctatagcatattatcacaagtttaacacatatttattgcacacttctggaggtcagcagtctgacatgtgggtctcactgggctaaaatctcagtgtgggcagggctgtgttcccctctggaggctgcaggggagaatccctttccttgcctttcccagcttctagaggctgcctgcattccttggctcctggcccctcctctgtctgcaaagc

SEQ ID NO: 57424 - DNA, 2278 bp, Homo sapiens
gacgaggaatttcgacttaggtccttgaatctggagagctacagaaagtttgtgagctcaggagaagcgctccgagctcggcatctggagcagttcaaggcagcagcgagcaagtccaaagacgcaggagggagggtggggtggaggagtagagagaaaacagaagccgtctacagaccctttttccctctggggcaactaaacctcaagtgcaggaagcgcttggggactgcccagccctcagctgtgttattattcggtgataggtatttgctaattacttccaaaagcctcccatctgtcatcccacccagactgcgcgcttctaattcctcctaccccacatgctgtgcccaatgaaaagtatggtcagcgagcgaaggtttgcaaggagacagacgagggcgaaattaagccaggcggcttccctttaaatcctcgcaaagcagaagggcccctcactctggcagcaggccttggccaaggggcctttagccctgacgacccggggaagagtctcccaaagcagaacgcccggtccggcgcccagaccaaacgcgggggaaccggaagggcgaggcctccacgtaagtccgcggtaaaagtggcagggagtggctgcctgcaaagaccccaagacggcttgaagaaggagtgggtggcgggtgggggttagggcgactaggcggggaaacagggagagggtcgggctccgcggggcagctggggccggggctcgccgacctgggcgggggcggggggcggggggggtgcggcccgggcggggccggtggggcgggaggcgtggccggcggggggagtgggggcggcttttcccggcacatgcgcaccgcagcgggtcgcgcgccctaaggagtggcactttttaaaagtgcagccggagaccagcctacagccgcctgcatctgtatccagcgccaggtcccgccagtcccagctgcgcgcgccccccagtcccgcacccgttcggcccaggctaagttagccctcaccatgccggtcaaaggaggcaccaagtgcatcaaatacctgctgttcggatttaacttcatcttctgggtgagtgagcgcgactgccgcgcgctcctctcagggcccacctgttcgcgggccccggacactggccgcggccgcgagtgccggcagctggcactgcccgcaccgggcaggcaccgggcgggaagagagagcgccctgcggctgccagctggctccaaggccgggtccagagccgggcgggacggccgcgacgggcgcattcgggtgggggctcatcaccgcccagccggcgtggggagccgggccctcttgagatgaggcgtgcgggagggtcctgagcactttagctcgcctaggatttgagctggggtgtgtgtctgctcccagctcaagtccctccgagtgccagagaggaaggcagggagaagcggagcacccctctttgggccaaggccaaggaggactgtggtgagcagtatggcttgtgaccgggtggggtctcccaggtagtagggggcgccaggaagggagggtgcgggcacggcgagagctcagccaagagcggctctcacttttacgcaggagcggcaggggtgcctcggccgcgggtccggccccgggacccagtccctgagagtcgggggcccctccacccttgaggaggaacctcgcaggcccccgttccctcagactttgattctgagccaccgtgagagcgccgaactccctggtagctccctgaaagactagcttgtcttgatttctttcaaggacgataagtatcttcactggagagaactcagagttcgggagaggagggggcagatacctatctgcgcctctagtgggatgagtcctgtgtgtgcatttccgggagagatcaggtgccagccagctgcccgcccaggagagccttggccttgccctctcccctccccgccagcccaggcggcccacccaaggccaggcagggcgcagagcggacgttcatctggagaggccagcggggccaggagctccagagacacctgctgcaggccactcagcctctacaaatgggaaggctgagaggcgacagaagcaaggaataggaaacccttgtgtccttgtttctatagccacattccctgcacacacatgacaatacttgccgctctgcaggcaggaagagagtctctatgccactctcaagatagatggatgtagaaacaggtgcatgccaccagagtcttgtaacaaaaaagtgcacttggccagg

SEQ ID NO: 57425 - DNA, 848 bp, Homo sapiens
tgattacagcggagttttggttttcttgttcccggtgtttactgtgtggtggagctggataagggagcaccccaaagcctctagtcctgcccaagtggctttgcccttccaaagacaacagccccagccttcatttggaggtgggagaggaggacacagagagggttggaggaggctgtgggcatcgggatcctgtttgttcttgctggcactgcctggcccggcttcctgaggagtgaatcagcccatccaaggcttggcatgcagtagtgagccaagggttgccatggagatgggcgaggcccagagcccacaggtctgggtggcctgacttgtttttaaatgttgaagtctgtgcgaagagggagggcctatctccacttctgtggctttcttaaagcgtgactggtattttggggcctggaaaactgctggtgtgggaaacttgcatccccagtatttggtgtgttgcttacttcctgggtgctatggacaactatgactaatgctctcccaagtttagtagatgacaaaaacaaaaaccagggctgacaagcatcttattgaaggagggtgataaagaggccaaggtttcctctcctgcccaacccaggaaaatcccctctctctctgttatctgctgctgtaataactcctttcagcagggttaatttgcccacggaagcagtttgtgatccaaggaaggacagaagcctaaaatctgagccaacagtctccctttagccttccttccccactttcctttggccattcccatccagtcttagtggagctctggatggcagtttgcaggtgtgaagcagataagtttatccattttcctccac

SEQ ID NO: 57426 - DNA, 751 bp, Homo sapiens
aaactgaaccggagggggattaaggccctgggcttgttcgtggggtcttagacctaaaaccaggtcttccaagtgaggctgtcctgcaggtctcacatgcacacgcacacacacgcacacacatacacacatgaatacacacacaccctcccaaagggtcccgggccctgctcactaaccccctctcccgctcggaaaggtgccctggaaggcaagtggcagaagtgactttgttgtggggatgatctcaaacctgctctcactggggggaaagttagttaattattcacaaatgaaaaaaacaaggtacagggtaatgggaataatatgctaacatttgggtactaaataagggaaaggaggaatgtgtacaagagtgtttgctgataggtgcacaaaatgtttctggaaggatgcccaaattctggtaaggatggctgcctcaagggagggagctgcccagagggaaggaaggggacttttcagcgtgtacccttctgggcctttggaaatttgatgtggttacagaagcaaatatgtgctttaaaatacacgcaagtgctttggttatgatgaataacagattacttaaaacacacccacgactgaggtatgttgtcatgtcatgactgaaaaccatgttcccccctggcccctcctttccctccccacggttccagttgtgggaggccacaggcccgagcgtcatgatccttgtgaatgagggggggcagaccacatcaggctctgc

SEQ ID NO: 57427 - DNA, 3820 bp, Homo sapiens
ctacaggctcccacacctgagtataacttttggctcccctaaaatttaactaccaatagcctactgttgacttagaagccttgcagataacataaacagtaggtaaacacgtatttgatgttatatgtattatatattgcactcttacaataaaggaaggtagagaaaatattattaggaaaatcataagaaagagaaagtgtatttactattcataaatggaagtagatcaggcataaaagctgaggaagagggggaggagggagaggagggttggtcttgctgtcccagagacagcagaaaattctcgaataaacgtactctcgcagttgaacgccctgttgctcagggtcacctgtatctgtaaaatgcaatcttagtggagcgctgactatacgccaggcactattttaggcactttgcatgcaccttgtgagtgggaggcccagcagagctgacttgtgagttctgggacttttggagagtccctgcgtccgtccgtgggcgggatctccaaggtgaggccggtggcccaggtttggcaagttttctgcagctttaacacactcggcttctgagccagatcctgtcaggacaccttcttcaacctgccaagcggggacccacccaggagttcctattttttcctgatttgctctgagaagaggccgaaacaccggggtacacccaagaacggagagggctttctccccacgtgttagccagggggcacatttcccccgcggcggccgcccatggccgggccttggcagagctgtccctcgaatccgggccgagccggggccggccccgaaacccgctctgggagggaagccacgcccggccccaggaaaggagcgacgggagggcccgcgggaacggcctggcccaggcccgcgcgccctgccctgtgttcccgggaggcgcggtctcctggcggcaggggagtcccgggagggcgcagggcggcgcagagcctgggatccccgagggtcagggcgagccggcggccagggcgcggccgggcggggaagccaggggcggagggggcgcggtaagcccacggagggctgactcatcctggcgccgccctgactcacccgcggccgccctggcagccccgtcctgccgcgccccctcgcggccacgcgcggaagcgcagccggggtgccccgccccgccccgtccgcgccctcctcggagcgccgagctggctttgagctctggcgagaaagcgccaatcggcggcaacccgggaatccaaggacatatggggtgcattggagtatttttccattttcttgtagataatgaggtctcgctctgtcgcccaggctggagcgcagtggcgcgatgtcggctcactgcaacctccacgtcccaggctcaagcgatcctcccgcctctgcctcctgggtagctgggaccacaggggcgcgccgccacacccgactaattgtttcgttttttgtagaggccgggtattgcggtgttgtccaggctggtctggaacttctggcctcagcccatccttcggtctcggctcccaaagcgctgggattataggcatgagccactgcccccgcgcccacttctgcttctaaaaaatgagtttcagggccctctcctggtaccccaagccaaggccaagtgggaactggaagctggaacagcccaactacccacccagcctgcagaggagagaccagaaatagcccttagcttccagggagatggcgagtgacctgatcctgcgcctggtcggcaggcccttgagagcagtggcctcctctgtcttgctctccacccgatcctgacttgtaagccccgtttgcccgcatagtcccacaatgtacgaaatgaatggatggatgaggggctctggggtgcaagggagaaggaagcaggcagaaaagccttcctcatcggggggcttcctcctccactgtcatccgcaagggactaaggtcctgaatgtgagtgcccagcagatccatgcctggccccagcaccctgactcacagccctctgcctgggacagttacccatttctccttcccggtggagctgggtcctgagatggtggcaaattcactggcgttgaacagagactggactaacgagggtgaccagcacttacccggtgccacctaccattgtgctgagcctttgtgcatagttttgtatttaatacacctaccgtgggcgggagggggctgctattgttgtgcccatactaggagaagggagtgaagacttaaggaatggcataaggatcatttgcatagctcttagttatttgagcaacacattcatttaattccacagcaatgtggggaatgagggactcttccctgctttccaggtcagcaacaggaaaaacaaatgatttgctcaaggccacacagccccagtcctcaaacaccaagttctggcctttttccatttccggccactgccactccacctttccccacccctaggcagcaagagtgactcactctctgaactcactccacatcccaattccagcacccatgagtaactctccctttggatagctttgcaccaagaacaaacctaaacaaaccctctgctgggaggtgaactcctccttctgttttgttcctgctgtgtctccagttcctagaatggccagctcctggggctcaataggtttgttcagtgaacgaaacctagaccaaaggatgccaggcagtgcctaacagacctccaaaagactggaggagaaggaagtgaaggagtgggggtgggagtcagttctggtcctaaacctccccggaaagaaaagagatacttcctagcgttcctttagtggccagtcttcatgcctcatatcctatggggtcagaaaattcttcctcaaatctagccttgatcttattctcacattccccacacaccttaggggcaggaaatgaggttggtgtcctccaggctccacatggctgcttccagaagttacgccccacccccacccccaccgcaccccctcatgaacatcctttcagggcatcccattccagcgctctctcctcgtcgctgtcttcctctggcctcctgctcggcccctggctcccgtcttgctctgcacccactcctctcattattctaggcagcctcctcatccgcgcgggggacctgtctgccaccagggcctccttgttccttgtcctcttctgctctgctgaccacttcctccaccccagcctcccactcctggggcacatcctgaccttgtcctttacctgaaactgacctacctccgaggccctgtctccatccccctctctgtccacctgtcccccaaggccatccctcctctggtttctcctctcacttcaaccagtagagagacaagggttcctcatgagagccactcctttgcagaagtcccccattcccttccctctctctccctcccgtcatactctcctgacaaagccttgccccagatgaaccgctccaggccacaccaacagcgcccagcattggtggaggaaacacaaccaccagagcagatgagggcactgtcacttcttgtcgtcaccctccagtgggctcccagtggcaccaacagacctaagatgtttgtgaagttggttctcgcccactctccgctgtggccaccatgcacagtctccagtggcctagaactcttctcccccaaccacgccccctatttcagctgacacactgctcccttcgtgggggatgtagagtcatcagacaagaactttcttaacttcctaaggccaaattcaccacttacatgagaccccgcctcctatttctttcc

SEQ ID NO: 57428 - DNA, 914 bp, Homo sapiens
aactgatttttgtacatagaagagcccggaactagtaatgtaagtgatcttgtatcctgcaactctgctgaactgttttatagctctaattattttttgtagattctaattatttttgtagattccttagggttttctatatataatatcacgtcatttgcaaacagagatagttttactttttcctttccatcacacaagtttttctaaatgcaggatgacactttgtgacattgatatgctaacgaagagcattcatctaattgcaaagggtttgttcaagtagtgtatcttagtgacacaccagaacctatgactcaggaccagcattttacaaccttaatgttagaaataaaataccaggatttcttgaacttagaactctggcacagttgcaacatcaacgctttactatttcccaacattggatttttttttagaaagaaatcaaaaacatattattgagtatattttaaaaccactgagattaaaaggtaaacttcatgttatgtatattttaccacaataaaaaaacagttgaaattcaacatcagaacatgaagtactttccaacgaagccaaaggttggataagaaatctattttccaccatcacccagggttaaaacaatcttccaaattttgaatgtagtgtacttacagatgtagttcctggtggtgtggcaaatcaccttccccaagaatgtccaccacagtagtctgacaccaagctgaatataaacaatctaatgaagatgacaatgtccttctccttgatttaaaacagagacactgttgttacttttttcgtgttttaatacattattttaaaatttgagacaaaatttcttctgagacagggtcttgttctgatgcccaggctggagtgcagtggtgtcatcatagcttactgca

SEQ ID NO: 57429 - DNA, 1235 bp, Homo sapiens
gtgttgggattacaggcgtgagccatcgcgcctggccccacagcatctattttagcagccaccgcaagggctgggtgaccctggtgtagccgggagtgggcttatttgcaggtgaactgggagggtgcccccacctgagtcttaggtcataggagaagtgcgggtcaggcctcagctgcctatccctggagcaaaggcaaagtccaggatagccttccagtatcaccttccaccaggcaggccagccggtcctctgagagataaggctcacactttggactccacacagcgacggggccccctgcccctccagctggcaggcgggctccctgcctgcttaggggtctaggccgaggcagggggaggaccggacggccggccactcgccgcgaccagcaggagagaggggtgcctgccacaggttgtcaccctcgccgcctcccccggcggcgccccgccccttactcagccctcattactgcagcgcctcgcgggggtctggcccggagtggagggcgcgcggtcccagccctcccgctcggccggcgggtgtcgagttcaggtgcgaccgaaaaggggaaaggagggcaccgccacgtgagctgtcctctccggggaaggcggtggctgcgtgagggcgggggctgctcggtccccagggccccgcccctctgcccctctgccccgagcggtgctggcggtagggaggggccagcccggtccccgccctcctcgcccggacccgcgctgcccggctcccgcgggccgctcgatcccagtcccaggctgggcatcggggctggctggcatcgccggggagccgacggcgacggggagccccgcgggcggggagggcggcgcagggcagcgggtgcggtgacacctgtgggcacaggtgagcggcgggagggctacgcggcccgggggcggggcggccgggacccggggcctggaagccggggcgaaggggaaggaaggcctggcctcccgaaggcgggaggaggggagccgggggctgggctgagacaggaccctgggtagggagcagtgcgagggagacagcgccctcagagggaggactattgggaggcggcaggagggacagcgaacgtttcctcctctgctcctgaatcggaggaaggtaagggagggctgaggcaggacctcaggcccacccggtcggggcacaaacacctgcgcagccttcttgagcccaccgccccttaggaggcctc

SEQ ID NO: 57430 - DNA, 3501 bp, Homo sapiens
ggcaggatcttgctctgttgtccaggctggagtgcagtgatgcaatcactgcaccctccaccacccacgctcaagcagtcctcccaccttagcctcctgaatagctgggactacggccgtgaaccaccatgcccagctaatttttttttatttttagtagaggcagggtcttgttacgttgctcagactggtctcaaaatcctgggctcaagtgatcctcccaccttggcttcccaaagtgctaggattacaggcgtgagcccagccctgtattttatccttactgtgaaatcccccacagcagctaacagtgctggacacagggcagatgttgaaaggatgtgtttttgattgggaattggcaggttacttcagtgatggccccttcttccaacaagcagccctaaagattggggcggtgtttctccatctgggtgctgggttcaccgtgtgatcgctttgcgaacattcacagaggtaaacaatgaggatctatgcacatcccaggaatatgttacaccatgaaaagctttctgaaaaagtcagctggcggtgggggcgagtgatgttcccgtgagcaccactcctggggagtggacagaagaaggaagtttatttacatgtttgtatcaaacctcaatctgcctccgccctcacattccctggcccatcccctccacctcaaaatttacaaacacccggggttggcaaggacaaatggggaggagagtaaaagggaaaggttggggatcctgcatgggtagacgggggacaaagttgagacgggggcaggagtgggcaaaggtgtgcaggacataggcaaatagagctggccaaggctagcgacccagcttggatgactgtcaggtcagagctgagggcgtgctggggagtcctggagccccctgcacaccatggcattctggaaggtgtgctttgcagtctcaggccaaccccacagcagctaaatggcttgtcctgttccggcatcagtgccaggaaagcaaagccaggagtgaatatttagctctaacttggactttgatctctgccagcttcatttctggttttccctgggcttcattttttttttctactataagagacactttgtgtaaagataagagggtgtcctcaatgtctgttaaacactggggagcaactgactcaccagatcacagaaaccctagggcagggaaggagggtcaggcagcccacagccacccagcctcaccaactccacatttcggagcaggaggccagtcaccctgagtcagccacggggagacgctgcagctgtaagctgtgcaggcccggaagttcaagcctcagccgcaaacaggggaagccacacacagaaacacaacagcagcccccgcaggtggaggcgtgtgcccctgctcagaggacaacaaccttcccctgcccgcaccagccaacaccgtgccacctctgctgagaacaggactggggcttccagggcaacaggaagggtttggggtggtgatgggaagaacttcccagtcctgaaagtgtggttcctttccccgaagaagccactggagcacctaaggtcactggtactttgaatcccatccagggggcttgaggcagagtcatgatgaagaactgggggacgccagccccagacagccttaaagggagcttttcagggacctctggccagtgggggatgagcctccctggagggagggagggagagaggctttctcaggccacgtgttcccttctctttccagcactctgggggttaagtcagatccgggaaagggaaatcttttcccagcaactccgccccagtgactcaggccagagggagggagacctagggaggggagagggaactagcagcttccccagctcctcaagggtcatgagtcagcagaaaggcagaaggcaccagcctgcatgcaagtgggactccatctaatcccttcttcctatggccaagtccctccttcccatccccactcaacccccatccatcccctccccatgcaaagagccaggccacagacccttgtcccacttggcccacatgttccgggaaatgcctccctctccccattccatcccgaagggaagtctccctcgaccctggcttccgcccatcaggtctgtgccctcccttccctgagggccacttggctcctcctagcccctcagcggcctttagctgaggccccgccccagctcctcctcccagttcaacaagtctccaacagctaaacccattccgtgagctctcactccatcccccaacactccccagtcccagcaggaagcaagccaaggctgccctcccaccctgggttcaccgcattcccacagcctggctggttctgaccagttgtgctgggtttgggggcctccctggggtccccagacaatccttaggaaacaaggccagttctgagtctccacagaccctccccaagcccactggcaatacaggaaagcctccagagccctgaacacccacttccaggaacgagggagcaggcaagaagggatgccggatggaagaaccagccctgcttcctaggcttcccctggcccccagaatgctccaggtcagccctctctgatccctaggagccagggccctcagactccccaccactgggcaccactgctggcaccagctggccccagtaagcccagtcctcagcagttgcgtaaatgaagcaaaacaggagaaacaggaggtgagctctttaggcccagactccagcctggagcagaagggcaggaagctggggtgcctgtggagagacagttgagggggtggcccaacacccctccaactcccccacaatttccgccagaggaggctttaaagtgtgacttcctgtgctggggctgcagagtggggaggcgacgctgagatcggccttgtggtctgaccccgatccagccaccttgcagggacccaattagtcttcctttccccctcattcatgtgtctgttcatttaatgtcaaggtgttgggggaggtcgtggcagcttctcctccaagggcccagttgagatcccatctccctcccgtgaagccaccattgacgatgtctgtttcctccaccccggctccttagacccatagtccctgtgaactcgaagcacgtgaactgaccctatctacttttggctcttatcataatatggttatgttgggtgacagatatgatctccccaaagtgaccacgaaccttataagatgagagatcaaaaaatgtcttggtcagaaagtgtcttatcctcccctggtgtcctctcagctcccagaaccagacctccagactgggagcagataaatatggatcaactgatcgatctaatgatacatctgtcttccactctagtagaagccagtgattcccaaagagggaggtgaggagacagcacccctggtaggaatatatttatctccgggggagagttttcagaccatccccccacctccccacacacaagcacac

SEQ ID NO: 57431 - DNA, 3250 bp, Homo sapiens
ctgagacctgctaagcaaggaaaggcagtggactaaggctcacctccttccccagttcctcctcctcccaactggtgctccaggacaccacatcacaatgcatttgtggatattttcctcgggattgctctgaaatcatttttcactgtaagccatcttggttactaggctgtaagctctttgagagcagcaaaatcctgtttgctttgccacagtctctcctgtatcattcttccctactcccctaccccacttctctctctctctctctctctctctcacacacacacacacacacacacacacacacacactgtgagctctgcattgcccactgaatggtgagaaattcagaaggatgttgcattccctttgttttccctttcctccagctccaggccaggcttctgtcccttaggagacataatcccacctgggctgaagcaccccaggacgcaggcacttccctttacctgttcaggctacctttaccctctgttttcccaacacaggtagccacccagtaattactactagtcacagcaatataaaaactttattgagtgctttctatttgctacaacctattcccctgatggactgtcaaagctgtgggcagggattttgttctctgctgtaatcccagcacctatcacagtgtctagcccagagcgcacacttaataaatcaaatgaacacttaacatgtatcagtctattcaatcttcaaaacaacagtatgaggtcaagactgtgacacccattttggagataaagaaacgaaggcatggaaggttaggttatataagctgctcttgttcatgcaggaggtatgtgagggagccaggggccgcccccaaacagaaaacagaagcaggatgtcagggcagctggctggtggggagaccgtgggggaaggacagtgggaagaagggaagagcgggtgggactaaggaggcaggaggaggcagaagaagaagagtgagaccctgaccagagacgtgctgcctggggacctggggccgggaccagagcggagcagagaggaggggaaggaggattagcgagaaaagatttcaaaaaaagaggctctgagaagtctgaggagagtctggggagattgctggaagaaaggaatggtaggagaggaagagtataaggcactaaagagaggggaggtaggcgcagccttcagaggccgggcagggcagggaaaatctgcctgactagatgggcccaggacatctgaacaggatgattcccggaccaagacgtggaggacgatcaaggatacattgaaacaaggctgaggccagagaaagggacattttccagtgacgaaaacaactttctaccaacttccccaaactgaactgtagaataagaaaccaagggattgttgtttaggtctgtgagaagcagcggggaggggaagctggaggacaggcccagggacactgaccaggtgggggtaggactagctccctgggaaggctcagtcccacagcggctacctgcctagcagcaggcaaaagggtaaagaatgtccccaggtgagaggccggggcttggccagggcactggggacactgtccactgggttgccctgccccatccagtgtcccagcccattctcaaatacctcccaccatgagcatcccaaacccaccacaccagcccatccccactcctcaactcactcccccacttcaccagccgccaaaatcctgccctacagggtgtgctccaccaagttccacaggcagcctcgcctccccacggcccaacaccctccaggccagccagctgaccggagggacagaattcagaaccgtctggactccccgagcactaatcttcctactcccactcccttcttttccccgccaaatctgccccaccctgggcctatctcctgcccacattcccttggccgcccacaaacttccaccgctgtcaggggccagggcttccttttactctctccctttcaaacttctcccattcccctgcctcagcgcagcccctactccaaaaggcggatgaatggggaaccccacactggcagtggctgaggttaggacctgcaggcctgaggctggcgccaggaccaggcccgggcaggagaggctcggccccctcccggagagggcccacgccagccggaaggtgcctcgcccaccagcccactcttccctttgtccctggtctcaccagtggcagcagcaggtcaggcacggtggagaggcccatgccagacagctatggcctctcactcccccatttgggctcagggcagtgtggcagcggcagtgctggggcttcccgggactcggtctgtccaggacgtcccaagtgccttggggtgacagttgagggttgagactcgggcatagagatcacggcctggtcccagtgatcttgaaccccaaaggccagaactggagcctcagtccagagaattctgagaaaattaaagcagagaggaggggagagaaggtgggaggggaagagtgaggcagtgttgcaacagcgggacaggaagagctggaggaggaggccacaggaggcgggaggaggaggcccaacgttctttaactctttgtagtccagtcacaagcacaggagtcccagatctggctgccttgtgcccccaacccaccaatccgaccactcccaaccaaacaccaaggggcaataagccccttgcccacatcactagcctttcccagatggatcacagcagtgaaaagatccagagtctgggagtcaaattctctgggttccaattcagaatgcttagctttttagctaagaatgtgtcttggacacataaatgaacttctcagacacataactgaaactgtctggatctgttttccaatttgcagagtggagataacctgtctcctggggttcctgtaaggatttgttcagatgggagagatatagataagcgtccgacacatgataggtactccatgtcccttagtaatcctcccctttactccagagttcttcactagcctcctagtctccctctttcttgggaatttactgatccaatccaaaactcaaagtaagtcccaaccctcgttttctgccctgactgggtgcctgccattcctcaccccaggtctcatccagtctctgcctggccaggtccccccaccctgccccactgttgatcctggctctgccaccaatcatgcgacatcaggcaactcctctcctaagcctctgttggttcc

SEQ ID NO: 57432 - DNA, 1459 bp, Homo sapiens
aattttgtttaaaaaaaaagatgatgagaagtgagtggatctaggaatatgaaaagctaacacgtttcgtggaggaggtgagaatgagaccatcatccctccagggacagaaaaaaatcatggtcagaggagatggagaaacaggagaggggcagactagggatgacagaatcggctgttagggcttgtagagcaaaggatgaagaaaacagctacagagagcagggaccttcctcccgcatcatggcacacacacacacacacacatgcttaacccaaagggtcactggactccaagtccagatgacgtgggttctagccccagacctgccattcagactctatgtgtcacagggtggcagggtgagtcatagaaagggagctgggttcatggcaggttctctaagaattatgaagctcagcaagtcacttcaactactaagcctgataaggaaaatgagtcaacttgaacccttttatcgctaacagcctgattccaactcctaaccccagggtccaggagtaacccatagacaagtgaatggagataaggagacagctctggggaaaaaagcaggaggcaagagaagcaggagcctgggggagctgactgcagtcatccgtaatacatctggctatgtccggcaggtcctcctgccccagccagaggagagggcactggggaccaggtgggccaaggctgaggctgagggggcagacaagtgccgtctgcacctgagggctctgacagaggagactgcaacaccatttccccttcatcagctcaagtccaggaaagggaagtcagcagtcgtcacaccgtttcaggtcatgaccctgtctaccttcctacccctgtcaccagctccttctcctctttccccgaaagtctcttcctcctttggctcctcagaacagggagactgcaattaagatgaataagactaaggtggcagggacagaatccccaaagatggtgagaaagggtcacttctggattccaggtcttatgctggagtgggggagaaacaaggatcggagagctggagttccactcgcacatccttcagcccctccctggacctcagtctctcctttactaaagctgggaggattccctgtgcccctctctgcaatcatgtaccaataagaccatataaggctttgcatttccaggagaaactggcctgagcctcatcatcctccaccaccaccagacagctgatgggaggcaggcagatgagggttcattgccgccaggtggtaagtgggactcagcaagtggagtgggggatggggaggttagtgatgatggtgactaaagcagagaaggaaaaggaggttcagacagtggagagggcaagtctccccaaacactgtgaggtaggtcccctgaaggggtggcatcatgtcttcccccttccaccctaacatggccatgggcacatagcagacgctc

SEQ ID NO: 57433 - DNA, 1189 bp, Homo sapiens
acccggctaatttttatatttccagtagagatggggtttcgccatgttggccaggctgatctctaactcctgacctcaggtgatccgcccatctcggtctcccaaagtgctgggattacaggcatgagccaccgtgcccggtgagatattcctttatagcaacacaaaatggactaacacacaggactaactggaatagttacatgtggtgacgtgaagtaaggttgaagtacaaaggttcctgtagttgcagaaggaagggaggatttggaggcaaaagaacgcagtagggtggagtggtgggtataacaacccaggcgagcaatgaggctctgagctgacctaagcgcctaagtgccaagataaagatgaaccatggactttctgttgagggggaggcaggcacacagagcaaagggagggcatcgggtgagggcatagggaaagcacaggtgtccatggactttctgttgatggggaggcaggcacacagagcaaagggaggcatcgggtgagggcatagggaaagcacaggtgtccaggtgacagttagaggaacttggtgacaggtgtgggcggactcaggcttaggtgttgctaccatcttacttcccagctggtagtttctgtcctcaaacaaatgcaaagactaaaaacagaacaaaatcgtgtactgggcagagtgtgtgtgaagggtaagaagtgacaccttgccctgtggccattcttcagcaacaggggagggaatgccccctgtagagtggagccaggcagaggcagggagatggctccggaaaataaacgagcaggaggagaaggcaggggaggagggggccagaggttacagaaggggacccccccctcgcctcagcctctcccagccctcagagaacctgcagctgctatgagctgcttgcaaggacattataacaggggtcctcacagaatgaatacccgaggggtagtggggtgggaagaatccttagccagggccggcccattcccaagggcaagtcacttcacctgtttgagtacaagagtaatgaaacccatcatttactgtggtctataaagtgccctcacgtttgtatctcacacacttggtacagctcttgagatgagtgttatcgtcatcatcttcgtcacttgagtaaaagtgccaaaggagcatggattatatagtttttcc

SEQ ID NO: 57434 - DNA, 537 bp, Homo sapiens
gacagccgagatcgcgccattgcactccagcctgagcaacaagagcaaaactccatctcaaaaaaaagaaaaacaaaaaagaccaagatccatgcttccagcctttggtttctcaaagccccagtcttcccaaggcatcctgtgaggccacttccctcagatccagcagtgcagggagcagcaggagttcgtagggcgctctctggggcagggtgtgggcccaaagccagtgcttccccctggcctgctggcactggcatttttttagtcaacaagcatttcctgggccctgcccatgcagggcgtgaggctgacccagggaagcggaccccgcggagagcaaggagccaggcaggactgactcacgcctggttgcaggagacctggttgaagcggcaggcgaagatgaagttgcccagcgtgtcctcctccagggatggcagagtctctggcagcctcgacaggatgttgatgtagtggaagcggtaccactccctcaccgcatccacccctgatgagtatgtctggtagaagcag

SEQ ID NO: 57435 - DNA, 1575 bp, Homo sapiens
gcccccagctaagtttcctttttttactgtctccttattctctatcttgggctgttagcccagttctccatcacgctggagggtcctaactgagtcccactagtgggcactggaattcagaaagttgcattttccttcctgaatcaaggaccagaaacagtaaaacaataataataataataataataaaagttcattttccataataaatttgacttcctacccctgaaatgcttctacataggaccccagggaggaggccccaaaagcttgggcaccaagaggtgttattttaattatctagttattatttgtatttatttacttttttttttgcccgcgagcccacgaggccccgcgtggtgtcactgggctgcgcgggcgggtcaggaaaggagcggagcccatgggtgggcggggccaggggccggcgaggggcggggcgggcccctcggcgctgcgggcctcaccagctggaagccgatcttccagtccttccagtccacctgggggttgttgtcccgcaagctggaggccacgctacgggctcgacgggccccgtgaggcgggggcgggaccctcaggcgctgcaaggggtgcggcagagtcccccgcaggtcgcgacggctgcgggagccggccacgagagtggtgaaggagctgtatttgtacaggtcaaagagcgtctgctctgtgatgcggtccagctcctccagctcctctttaatttccgggtacctgaaggggcgaggggaagagggtcaggccaggggccctggagcgagtgtctggcccctccggggtcagggtcctcatctgtgccccgggaggccggtccatcccggagaagcctgggcggggctggggtcgtcgtggcgcctcctggccgtccggcggtgaagggtaaacaggtgtgtccgccgggaaggcggaggccacggcgagcccagccgggacactgtggactgtttattgaaggagagaggcaggaggcgcctgtcgtctgtggggcgctctccccctcgcccggacctagaagggaacccggaacttgtctgccctttcccaaagaggggaagggtgagggcctcggccttggcgtgaccgcggtacccaggtcatcccgccctgatccccgcaggcgagtgtcggtggcctttcggcttgagtgccgcttggcaccgaaatcaagagttcacaactgaacttttagaatctccaactctaaaaatacaggatgccccacccaccccgcctccctcctccaaagactgttctaatgtgtttcgggtgcggcctaaacaccgtaaattaaacacagctcactgtaaatccctacattccttcttaatacaattcctattaccatctccatcatgaaagtccagagtagcagggcctgagggatgtcatctaccaaaacaaaacaaatatagaactaacaaactgaacaaggttgcagggtacacaacaaatacacaaaaaaaattaattgcatttaggccgggtgtggtggctcacgcctgtaatcccagcattttgggaggccgaggtgggcagatcacggggtcaggg

SEQ ID NO: 57436 - DNA, 608 bp, Homo sapiens
tctcaaaaaaaaaaaaaaaaaaaaaatctctccctccatgaccccgtgatactagaaattcctatagcaggaggcagagcctttgagttgacacctagagctaagagaattgaccactaaacagaaagcacattgaagacatccgatcttgttttgaggagaccagcggctggagggaagggataaagaatgcccacagtgggttcttccagacagtccagcccttctggccttgacctcctcctcaggtcatgctcactgccctcactcccatctgctctggcaggcagccctacattggagggtgagtcaacccttacacaattccatcgggcaggcattattatccccattttacagttgaggaaactgaggcctatcaactaggcaaattccccagggtcactcagccaggaaggactggagccaagatgtgaacccaggcctgttcactccacggcccctgctttttccactgtgtctgcctcccagctctgaagcatctgggatcaggcagcaaaatctcctttccctgcagctggccctctcccctctagcccctcttccgtgtccaggacggagcagcagggtgcaaggaccctgggaga

SEQ ID NO: 57437 - DNA, 1046 bp, Homo sapiens
ggcagccctccaagggcacccacaggtcagcctcaccctcaggccctgcagagaagagagaagaggtctctgcaggtctcctccccgctcactaagtgggagcagcgcactcaggtgggatgcgtctgcctcctcctggtccctcctctttcctgctgattcctcgccaccccctccaaccttgtccagacccgggaggggcccaggtgaagctgggggctaggcggggccctaggacattctgttcttttttacactgttggctgccaggccaggaatgtgtaatcgcccctgctgtggtcacagagttgcaggaatgtgggcaaccagaggcagcgcgagggccacgcaggacactgtggacacagacccggagcccaggaagaggcagggaaagcaggcactgaaggtgcagggaggatgtggccagcgctggaaaggaagagggtgggcatggcacacgcctagacaggccctgggaggaggagaaattcgttgatgggctatattttctccaaaatctctttccaaacttaatgcagcaaaaggataaggagtggagtgccaagtggtgagcaaggagagagaggagggtcagagaatcagacccaaaaagggctggaggagactcgggagagccacccacacaacccaggccctgcacgcggcagggaaggctgccgcttcctcacgggccccacaggaggcagcccagagtgcaggaatgtggtcactggcttgtcctgcctccctccacaagccagcagacaaaggcccagcctgagcattgatacacaccgggggaggagataggcctgcaatacaataagataaggtttctatttgtacactttaaaagattgtctttaaaacggacttctaacaaaagtgcagatctcagatttctcagagataagacataagagccaagggctaggggagcctaggggctcactgcaggagactcaggaagccttcccagagaaggtgtcatctctgctgaatcttgacaagcaaggagtttagcaggcaaagaagagaaaagg

SEQ ID NO: 57438 - DNA, 2740 bp, Homo sapiens
tggactggctctgtgatgtggccatcactcatttattccataaatacctattgggcacatggtatgtgccagactctgctaagcatggggaacacagacttgaagattcagcctgggccatggtggcactcacagcctggtgggaagcaaacaagacagccaggtacagagggcagtcttcacggggactgtgcaacctagggcagaggttgccttccagagcctcagtgaagcctcaaggacaggtgggagttaggaagacggaaacttggggaccagagaaccacgtgtaaaagggggcagctgcaagtaactccacgggtgggtggggtgttgggttgagggagatgggaggatgaaacagggcaggaacgagaccaggccaccctggaatcccggttcccttatgtatcacccttagcctccctctccatgcttaaggtgagggggctggactgcgtgggctctcagctttctccagttctaaggggtttgaaggttcatgggcaaagaagccagagcagagggactgagtgcccaggtccagcctgctggccccaggactcccctccgcatatcctccccctctctttgggagggaggttccctgaggacagggagcagggcaagctgcacagctctcaagggtctcctaggtgacctgtgcccactcctgtgcggattgggctgggttggtagcgtggggggctggctgatttgctagtcccttgtaatttgtctgaaaaactcccacagtagggcaggacaacgggggaggaacccgggcatctgccagccggttctcctcggtctcagagctgcttctgcggccttgcagtccccgcgccctgccctctccatgactgcccgtcctgggcccctcgctttccagatcccgcacccagctgtcccttgcgctctctggaactccctctgctctccctgcgaggcttgtccaagggctgaccccgggcccgccgcccttccctcggctgggccagggctgtccgcagtccgctctcccgatcgggcttccgaagaagggaggaggccggttccggccccgcggccctcacgtgctttcccggccgcccctcccgccccgcatcgaggcagacaagcctgttcctcttccctgggctgcgattgcgacaggccggcctggctcccagcgctccctgtccccgccccgcggccagctcgctccactcccacttcctgagctccgccatgggagccctggaggcccggcctggccgctcccggccctggggtgcacatcggccctgagtcccgtcccaggctctgggctcgggcagccgccgccaccgctgcccaggacgtcgggcctcctgccttcctcccaggcccccacgttgctggccgcctggccgagtggccgccatgctcctgccttgggccacctctgcccccggcctggcctgggggcctctggtgctgggcctcttcgggctcctggcagcatcgcagccccaggcggtgaggaaggggcctggtaggagtgggcgagggtgggcaagagggatctgggcagccgtcgctccattccctctgccctcccaagctgacccctgactaattcttctctcctcttctccatctccctttgaaggtgcctccatatgcgtcggagaaccagacctgcagggaccaggaaaaggaatactatgagccccagcaccgcatctgctgctcccgctgcccgccaggtgagaggcaatggcaggacgaacctgggcctcggaagtgggtcacgggggctccagccccctcgcggcctcagagggaaggtgggcactgtcccccaggaaaactggctgctggagacgagcgtgggaaaccctggacatcacgtggaggagatgggactggccctccccactgggcctcctctttccttacctcactgagagggagccggagggccactggcaggatgatggggggccagagagaccgagggaaaggccagggtcacactacaggcagcggaggtgagggtggagcctcgtctcctgaggctctactgctccactcacgttctaggcacctatgtctcagctaaatgtagccgcatccgggacacagtttgtgccacatgtgccgagaattcctacaacgagcactggaactacctgaccatctgccagctgtgccgcccctgtgacccaggtgagtggggatgtgcctgcgggggggctggatcccctggagcttggcccctccctgagccctcccgtctccccgccagtgatgggcctcgaggagattgccccctgcacaagcaaacggaagacccagtgccgctgccagccgggaatgttctgtgctgcctgggccctcgagtgtacacactgcgagctactttctgactgcccgcctggcactgaagccgagctcaaaggtcagaggtccctgaggggctggatgtgaaaaggaggctgggtgccagggatctcaagtgggagcagggaatatggtactgtgtccacggcgaccccccagatccttggcttaaaattcctcttctcattccatgcagaggctcacagaagggttctggagggacatggaactgggacaggtgcaggggacacaggaggtggttcttctcagtactgggaagcttgggcaaaatggtaggcagtaggccgggtgtggtggcccacgcctgtaatcccagcactttgggaggccgaggtgggcggatcacgaggtc

SEQ ID NO: 57439 - DNA, 2435 bp, Homo sapiens
ctgtgtgtcccctcctattacagcccaaagatccctgtgcagctccgattttattcgcatccttgtgatcttctctggaatgttccttgttttcaccctggccggggccctgttcctccatcaacgaaggaaatatagatcaagtaagagacagaacacaggcctccggtcctgcccctgcaccacaccccactggctcaaccccactgcccacgcctggaatctcactgaaacccaccagctccacttcaccagccttggtcctaccccttctctccccttagctggcgtgctcctgacacccctcccccaagcgcacccgcctctacccatctccttctcccgtctccccctgcccccactgctggccaagactcatcggatctccttctgcagacaaaggagaaagtcctgtggagcctgcagagccttgtcattacagctgccccagggaggaggagggcagcaccatccccatccaggaggattaccgaaaaccggagcctgcctgctccccctgagccagcacctgcgggagctgcactacagccctggcctccacccccaccccgccgaccatccaagggagagtgagacctggcagccacaactgcagtcccatcctcttgtcagggccctttcctgtgtacacgtgacagagtgccttttcgagactggcagggacgaggacaaatatggatgaggtggagagtgggaagcaggagcccagccagctgcgcctgcgctgcaggagggcgggggctctggttgtaaaacacacttcctgctgcgaaagacccacatgctacaagacgggcaaaataaagtgacagatgaccaccctgcagctctccagcttcctctctgaaatcccagtcccaaaatccagtttcctggccgcctcctggctcaggtcaggatctggcagaggaggtttctcagccggttatgttggggcctgcttaagggcgggggtgagaaaggtccccaggctactgtggatcctgtgtctgacttcagatccccttttcccacagttatagctccacttttttgggacaggtggggagcaaaagggtgcagaggtcaggtcttgaaatcaccaggggatttccgggtgaggtgggtggtgagaaaggaaacagcaagcagggctctggcagctgctgcagacggcttcacacagggacgcgggctgccatcttgctctaagtgaaagtgaaagaaaagtcggcagcagagggaacagggaagaaacctaaaggctgcaggctgccaggtgtgcttggagagcccccttcttccgccgggcctcgcaagcagcgtaggactgtggagaagggcggtgggcaaggagggaactcgagagcagcctccatgggcacacaggagggctggtgcctgctgctctgcctggctctatctggagcagcagaaaccagtgagtctgggagtcggggagagctggctgggagaagagctactgaagccccagggtgccaccctccccgagattccagaagagcaaaggggccggggatgaccccatcgccttctaagcccaacaggggaaaggctcagcggctggcaaaggaaggaaccaatagtgtgtgtggagggagggtggggactccacagggaaaatgctaaagaggggctgcctctgtggctgtggtcaggagccactgtcctacagagagggcactggcctgggagctgacacttcagaagaggaaaggactccccaggtgaggaaatcacttggaaggtgaccttgaaggcgggggaggggaaggctacccgaaatgggagaaagcagtgcaggctgtcagtgccccagcaacagtaactgtccagtctcctctctctgcggtggcacttgcttgttttctgagaattcctttgactgaaaagatagtcttttattcaacagttggaaatgcaagcataaactcctctgagcaaggcaaatccaggactttaactctcaccaagaagtatttgcctggactagcaggtgctctccagaaagctggtttggggatgacgggagaatagagggacacagaaacagctaggatcttggatggcaacttttaccctttgatgactccacagcttgagggcgggggcaggaagcaagtgtggagtagctttctggggaaggcggtgctcaccccagcctttgtctgcagagccccacccagcagaggggcagtggcgggcagtggacgtggtcctagactgcttcctggcgaaggacggtgcgcaccgtggagctctcgccagcagtgaggacagggcaagggcctcccttgtgctgaagcaggtgccagtgctggacgatggctccctggaggacttcaccgatttccaagggggcacactggcccaagatgacccacctattatctttgaggcctcaggtaaaagcc

SEQ ID NO: 57440 - DNA, 1989 bp, Homo sapiens
tccctatttctcctccaactatttggtaagactcggtgatagaaaaacatctcctatacgaatggccttggtatgaacagccgcttgggatgacaggccactatcccactaccccttgagtctttctgagctgctcacctggtgccagagaactggcagataagtttctgcagctttgctcactgccatgaggggggctagacatcacactttgggtgaggggtaaacaaatccagagattgtagggcaacataagttaccaactggcagttgcacccatgactgtctttcctgaggcgctgagtagtgatttagccagatgacagaaatacctttcgagtcccctgcccagttgtctccatccaccacccccagcccccgccctctccgagtctccactataccaaaaccagaatgaggcgccactcagacgagaggagagggtgcaatgattgtgggacccctgcgcccctgccccgcccgtggggtgctagctgtggctggtgcgagaatggggtgctggcccccctccctgggggtggcccggtccggaagcggcgcgcggtggtagttccccgcgttgctgcagctgctgcattgcgccattttccgtcccgcagaatcgggagcttggggcgagagttgtcaaggaggtgccgagcccccacaccagagtcaactcacatttttctgacagagagagtgagggtctgttcctctccggaggctgcggcgagacacccggtgagggacgctgcggctgaagtggacggaactgccaagctccgcctcgcgccgactaccccgcggtctagctgcgctggaacttactgcagctgccgcgccggcctccgcctttattagtgctgaccacgcctcccggataacggtgacaaccccgcggcccaatccatgcccaggacggtcgcccagcgctacaggcctagcccgccccgcccctgccaattgccagtcacaactctcctctcatccgactccggaaaggagcggttgctgtgaggatccttcagtgatcaatgcgaccatagtttgcgctccagtctggcggagggacggggcggggtggagatgaggtctgtcccttcggagggcgcttcagcagtttgttaggcatttgtggtgcctcccaaccaatcgctaggcagttactgaagaccgtgcccgcccctgccccaccccgcgccgggactcgcgcattcagctggaggcggcggcttcctggtgcgcgcccagccctggtgccctgctctggccctcgctccgcaccaccgccccgcctctaactaacgctctgagagggtgcaggagcctcgagacacagccacaagctcctggtgccagataccggatgcggggttccgtcccaccaaagcaagcacgaagctttcgttcattcgtttctttcaacatagccttcctaaattgaactccctcccaaacctgctccagtcgaggttaccacatcgactcagttgcccagaccagaaacgtggaaaccatcctagatttcctccccttcacctttacctctcccccagtaatctgccaaatcgagttgatttttccttcttggcattccagtgattatctcccctctgctcactattatccctttcctggactccatcagttggaaaattcaccattattttatgtcccgctaagaaaaaaggttacaaggccgggcgcagtggctcacacctgtaatcccagcactttgggaggccgagtcaggcagattacctgagatcaggagttcgagaccagcctggccaacatggcgaaacctctgtctctactaaaaatacaaaacagccaggcatggtggcgggcgcctgtaatcccagctactcgtgaggctgagataagagaatcgcttgaagccgggagccgacggttgcagtgagccgagatcacgccactgcactccagcctgggcaacagagcaagaccctgtttcaaaaaaaa

SEQ ID NO: 57441 - DNA, 1579 bp, Homo sapiens
tgtgtaatgtgagagaacacattagatccaagacaagagaactcatcctacaccagctaagctttcaacccacggttgcatcttgctgagcagcacctatagacaaggaacattacagtacagaacaatagcacagactctggagccagactgcttggggttaaaattctgatgctgccatttattaactttggaaaaactgtttatttttacttatgaagtaaaaattatacgaggggactcagaacagtgccaaacacaatgtaaacagctacataagtgtttgctcttactattgagcacagtaccactctctacacaggaggaaaagatagtcgttacagcctaattgccattctgaaattgtgtaccacgtcgaaggtcaagtcttacccaggatcccgatgttgtcatacactccgaacatggcccttttctcgttccaacgatcaaccactttggggggcgggagagtgagccttataccgatcaatctaggcacacctggggatggggaagggagggaattaatctgagccgcctattatactacgaagcagttatcggggtgcctacatcagccacttaccaagagagaagcttctgcacgccagaggcacccagtcccacaggcgcctacctgccccggataagaggttccctgccatttctctagtctccccccttcaacagcacaccaaataagcccaagaagatgacaggaaccgtccccgccaacttcacacgagtactaaggcgaagacagccatcttgggccttacccaggcagctgtgggcgcaccgcccacctacgccccatccgcaacagccacgagccccgccccccgggttccggcaggaggggcctctaccacccttcccgcctcagtgcttccggtccgcctgccggaagttttggagcgccggacaagctgaggtccgcgactcgtcgctaagattccccaaaactgagatttcaagaaaattcaccctttccgctttctttggcgtccttcaaccgtgaaggaaatgaaggttgagaacctggaacccgcttccaatgaccaagccctttctctgtgcctcacaacagtcttccgctgtagctgtttttattacccctattttactactggggaggagatttgaggtcctgaaagtgaagtgacttgctggacgtcacttagcagaggagatggcgaaacctggattagaggcgatgccttctaactcccagcgtggacttgcctcctttcctgggggtgactgaatgcccagccagggacgcgacgtctctggccagcagaaatacggcctcctccccgccgactgggcaaagggggaccttgcggccaaggagggattcgcaggcgggccgggggtgggagcgggggccggagccggagccttggcccgcccccgggcggcgctgtgattggccggccgctccggcgggcgtcgcgattggccgtcctgcagccgttgagatttgaactcggtatttgtggctttgcccgcgcgttgccagactcagaggcggccctttgcctctgcctgccggggattggccggattctcc

SEQ ID NO: 57442 - DNA, 4602 bp, Homo sapiens
aatcacaccattgcactccagcttgggcaacaatagcgaacctccatctcaaattaaaaaaaaaatgcctacacgctctttaaaatgcaaggctttctcttaaattagcctaactgaactgcgttgagctgcttcaactttggaatatatgtttgccaatctccttgttttctaatgaataaatgtttttatatacttttagacattttttcctaagcttgtctttgtttcatctttcacattagcccagtttcatgcagcagagagagggttatcagtgcagagagagatgagtgagcccagagtcctagggcctgtcccgggatggcagatgagcttcctgccccgtcactgccacctttcccctctcaacctctggaccctgcacagtgaccagacagcctctctggggagaattatgcagtgcctaggctccagatcagtgcttctgaaccgggggcaattttgtctgccagaggacatctgacaacacctggggcctgttttgttgtcatagcctataggggaagaatgctaccagcatttgtgggaagaggccagggatgtggctcaacatcctgcagtgcacaggatggcccctcaacaaagaatcacacggcccacaatgtcaatagcgtcacagttgagaaaacctgctctagaccaagggttgctttctgccgtgtgcctcaccccacccccactcgtgttccctaatcccatctccaaaggttggcagcagaccggcccaggctcgtggaagttcagatcatgatcccctccagctctgcaggagacaagacctgtctcccagcattcctcattgttcccgggtctgcagagggcgtgagctatgctgcaggcgggctgccccctgaagcctgcgcacccctctccagctcctcaagtcttctctgctgagtcaccttcgaaccggaggctgtgagctggctgtcgtgaccacactggtgcctctgctgtcatgacaacagcacactacgtcagtagtgctccctgggcactgagctccctctttgcggggagaagacagtaatgaaaaatgacaagcatgaggcagaggggaagatcacgcttgggtggtgcaggagcatggaggtgctcttaatgctctcaatgagaaagggttaacggtcctggttgcaggaatagctgagtcagaggtggggcttcctccactcccccaccccacccctttcaccattagggaccttcttgccttgctcttgctactctgctctgggtggtcattgtgaaaagcccgcaccaaccatgccagtggcagccagacgaggacacagcctggctctgggtcccagcaggaaaggcaatcccagaaaggcagggtcagggactggagtcctgtgggtgctttttaagcaaagattatcaccaggcaggctaaacttagcaaccggcttttagctagaagggcagggggctggtgtcaggttatgctgggccagcaaagaggcccgggatccccctcccatgcacctgctgatgggccaaggccaccccaccccacccccttccttacaagtgttcagcaccctcccatcccacactcacaaacctggccctctgccctcctaccagaagaatggatcccctgtgggagggggcaggggacctgttcccaccgtgtgcccaagacctcttttcccactttttccctcttcttgactcaccctgccctcaatatcccccggcgcagccagtgaaagggagtccctggctcctggctcgcctgcacgtcccagggcggggagggacttccgccctcacgtcccgctcttcgccccaggctggatggaatgaaaggcacactgtctctctccctaggcagcacagcccacaggtttccaggagtgcctttgtgggaggcctctgggcccccaccagccatcctgtcctccgcctggggccccagcccggagagagccgctggtgcacacagggccgggattgtctgccctaattatcaggtccaggctacagggctgcaggacatcgtgaccttccgtgcagaaacctccccctccccctcaagccgcctcccgagcctccttcctctccaggcccccagtgcccagtgcccagtgcccagcccaggcctcggtcccagagatgccaggagccaggagatggggagggggaagtgggggctgggaaggaaccacgggcccccgcccgaggcccatgggcccctcctaggcctttgcctgagcagtccggtgtcactaccgcagagcctcgaggagaagttccccaactttcccgcctctcagcctttgaaagaaagaaaggggagggggcaggccgcgtgcagccgcgagcggtgctgggctccggctccaattccccatctcagtcgttcccaaagtcctcctgtttcatccaagcgtgtaagggtccccgtccttgactccctagtgtcctgctgcccacagtccagtcctgggaaccagcaccgatcacctcccatcgggccaatctcagtcccttcccccctacgtcggggcccacacgctcggtgcgtgcccagttgaaccaggcggctgcggaaaaaaaaaagcggggagaaagtagggcccggctactagcggttttacgggcgcacgtagctcaggcctcaagaccttgggctgggactggctgagcctggcgggaggcggggtccgagtcaccgcctgccgccgcgcccccggtttctataaattgagcccgcagcctcccgcttcgctctctgctcctcctgttcgacagtcagccgcatcttcttttgcgtcgccaggtgaagacgggcggagagaaacccgggaggctagggacggcctgaaggcggcaggggcgggcgcaggccggatgtgttcgcgccgctgcggggtgggcccgggcggcctccgcattgcaggggcgggcggaggacgtgatgcggcgcgggctgggcatggaggcctggtgggggaggggaggggaggcgtgtgtgtcggccggggccactaggcgctcactgttctctccctccgcgcagccgagccacatcgctcagacaccatggggaaggtgaaggtcggagtcaacgggtgagttcgcgggtggctggggggccctgggctgcgaccgcccccgaaccgcgtctacgagccttgcgggctccgggtctttgcagtcgtatgggggcagggtagctgttccccgcaaggagagctcaaggtcagcgctcggacctggcggagccccgcacccaggctgtggcgccctgtgcagctccgcccttgcggcgccatctgcccggagcctccttcccctagtccccagaaacaggaggtccctactcccgcccgagatcccgacccggacccctaggtgggggacgctttctttcctttcgcgctctgcggggtcacgtgtcgcagaggagcccctcccccacggcctccggcaccgcaggccccgggatgctagtgcgcagcgggtgcatccctgtccggatgctgcgcctgcggtagagcggccgccatgttgcaaccgggaaggaaatgaatgggcagccgttaggaaagcctgccggtgactaaccctgcgctcctgcctcgatgggtggagtcgcgtgtggcggggaagtcaggtggagcgaggctagctggcccgatttctcctccgggtgatgcttttcctagattattctctggtaaatcaaagaagtgggtttatggaggtcctcttgtgtcccctccccgcagaggtgtggtggctgtggcatggtgccaagccgggagaagctgagtcatgggtagttggaaaaggacatttccaccgcaaaatggcccctctggtggtggccccttcctgcagcgccggctcacctcacggccccgcccttcccctgccagcctagcgttgacccgaccccaaaggccaggctgtaaatgtcaccgggaggattgggtgtctgggcgcctcggggaacctgcccttctccccattccgtcttccggaaaccagatctcccaccgcaccctggtctgaggttaaatatagctgctgacctttctgtagctgggggcctgggctggggctctctcccatcccttctccccacacacatgcacttacctgtgctcccactcctgatttctggaaaagagctaggaaggacaggcaacttggcaaatcaaagccctgggactagggggttaaaatacagcttcccctcttcccacccgccccagtctctgtcccttttgtaggagggacttagagaaggggtgggcttgccctgtccagttaatttctgacctttactcctgccctttgagtttgatgatgctgagtgtacaagcgttttctccctaaagggtgcagctgagctaggcagcagcaagcattcctggggtggcatagtggggtggtgaataccatgtacaaagcttgtgcccagactgtgggtggcagtgccccacatggccgcttctcctggaagggcttcgtatgactgggggtgttgggcagccctggagccttcagttgcagccatgccttaagccaggccagcctggcagggaagctcaagggaga

SEQ ID NO: 57443 - DNA, 1525 bp, Homo sapiens
ccagaccaaggcagaaggcagcgaatacaccattgtttcctctgcttttcctggaaatctttgcctatggaggaatgcaaaggtactgctgcaggctgtgttcttttaagactgataagagtggtgaggaaagtcagtgtgggcgggatggagcagatccacaggctcccagggccacacaggttcctatggggcccggctcacccctcatcccctgtactgcgctggtcctgggctgtcccctcactgcactgtgagctcccgtaagggttagcgacaggttttcctcatcctggcagacccagacctcgaagggaattaactctctctgtgacccgtggcatacaagcctggctaactgctgaaaggggcccaatcctcttaccattctctccttatcactttattttctcacctaaaagccattttcagacactaaaaggaagactcccatattggaggtgccattgattctgagacctgtcctgatttcagaaatgtcacacgtggaaaacacggggctcagaatcaaagaaatccggtctccctccccgggcccattctgcagcccacactctgaggcaggcggagaggcagggcccaggcagcacaaactcagtgccagggacagtcgactgcctctctttgttttgggtacaaagggcaggggccgcaaggggaagcaaaatgaaacttcctggagatgacgttcgtgactgcctgagtgaagagaacggggaggataccagctgccataatgtggattggacagagagggtgggaacttagagaaagaaggaaacaggttacagggccagacagcagagatggtcaggacagtgacatttggggtgagatggcggctggctgggtgagaagccctagtggggacagcttccctggcaggcttggatccacagctggggccccacagtagtgggaggagcaggacacggtgactgttcaacccagggggaaaatacagtgccaccagcccttgttcagatcagctgcctacaccccaatttctccaccttggaagaaccggagtgcagggagctgggttctggaaccatcactcagggagactgggaagaaggaaatgaaccaaatatattctactgaaatacaaggctagtactgccaccagtagtctctgcatatgtctatgtccccacttaattcacaaatttacagcaggaacaaggtcaggaggtgaacgtgcatgtcaggagatgtccttgacaagccaccttgaaaactgcaggctcgctgtgtgaacagacttgggggtgggacgggaggagacagagagaggtgaggagcggtggggaagaactgcctcccgcccaccactctgggccttggctttaccttgctccatcttagtgaccctgagagatcaaaggtcacaaagataaaggcaccttgggtactcctgaggtcagcaagtcctcctaacggttcccctaatgcagaagtccccaaaccccaggccacggaccagtacctgtctgtggcctgt

SEQ ID NO: 57444 - DNA, 1569 bp, Homo sapiens
atactactactcggcatgaagcagccagatccgtgcttttccatttccaccccttccaaaaggcaaatcagtgactgacccctccccttcactacttcctcttgctacaatgttacccatttttcaaaacccagcttaacaaaaacttttacagttctgcatgggctcccccttcctctgaactcacaattgttttaaatcacacttttcccttgcatgaataatagttgtgtccgtgtcttcacatctctacgacctaaacagttccctacaatctaaacggctgtttcattcatacctcctagtaactcatacagagaagattccacttaaatataaaatgaacagaaactaaaaaagagaagaggttataatacagaatactgcaaaagctgagggatcaggaggccacaactaatccttacctgcaggcaagaatctgacgagttctgtctcggcacccttctgcttccgggcctttcggcctggcccccgcttctccttcgtagggtccaacttgcgccccatggtactgtggcaggcagaaatgggagaaggtggcgtcgcgcgtgtcggagggaacggcagaacgcacgcttggcgtattatagtgggaaagggcacagcctcaactcagcacccgcaactcactcagcactcccgactcagcacccgcgactcaagcacccccgctatccccctggaggcccgaccgaacgccctcccacctgaaacccaggtagcgcacccttctccccacgtcccagaccaggtcagtgctgccactcttcgtcccccaatttcctctagacccaccagaatgcgggttaatgtccgagagtgcccttcgggcggccctccacgtgcaatccggacctagctttcggccggcactcgccacagaatcgttccacgcaggcgcacgggtagcgctagcctcgcggccccgcctcttcctgttgcgcctagtcggccgccgcacccggaacttacgctcgccctgggaacgccagcggagccggcggcggcgagtagggggcaattcgaaggagacgcgcagcttacacccgcggcgggtggagggagcaatgtgacgaaaccattgagcttgaccgaccttccctcatggagttggcttttagcctcacggccggtttctgttgggtgaaagccgcaccttctcctcgaaccagggcccgacattggagccctctccctcgcatccactgccctagtccagcgtcaagatcacggaattccaggctgggcgcagtggctcacgcctgtaatcccagcactttgggaggctgaggtgggtggatcacttgaggtcaggagttcgagaccagcctggccaatatggtgaaaccctgcttctactaaaaatacaaaattagccgggcgtggtggcgggcgcctataatcccagctactcgagaggctgaggcagaattgcttgagcccgggaggcggaggttgcagtaagccgagatcgtgccacttaagcctcaccaagagcgaaactccacctcaaaaaaaaaaaacaaaaaaaccagccgggctcggtgg

SEQ ID NO: 57445 - DNA, 436 bp, Homo sapiens
aagtggagacaaagacaacccatggaggcaaaggggacatccttccatgcacatggagccccccaaacttctcaggcaaataatatgctgaaatggcaaaccgcaaacttactgagatatagagaagatttaggaaagggacaggaatggggtgtggcaagtggaaaaagtgggtcatgctacagctcaggacagagttcacagctcctgcgcagctcccggtcaacatgaaaggcagccccagcccaagtggccaatgggaggccaagacgtggaacccagaatgtttaggcagcactactgtttctcatgcccctctcagaaggacagggtccccttaccagcaccacaactccgccctcaccttgggcaagggcatggaaatctgccccctactctacacaaggatgaaaccaagtttctcatcccaacagcc

SEQ ID NO: 57446 - DNA, 1949 bp, Homo sapiens
acattccagcaatctgcctggctgctttaagcactccagatcctgctgaggagcgcgattcaaacttcacacagttcagacagcacagaaaaccggtaaccgatcagaagctaaaaataatcagatagagtgtaaccagcactccctctttcctttccacagcagcaaccacaggatcctactagcacagatgcccggctggtctttcaaacagaatcctcaacgcccccctccaccaccaccaccacaagcctccaggggtcccagctacctgcattcctccgaggacccacataccaggtaatgcctgccagcccagagagctccctcaactgggaactgcagagcattcctcaagacagagtgcagcaagctggcatctccgtgcccaggaggcacatggcttccacccccctcacaccagagctccgcagaagggaaccactcccttcggataccctccacctccggctctgcacagagacagcggagcaacacagccctgcctcaccagaggagtcactcgggagagccccagatgtctccttcccgccatgggcccttggggaagatgttacctgggtggggtgggggcaggctgttgttcaaaagtgcatccatatcctcctcctcactgcccgccgagcagggggacggggagcccaggcccgacgccatccccttccgctcccggccagggaattggcccagctgctcctgccggcggcctgaggacctctacactggcccgagtcactgtgcgggggaggggggagaaacacagaacagtcagtgacgcgcactgtccccctcccccacacccacccgctctttccgccccccaccccagccaccctagcagggcacccgaaccgctcaggctgaacttagttccacactcctcgggggcagcccggaagccggctccccggcaggcgcccccacggagcgagggagcgacgcctccgagggcaggctggtgcaagcgcggggaggggagacgcggggctggaccgagcggggtgtgacgggggagggggtccgagtggcagcggcgcgggggggccaggggaggccgcaggcggcgaggcgctcggggacacaaggtcacttgggggtgggggggcgcctccctgcgcccggggaggggccagtccccagacagggcagctctccaaaggctgtcctctgggacaactcaggttctcctcaagagctgcggggacgagggggcgtggaggctcgggcgctgcggggggccggaggcagggacgcggggggcgaaagcgtcccaccgggaagggggccgggccacgtgtcccggggggcaagtgatcaaagggcgagggggtgggcgccgggcattgtgggagaccaagccggaggcggggggtcgcggggagcaagactccggcagggttagggcgggggctggggaggaggccgggcgccctgcagggccaggaaaggaagggtcggctcctctgggcaaggggcggtccgcgggtccggagacgcctgaggaaggggcgggtgacgggatgaccctcggggctggtagggccgtgaggggcgtctctttgggaaccccgcgctctcctcaccccggagccgccgcaggtcgcgctgggtccggctcggtgtcactcccgctccggctcctcctcgccgcggccgaaggggggaaaatggctccggctccagcgtcgcctcttaaagggcctgaaacaccggccgggaaatcccaccgcacaggccccgcccccccacggacagcccataataacctcaaccaactccaaccccccccttccactaccgccaccctcctccccaggtctcccgggcaacccccgccccctcgtcgctcaggcaaccactggccacgcccccttcgcagcgggcgcgcgcgcgtcacctgggcaaccgcccacctcctggccatccca

SEQ ID NO: 57447 - DNA, 1712 bp, Homo sapiens
ttgaggtgcccaaagtctgtgtgtgtagggagatgggtttcaggtgttcctcttggggagtctgagagaggacggtgaccttagaaaggatggtaggcgagtaagggttgaggaggtgggggggctggagaagagctcctcaggccctccccattctgcaccaccatcccataataatccccccagccccactccccctcccacacacgacatcccataatatcttctggagaagcagtccccgcagtaggtacaaagagctatcccataataagctcccccacccccactcaccaccccccccaacttggccccccctcagtcacatgcagccggtgccatcccccgctgctcccccctctggccaccgaaggccttgccagcccataatactcttgcctctggtcgcaggaggcctccagcccataatactcccttccaccaccacccccccttcccgccccgcaccccttcctcccgcctccagttggagccgggcctcaccaacccataatattccccagtctcctaaggctgttccagcccataatactctccctgtctcctaaggcctctccatcccataatactgccagacgcctgacctgtgggccaaaccccagccagttccacacatcgaggctgtgtcagcgccgcaggcctccctccctgtccctcctccctccctggtcggcgctttccctcccaggctttctcccgccctcctgccctgggcccctctcccagccccaccccgtgcctgcctgggccctcgcttcccctccagcctcctcccttgccctttctccattgcttggttctccagccagcttccccctgtcttgcactttcctacctcctccttggtctgtgggatggacatgggcctagtggggagagagtgcccccagagggcaacaggccagtcgctgcccctaaagactgcctgcttgacctagcaccgtggaaacctgcccagcctgccttgctcaccacctcccgtggtcctacgtctgattgctggcagagctctgtctgggtgaggaaagagcccttcaggtcttcgggaaacactccccttgggcatcactggcagagttgatcaatggcctcgcctccccatgctcttgttggaaagaaggagctcccacttatggggcatctagagtacctttcaaaggtgggctccttgaccctcacaataacccaataagtggatattatgagccccatttcacagagaaatgggagaaaacagaggctcagagaggtcaagaaatttgttgaagccacattgccaagaagtgagagagttgaaattaatgcccagatttgtttgattccaaagttctggagcctttgggattccccaaaccctgagtgagaaagttcaccttccaggactttccgtgctcctctggcaaggacaacatggtgagaattaccccaacttgtccagggccttcctgtgtgagattaaccttccgttccccgtttcttccatgggactccaggtggcagcctcgagggaattccatcttcaggatggttgaggaccaagaaggaagaatctctgccctcctttgatatcccttacctctgccctggctctcctaaatttgttttaagattaatgattgtggccgggtgtggtagctcacacctgtaatcccagcactctgggaggcagagtcaggcacatcacatgaggc

SEQ ID NO: 57448 - DNA, 1394 bp, Homo sapiens
caggacctcaataaatatttgttgaataaatgactccgggccctaaaacaaatgtaagcgcacagagcaataggctttctgcaggggtggtttacataaatcgcataaacaccagattttcatttgatgggaattagatctttactccatgaagagaagcgttctagttcatcatctgacagtggtcactcatcaccaccactctcaaccccatgagaagccacttttgaggaagaatggagtggaggagaggtctttaccgcttctccaaatggcagtgtgtgataacgattctgaacgactatggggaaaaaaatctaccgaggctggagaccctggagaatgggggcagcaactatcttcctggccatgcacactagcccttcaagacacgtctctaacccccacaccgcacccctccctcgtctacacccatcagcggggcctcgatcctgctgccccgccccctctttctccgcaccctccaatatttcctgccacagaaccgcttcataattgtgaccttctcgtcactggaacttaagggctacagatcctctcatccctgatccccgcaccactctgcagccccgacccccacctccagcctgctcttactgtccagataatgttccaaatacatccccgcagccatctcgaagcaaaacaaagcaacttccgatccgccccggaagtgactgtaacgcgacaggggccgaagccattttgcggctaaagcctttccgcccttaaaaggagaacttccgcccttaaaaggagaacttccgcccttaaaggagaacttccgcccttactatattaccgccggtacacatccgcccgacactgaaacttttccttttgcatggtagccacgaccgcccacagtgaggcggctgtagcccgcttccgcccttacagacaccccaggacgcgaccgagacaggtatgacgtcactggaggtcgccattttgcattctctagcaaacttttttccctccaaaacgggaatgtatggtaatccgtgcaggggtaactgttcactttaggctcatattgcgtaaacataccttctcagcaactggaagatccaactttttttccctcttttgcagaatgacttttttcaagccagttagtttcttaaggaagttggggaagagtatcaggccttgagacatttaaaccgtctgaatttctattcactcacacaaacaccatctcccccagcattatttttttaacttgagaaagatgatcacctttctacttataaatacaaagaatgactcataataaagctataattctgcacatcttttgtcagagctcctgtacgttacactagaatacactttcacatataaaatattacttcctgccttgccctctt

SEQ ID NO: 57449 - DNA, 2385 bp, Homo sapiens
caaaaccagaaaagccattaacccaaaaatcatcttaccctctctctctcttcctcctgccgtcttattccttctcctttccagggctcctgaactttctgtaaacaaattgtctaggttacaggggccaggcagggtgcagccaccagagaactgtggagaacctcaggaattatttgtcagcagtcagtctggaaggcaggcagaccccccagccagcaatccaaagacgggtggatataataacagcagtctagtgctaccctctacgtggatacaagagaaataaatccaattcccagaaactaagacgaattctatcaccagcgtttgggtttcactcctaggctcagagactggtccttgttcgttcccaggccacaggtaaccaggggtcagagaacattagagatggaggaggaggagggtctgtgcccctgaggagtggcttcagaaggcaaagctgagggctgggggatgcacaagaccttgtggcaggcacagtgccagttcaggcccagccacttcctctagccttccccccacttcttcgaggacttcgccccctgcctacccgaggccttgtgccaagaagtacctccctcagcctgcaccgtggtctatctactggagaccccagctgtcccctcaaaaccttcgctcccctgagacagttcctgggagccttctcctgatgtcgtcccctacccctttctcaaagacccttccttgggacgtccctccttcccctccagggagctgaactctgccacccaccagacaggcacccgccccctaaacccccccattccttcccatcgcccgctcctccacaaccacttccggttccgggacggacacacacacagtcacatcgtggacccccccttccccgcctgcccaaggaaaaggggaggggggaggagcaagcagcttggcgcgcgccggctgtagcggcgcgagactcaccgggcggcgacggctgcggcggcgccagagcctgagccagggcgcgggaggggcggcgtttgctgggaaaggagggagccgaggagggtgggaggaccaggaaggggcgagggaggggaaaaagcgcaaggcgcagcgcgcgggcacgcacttctggagcgagacagacccacacactcacacgcacggaacgcgcgcgagacacccgcagggcgggggcgcgaggtagtgggtggccccccctccttgctgccctccccttgcactcacccggaagtggtgctgcagctcgtgctcccgcgaaccccagttcctccacgcccccctccctccccccaacaggctcagagaagagctctgcggagagaaggcgggagcgccggaaacgaaaaggggggagggagggaaatagcaatgtagggggggcgctaatggagaaagaggggcgtgcagaagccgagtcacttccgggagtggctggaacacttccggcgccgctagcgctgcgagatattcagggcagaagttacgataactcggggcggaaatagcttctgcccagcgactgggaagaggggatgtgacgctatagcggaagtgaaggcgggttccgctaggggcaaaagctgaaaccggaggactccggccctgagcttccggaagggacatctggggaaggtgggggggtggaaacgcgacaggttcatgaattatccatcaaggtaggagaggaggtgtgggttcttcagatgctgggaccccgtttctcttccctctggatgttgaataagctgatgtaggaaattaccattattttttctgatacccccaagaatgtctcaatgctttgaatatgcgggaaaggactaggacgtatccttgtttttcggaggtccctacttaggtccagttagaaactctcccagccatcaaaatctgtctctctgacacatcccttactttactttggtcttttcttgttgcccatacccacatctctatccccttaccctgttttacttaaatatagcacttattactgcctgatttattgtttgctgtccacctctcccaactaaaatattggctacaggacagcgaggactgaattgttcgttgctgtatcctcatatcctggcagttaagtggtctgtaaactcttgttgtataaatgaactatagttcattatgaacacctaaatatgaacccttttaggaagccttgcctgattgctccaacctgtaatggtccctctgaattcccatagtatttaatacgtaccttttattgatattttaactatttcatacatgtgattccccagcaagattgtcagttcctcatggaaggaaatacgttgctttgctgagcatatagtaaatgctgaatatgttgtttgaacaagtgaatgctgt

SEQ ID NO: 57450 - DNA, 1843 bp, Homo sapiens
acactatagaaatgttagttgtttttgtttttattaaagtatcatattgaagtagaaagatggttttgagtttgaaaagctccagataaatccttggatttttatgagcctcaatttccttttctgtaaaatgagaaccacatagggttttttcctccccaagaaattaagagtccatgtactgaaagcatcattctacaagtattaatacatatgtagtaatcatggtagagggtgtcctgaagtcacaggggaatatttgtgaggattcaacggaataaaattttaaaagatgtctgaccaatagtaagcactcaatacatgttagctttattctctcttttatttttctcgcttcttttctcctgctcttcaaaaaagtgagtggttgaaccacctaggtgatctctgctgctaaacttctattattgatttttgtttgcttcctctctgccccttgtttcctcatcccgtttttttccctcttcttcactccttccgttacagcttttctcttgcctcaggtacccagtgcagtcctgatctccagctctccagcggcttagaacagacacagaatgggccgggaccagggacccaccagagacgtctgtagttaatagctggcgctcttccactaataaagttttattgaaataaagcatttaaaaaggcgcccgtcattcttcccccagcgaccaatcgaagagtagaatgcctgcgtccctcactggagcttcagcggtcggaacgcgggggtggggcatgtcctgccgaaatttgcgtccttagagcggaagtacggccggaagcccgccatagagtttagtggccagagcgactcttcagggaggtggcaggaaaggcttggaacagctgccggaggtgacggagcggcggccccgcccggtgcgctggaggtcgaagcttccaggtagcggcccgcagagcctgacccagggtacgacgaagcagtcggcgggagcccacggtcgctgggcggtgtctttaagggagggggcggagccacgtgtaagcttcaatgggggtgaggtcacgtggttgtgggcgcgtgcggggcagcaatggagagctgagggagcgtcgtcagggtggacaccatgcgacacccatttctcctttgcatcctgtgtcttggggttcaatggggtgcacgtgatggggcttggggttaggcccaggggagggggtgggtgtggcagccttgcgaagtggctgactttaggattcctagatcagaattttagaccgctccatgtctgattcctcaccgcagaaccgacttagtgcctttacaatccagtccctcagccttgtgcttcccatccgaccagccatcggggacctctagcttcacatcctctttccttgcagctctggacatcctgagcccaagtcccccacactcagtgcagtgatgagtgcggaagtgaaggtgacagggcagaaccaggagcaatttctgctcctagccaagtcggccaagggggcagcgctggccacactcatccatcaggtgctggaggcccctggtgtctacgtgtttggagaactgctggacatgcccaatgttagagaggtgggttgctggcttgaatagccctcagagaagcgtgggcaaaggtttgaatttgagaatgggtgggcagggctcattttgtgatccaataaccattcagttgaacaagaaaacagtgataattaaatgccaacttgcagaagtaaccagtgaacaagcaaaccagctctcctttggagataagggatctgtaaagcccactatttttcattttaagcaaaagagcatcctattcagaatagg

SEQ ID NO: 57451 - DNA, 2408 bp, Homo sapiens
gggagggaatactcacatcaggaacatgggatcctcaggctccacgtccctcatgaagcggaacatcctgatctcagctccagggggctccacactggaaagatatggaagctcagatacttggaggtggccagggttttgcacacccactcagtgtggggactctcagagcactgtcctttccaaatcctgtaactgaccccctaaactccagggagaccctactccaggtgttccacacaaccctctagggagggaagggctcttcaaacctctttctcaattagggccatggaaaatttttccaaccctctcggtttttccctcccccactcagagccatcctcttcccaaagctctggccggtagcatactctcccctcctcccgccgacgacaccgttctagatgagaatgccaagtgcaggtcctccgccccattaatgaccccagtcaccccgccccctccttacactcaggcctcccccaggcgggcctcactaagccccccgcgcctgtctgcgactcctctagctcccgcctccccgccaggcgagcaggagaggtaggcctgagcctctcctctccccaccccgcatcccgggctcccagaccctgcagccccgtgggcccgctcccgtccggggctgccagctctgcccgagcctcaccagtgcccgattcgggctcagcggcccatccggccggtttcgcttcccggtacgctgcagggtcagggtcgcggcccggaacgtggggattggtccgggcttgagctcctcggccttccacgccgcctcctcccacagctgccacctccgtacggccccctcggccaacggagcccgaacctcggccaggcccgggcggaagtgacgtcacgatagacccgcccacccggggccgggccgtgggagccccgccccctggcgcgggtggtgagatggctggggccgagtcccaggggcgccggggccatgggccaagctcaggggagcagagcctgaggccgagaggggtcccctgggcacgaagaaggggagctcattagtaacctcgatttgggttctgtggactggaagaggctcccataaggcaggggaggagaaggagaagaggaatccattcttcgggagggaccgggttggaggttgaacctgggggcgcagtgcagcacgttctctctccctcctcaaggggaaactggaggacgaggggcagatgccccttggggagaggcgggcgctctgtgggcgacgaggcggggcggatccctggggggagctttaagccgactctactggagaagcagtctaccctagagggaggatgggcagttttcctgcgggggaggcgcttgggcctgtccccgcttgaggaggagcgttcctggcagggcggagtccccggagtgacgcagaggaggtgaaactctccagcccagatctagttcgggcttcagaaagtcggatggggcagaggatccaggttggggggttggccgccagatggcgctcctcggccaggctggaaccggaggcccttgagaactcgcgttggagagggacctggaccctcccccgttacccatctgtgaagggttggactggggaaaggctacagttctgaatctattagtttaatgccactctccccttccttttactctaattcttgtgtcctcaagagctcccagtcctgcactgacctttcttggttgctttcttaggtcaaaggtctaaagtttgggggaacaaaggagtggagagctcagttaacctggatcacccaggggaggagctaaaacggggcccagaagacctgcctccaaggccagagactgatactttgacatactaaatgtcttgcataaaatctggctctgctggagagaagggccttcccctttggggtcagggcatttggactgtctaggatggactttaaccagactcatccaaactccagctttccctggttctttactctggcttttagccatattagtgctgtgtggagtctgacccaatgagaaagacttgttcccagtaattccctgggggagaaagagggggtccctggtgactcaggaaaaggtgctaggaacagggcttctcacgtttctttggacttgatcattattaaagaggaaaaaacaataatagagacagggagcagagatagataattaagatataagctgacagactggcaagtcaaaggaaaacagacagaatacaagtaaatttgtttttcattgctatttctgggggaagagacttagtaaaatcttctgtcttccagatctctgcacttcccaccatgcaacttccccttatcctcttgccccaaatgaaagcagtttgacatgtgatcaagagttgtcccagtaaaggttctgtggctgaa

SEQ ID NO: 57452 - DNA, 3672 bp, Homo sapiens
gaataatgataatgacagacaaatatgggagtgcacgcacaccaaaggtctttttccaaaccccagccttccactctgtccaccttcctgacctttaatacacaacccagcccctgttcccttctgaaatcccaagcttttcaaaatgactcaaagataccgagattgagggcgaggagctgaggatgtgtggaatagggtggggctggaactccagacctggacctgtattatatttgcaaaggaggcaaatataacccagaaaggctagggaagatggcagcagaggaatgagaaaagctgaaggatggaaaatgtaaaaaatgaggacagaaagaggagttgaggaaagccagccaagaatagagggccaggtgcctgactcagataagacaagagcagggttgtctgggaaagatagggaaagagaccagaggtggaagggcagaagagagtcagtgaggagtggagaagaggtgagagaagaatgggagcgattcgagttataattggttgtgaaggaggggtctaggtacagatgactgaggacggatgaagagaaatagaaggaccaggcgaataaaagtgaggtgagacgggcgaataagagaggtagaagatggaagagagctggaagacagcaaaggagaccagggggcctgactccccccggctcacagcacggggccaggaagggaggcacccggcaagggtcacaagtgtcaatctggcgggacagaaggctgggccgccctttctgccctcccatccctcctcaaggccatccagagaatgtggatggaggatgagagggggaaatccggcgtggtgtggaaggagcgcccgaaccctcttcctcttctttaagcttttggtttctcaaatacctgccctatcttcccatctgctcccctcaccccaccccttggcaaaatcccagggctttttttggggtcagtaggattctggccacctctccagtccgcccccaaaagccagactccacattcgcaggcagtaggttgggatttggaaaggtgcctccccgcaggaaccccaccccttcccacctcctcgccccactctttctccgcggccgtcagtctctccatttccccctcctggtctcgtcctccctcccgactccctagctctccctcccctcgctttcatcctcctatccccacctctccaacctcctctttcatccccctcccctctcctctcctccccgctcccgcctgccccacccctgggaagcccctcccgtcgggcagcgccgccttataagcgggttcccttcccgggggcggcagcggctggtcggcggcagctctgctggtgcgggggcggcgagcccgggatcgagctaccgcggccgagcgcgccggccaccgcctgcaccgcccttccgcccgccctccggacggccgcagccctgcgggtctccgctccagacccacccccgccccaccccgcgcgcctctgccgcctcttccagagacccagcttgccgagcggccgccgctgccgctgtcgccgccgccgccgccaccgcgccaggttccggccgcggccaccctccgccgtccagggcccctccgtctcggccccgggaccccggctccccgccagccccggccccggccccggcaccatgtcggagaaaagcgtggaggcagcggccgagttgagcgccaaggtacgggcgggggcggcggcggcccggacctcgcgcagccctggggcccggcgcggtccttcgccccaggccgcccccgacggccccgcgcggcccttgcgcccgggtcctggcggaccccactgcgccctcccaccgctccccggcccggagctcctttcccggctccgcgcggctagcgccagcgccctctagctgccctgcgcgcaccacggcgcccggcctcgccgctccggtcgcgccgtcccccgcagccgtccccacccctcttcggccccacctcgctgaccggatcccgtccggcttcccgtccgaacgccccgagtctcactttgccgcgccccctccctgcgccccgctgccgcgtctttgcttgcaacctgacctcacctttcctcgctaagcggtttgagatcctcaagtgtaaacaggactctccctggaggctgctcctccgggcccctccccgcggcccgaccgtcgctcgcttctctccccggacggcggccgcctctgttttctcgttccctcccctcagctggctttcagctttcttttctcttcatcgtccccttcccgcatacacactgaaagaatctcgaattcctaaaaattagaagcggggcaggactagccttcgaaaaagccgaggctgggcattgcatggcattgcgtcgagctgtcctcgccctcatcagctcccttccccggccccatccgttcgcccttgcctctcttccagccttcctctaatttccccagggaacctgcggagtgtcgctttgggaaattaacgcggccggggtttgggggctgggagccctatcttgtgtgtgtatgtgtatggcggggggggggggcgcggtggttgctgaggggccgtcacacaggtctcccggaggcccgcggagtgaaacggggggagccaatgggattaacggcggtgggagaggggctgtgtgcgatctgccaaggtgcgcccgtgtggccctccggcgggctgtgcggtggcatgtgacttcactgagtaggtgtctttgtatgtctgaaatccagcgagtgtgtgggactgcccgtgtcagttacatgtgtgcatgtggagacgtagatgttctggagccatgttgtcgctttgtgagtgctgagtggctccgctgtgctcccgtgctgtctcaagagtgtggaccagaatggcccaacgctgggccatgtgtctcccatcgcgtgggtgctcctctctaactgtgtctgtgcatggctgtcggccggtgtcggtgtgtgtgcctgtgttgagtaaatgaggccagagggctgcttagcagaagacctagggcccaggtcacatattctcctggaaaagggatcatggaaggacagtgaccagaaggacagaacaggggaggagagggcccggccccttgaactttggtctctggtattctccctccctgcatcagcccagatgggaaagtcaggccagggccatacagacttttggtgctggggcccccagagagaagctgaccagctctttgctctcctggcccaggacgtagggaagagccccctaggtagtggaaatgccatactgaccttgtggcacagaaatgaagacctcacggtggggtggaagggcaccctctctggagtgagagtgaagagttctgagctacccttaaagggagaagggaattgagtgccccccagggcagccgttctgcaccaggctcctctcctatcccctatcctgttccagaaaggacccccccgcccagggtgatctcacacaggagacttccattcacatggaatcagatacacagcgtggcacaccaacaccagatcagatcacacaaggacacctaccgtgttacactgtgcctgccaaggagtgggtggggagagcactggaatctgaattgggaggctagtgtagtgtccagaagggactcagatgtgccatatcagca

SEQ ID NO: 57453 - DNA, 626 bp, Homo sapiens
cctgggctgggctggggagcgggagttgtatgactcttgtcagtcttgggccttccctagtcccactgcctctgtttcccctgagtttgatctctgttaggagatttctaagatttctgcatttctccatctccgcatggcccttgccttctcctcttagttcggaacctctggactggaggatgcttctgagggcatggggacctgagttggagtggggaggggtgttgactcatcaacagcatcatttctcccaggagacgcccgtaactcatccaaggtcaggactacacactgtcacgcacacaggtacactcacagcttttatcttcacgctccctaaccttggcaaattgtacaatttctttgaagctcagtttcctcatctgtacaatggggaaaagcattagatttcatgaattactataagtaaagtgtccaatacagtgcttagcacgtaatgaagcctcaatacaatgtagttattctccatgccccacaaagctggcatgcctagcctcagacctaccattttttggggtgcagtaaggcttcctgtccaccatgttcccagggacattgtactgatgggtggaaaggcaggtctaaaggggtcacgaagttct

SEQ ID NO: 57454 - DNA, 563 bp, Homo sapiens
tggcgggagggtctgggaagttagaaggaaaggtgacaaaaattctgaatggttcgaaagaggtagaatatatttctagaatccttgtctactttgcagccagggcttgggttagagttgcaggaagtggcctggatttgggaggagtgaataaatccgtcccttggtcagcaaatatttactgagcaagggttttccaagacagtataaaacaaacacagaaaaaagaatactcagagagtatgtgttgactggttgataactatcggccatgacagattagccatgtctgcagcacgcacctgcggccactcagtagtagcaccccacggcaggtgcttaataatgtatagagattgaatgaatacgtgaacatgctaatggataatacatctcctgaaggccaatcctgagttttcacttgctttctggatacctctaactagatgttataccacctctcagccgccttaccctgaaccccagctttttctcccaccaatccccttgctgactcagcctgtcagtaatccactggtatccatccacctcgaaacctggcc

SEQ ID NO: 57455 - DNA, 2041 bp, Homo sapiens
ccctccgcaggctcagagcaagatagaggagctggagcaagaaccggagccggagccggagccggaaccggagcccgagcccgagcccgagccggagcagctctgacctggagctgaggcagccagcagatctcagcagcccagtccaaataaactccctgtcagcagcaagcctgagtctggctctttcttgtccaagtgaaggttcccgtctctccccagcctctgagggctcccttctcccaccctagcctcctaacctactttccccagccagcctccctcaccttccccttttctgtttctggctgcttcgtgtttctttcttggtctctctctctcttgcgctcactctctctttctctctcctgggtaatcatttctctgaagctcccccgaaaaagcccttgccccttgcctccgcagctctctcctccgtccttccacccaccttccacccacagtgcgctggctgccctggtttccttgatatttttgtcctttgggtccaccccaccccacactcagctgcacttcagcacttgtccttggccctccggctgcagcagatgcgcacatatgctcgcgcgcacgtgcacacacacatgcacacacacgcgcgcgcgcacacgcacacacacacacacacacacacacgcgcggcgcgcagaggactgccttgtcaagtcttccaggagatccggtctggaaacctctctgggcagccggctggggctcctacctctgccccaccccccacgttcctcagcccttggaggcttttctggtcccaggcatgagaacacactgccacccagtggtcactgcttgtcacaccccaacggaggtcactgggccggctgcggcaggcctgaggagttgagcagtgcagtggacaaggcagggcacagactgctgtgaatgcaggcaccgcctttgtattatgcacgttctatgtgcagcatatgagtatgtgcccggtgactgtcacatgtcctatgcacccttcaggagagggactgaacaatgcatgtctcaggagatacagccctggctggccctctcaagggtgtaatctatgtctgacaaaggggaaggctgtgaacaaaggcctgtgcgtagagcaaaacagccagctgcagctgtgggagtcgggagccccggcttctcattccagctttgctgatgtaactgtagtcaatctccctgagcctcagtttcctcacctattaaatgggataatgataataacccaccaaaatgggttgttgtgaatattggataataaagggctttggaaactgtgaagtgctctgtgtgtgtggagtacttgtctgattatccattagtgaaggagaaagcaggcctgctctggtcatgctaagaatgatattgaagaacccaagtcggcctgcgccctgctctgtctgtctgtcttggagcattcacctgggccatgtcaatggtcctctcagcagagcaaacacggcctcagcacatggcatcctccagtctggcatgggacagagacctctgcctgcaaataggtgtggggccctggactttggccacagatgactctgtcaggggactttaaccccatacaggagaacaaaatattgaaagcgagtgggtgagtgggagtgaaactgctggagcaggaggggcatggtggcatgtgtgagtggcatcccactgggtctgtgtgccgtgtgcaaaaagacacaaaaagacagacctgaggacatgtccctgcagagacacaatagtcactcattagagacagacgatgaagaaggtgacacctttgttctgtgcagagccttaggtagaggggggaccctctgaagcctgaacaatgaaccatttacagcaatctgaggttctgagcctcaggatggtgatgactcttgccttgtcactggcagagaaacactggcacaggaaggaggaagctctggccctgccagagatgatcacactgcaaaaggaagtcttgaagtccttttagaagcttccaggccaggtgtcatggcttatg

SEQ ID NO: 57456 - DNA, 1963 bp, Homo sapiens
tcgctttcgagacgtctagtctcaagaacgaattattaaacaaaatagaatcatgagtgattacactattatgcgcacatccagctggagttgtgatggttttcctgaggcgagcgatagtagctttattggttgacagctgtatcagtcactcgacacaaccccctcaagctccgcctcactggataccccctttacaaataccaagacaactgtccctcgactttccgaccggacaggtccccaggaaactttctggaattgagaggcctaaaacaaccgtcagttcctgctcttcaatagaaggcacgcgaatggactctaagggtcccggagccggagcagctgcggagccgcagcagctgcaaccccgaagcccacctagctgctctacgtgcgctcccgccctggaggagtgggattggttctttcaaccatcaattgccttaggagcgcttctcattggcgtcagtcaagcgcggggcaggggcggagcaccggcaggcaggctccgtccaactgccattctcgcgcgtcgtctccgcggcgcatgcccctaacgagtggcgctcattggacgggaggggcaggggaggggactgggaacggtgggagccgccgtgtgtggagaagctgctgccggtgtcatggcggagctgagtgaggaggcgctgctgtcagtattaccgacgatccgggtccctaaggctggagaccgggtccacaaagacgagtgcgccttctccttcgacacgccggtaagcccattccccacgcccgcaacgagcacgacttccttccatcgccctggtcattccgctggggcctgcaaggcttgggctaccgcctccctgcgatgcaccatgggacttgtagtctcccacgctccactctgccgttgcctttcattaactgcggctgtcgtgtgactaccgtccccggaagccgccgcgctcacctctccggctccccgcttcgtggagcactgtgggcattgtagtcactcactgccttcgttgccgttctaagctaggggcgcagcccgaccgtcggactacatcccccaagtggacccttgagaaaacctggcagtcggccttgtctgccgcgcacggctctccgggttttgtagtctcgtgtaggagtgatggggacgactccccactgttctcggccggggttggagttggggggtggggaccgcagttcctaggcggttaatagtctgggagtggactctcaagaagtccgattctgagaaaggcagagagcctccaccccgtggttaaaacagacagggggcggggaggggaggaaagaggagaggaaagctctagtcgtttctcctttgaagtgagcaatggccgcagcccccacccttccccccgccccccagcctatcacagacagctgagataaccccttttaaagtattcctagagaggtggtttctttctcggaggatgctaaggcctctttcccatcccgctcccactcttggctagttacacaaagccacctcccacaccatgcttcacgttttgcaggctccacctggtacctcccttcctgcagttctgccttccctatgtcaccctcaagcggaggccctttggggcctgaactgagaaggcagcagcttggttgggatccgcccccctcaccacccctcccctcaagctgctgtgccctgcccagtgtattctgccagaaccagctcatggcctgaaaactgcaagtcagagtggaaagccttcattactgcatcaccagtactgagtagaacagcatgatgtgaggcccagttcaggatcatcactgtgatttgtggtttgcttggtttgctaggctttgatctgggcctcagacaatgtgctgcttctctgaagtctggctttggcagaggtaaaagagcactgcgcggagcagagctccggggttcccaatccttggtgaaatcagc

SEQ ID NO: 57457 - DNA, 2014 bp, Homo sapiens
aaactcctaactctggccgcctccctgccaaagtcaagtctccacttttcactggttctagagctctaggaaaattggggttgggtggggaggtggagtagagtgactaaatgccgacacaaagccaaggaaagatggagtgaagaacccttccctctctttattcacacaggagtggaggatttcccaaatgtccctaactggctagctggcttcaggctgggactcagtccctgcagttcctgccaggccttgccagccggggcgagggttgggatgatcctggcggcctatgcctgtgtgggctgcccctcccgctgtgaaccctgcatttgtcccgcaagttttcactcaggtagactccctgggtacaagggtgcctgctcagcagtcgggcatgagctgctccgatgggcgaaggaggttgtctatcccacagttggagaggggccctctctgccccagtgggcgatctgggctacggccaagttgccaccagctagttccgcttgaaaaccacttctggccccgtgggggactcaagtcgccaagcgagggttcccctgagcgccggagctcacaggtctcgccttgtcccgaaagccccgcaatcgaggcggaggcgaccgagcccccgactctcctagaacgttgccacaagaagggggaacgtcggaacagtgcatcatcgggcggcggccggggcggcggcaggagggcgggcggggggcagggctccgggggactgggcgggccatggcggaggacggcgaggaggcggagttccacttcgcggcgctctatataagtgggcagtggccgcgactgcgcgcagacactgaccttcagcgcctcggctccagcgccatggcgccctccaggaagttcttcgttgggggaaactggaagatgaacgggcggaagcagagtctgggggagctcatcggcactctgaacgcggccaaggtgccggccgacaccggtaagccctcgccgaggaggggtctggccgggccggggccggggccggggcaggagtggcagcgccctctcccgaggccccgaggccccgaggccggtatccgcgcggacctgatgcagggctgtgggacgagggccgctggggtccgggcaggggcctcgcagccgcagccccgtcggtgcgtcgagggggcagggcggagcacatgatgccccttggactatggggcaggtaaggacgttttgggtctcctggaggaaggtggccccggggcgcgcactggggctgtgcccgccaggcgacggggttaggagcggagcccgaggctctgcgggagaccgggggaggctgggccgcgtgggcttcccgctccctgcgccctggcctcccgcgccgtgcgccgccgcacgtagccccagactcctccccttcctcgccggcgtccgcgtccccgcgccgagctgctcgggctccctgagccccagatctgaccccttcccttcggcaacctgaacgactcccgccttccacggaagggaccgagcccgtgccaaacaggctgagcgatttgggagtgaggagccatcctaccgctttccccaacctggaaacagcaaagcgcaaggcctctgagtcagttaggtctctgccacccacgggcaaaggatgctctcctccatcctccttcctccctccaccgaaatcggagagccgcgggcctgatccaaagaggcatccccttctcgttcattccccagaggcctcaatacaaaccccaggagttggcccctctccttttgctacaaatccttgccttgcaaaggggaggtgaggatgggctattttagaagggaagcagggttgctccctggagaatgctgagtctgtgaggtgcctatgccgagaatagctcgaggaaattggagccccagctgttaaaagagcagagggcagggtgagggccgtggcctctcaggggtatctggaaggctcttcgagttgagtgcagacccagcctgggctggaaaatgg

SEQ ID NO: 57458 - DNA, 1998 bp, Homo sapiens
ttgggttaaattaaataacagctgtgaagacccctagcctttcccagcactgaacagaggttgaggcaggctggatgaaggtccatcccctctgctcttgtcagaagagtttccatcccaaaccactgccaccagggacagaaagttctccccacgtctgccccaggcctcacctctcctttcgcccaggtagcggatgcggacctggcactggccccagacagcgcttactgccggatagagggtcctgcccttcagtccgcggaatgctggccccaggtaggtgcccccaatagcgtagcccagagttccctcctccatgtccagaaccaccagcagtctctctggcacctccagctgctcaccctgagttcccgctggatactggggggctccgggccccttgctctgatggtacagcttcccccgcccgatgtcccagccccacgactcgctgttgctgcccagcagcgccgcgtagtggtcagtctgcagcggggcgagggccgtggccacgcccaccacggcatgcgtgcccctctgctctaggggccagctgatctcccaggcgtgcaggccccttgaatagcccctcttaccccgggccccatcagtgctctgggccacgggccgccgctcaaagtacaaccctccttccttgacctcgatgttctctgaacagtctttggggttccaaccgtggcgccgctgggcccccaggtcaggagggggtgcagacagcagctcttccaagccctcgggacaggagaggtcagggtacagggcctgtggcgtgggggtgctgctgctgccccctgccagagctgtctggcccatggaggtgaggagctagaggactccccgaaagaggcttgctggggcgtctttctcttctgaaagttgagctccagtttggattgacctggaagggagctgggagaaaaggggcgtgaagagcagaatcctggcgggggctcgtcacccaggtaccccatcctttcacccaagtttgccaacgggcccgctcctccctcctcgctgccccaaagctcctgggcccttcatctgccctcgccccatctgatccaggtcgccagagactctcgcgagttcgccccatttgggcctcagcatggaccatcccccttactcgcccggagccctcgccgctgcccccgaacctcggttgacttcccagccctggaggtcgccgggcctctgaaggagccgggcggaaagaagccgaggcgcgcagggcgcagaccgccggccgcttccgcccccagctcctcccttgggccgagcccgtcccgcggccccgcccctccagggccctctggggcttaaccctctcatcgccgcccacggccgtgcagctccgaggccacgcccctgtggggccccgccccctcctgggcagttaccgctctataccggcagcagccgcggagagcatgccccgcccccgtggagcccaccccgggcggttaacctcgggtctcagtcccgggctgtgaccctccccgaggccccgcccccacggcgaaggcccggggcagttaacccttctcttgctgcggcagagtccgcacccgggcaggcccatctcagaattaacgctttgatggcatcaccgcgtcgggaatccctggggatggtgttctccaccgtcaagacctttgagccgcctgagcgactaactcctgcgcccctgagggtaaggagcatggggtcaaggaggggcttcattgtgccgaatcccatttctacttccctgtgattctgggtcactgtttctgggctggtccctttctgccccgggttgtgagtcagcctgtgccacctctgaggctgtgaaatctgcttcaggctctaggctgtacgcatcatagttctccctgctggtccagtcttcatactggatgccaatccattactgagccgttgatctcatttggtagagtgtcctgattaagacttcgagtttgagtgaagcta

SEQ ID NO: 57459 - DNA, 908 bp, Homo sapiens
gactttgtctcaaaaaaaaaaaaaaaaggttgttttaaacaattcatcagttgatgccactgaatctggagctggtcaaacatttgttgctaaaaggtaaaaaatttcgtaatgctacaagtaatttaaattttttacttaaaaattaaaaaaaaaaaaaaattggccgggcatggtggctcacacctgtaatcccagcactttgggaggccgaggcgggtggatcacaaggtcaagagatcgagaccatcctggctttagtagagacagtgaaaccccgtctctactaaaaatacaaaaaaaattagccaggcgtggtggtgggcgcctgtagtcccagctactcgggaggctgaggcaagagaatggcgtgaaccctggaggcagagcttgcagtgagccaagatcacgccactgcactccagcctgggtgacagagcgacattccatctcaaaaaaaaaaaaaaaattatagatgaggtcttgctattttgcccaggctggactcaaattcctgggttcaagtaatccccccaacctcagcctcccaagtagctgagactacaggcatgtgccacaatgcctttttacttattttattattttgttgagacagggtctcagtgtactccaggctggagtgcagtggcacgaccatgactcactgcagcctcaccccagcctcctgagtagctaggactacaggcacatgccaccaggcctggctaatatttaacttttcgtagagacagggactctctctatgttgcccaggttgatctcaaactcctgtactcaagcaattctcctgcctcgtcctcccaaagtgctgggattacaggcatgagccaccatgcctggctgtttttaaatttttatatatatatattttgagacaaggtctggct

SEQ ID NO: 57460 - DNA, 1878 bp, Homo sapiens
gcctcctgggttcaagtgatactcttgcctcagcctcctgagtagctgggattacaggcgtccgtcaccacgcccggctaatttttgcatttttagtagagacgggttttcgctgttttagccaggatggtctcgaattcctgacctcaggtggaccacccacctcggcctcccaaagtgctgggattccaggcgtgagccaccgcgcccggcctgccattttcattaaccacatatcttcgttgtcactttagcagttgtaggagaatctgctgacctcgcttcacaaattttttgaatcttgattgaatgtacagattttttgaggccgtattttttttttttccactttggggatagacttgtatgctagcatggaagggaattgtttcttcggttgagtgcctaaagtgcttgatggcctttcagatggatcatgtcatacagaaaggaagtatcttaaaacactacaatctagtttaagacataaaacagtagaatcgctgtcagcgtcacaagatacaaacgaagggctcagaactgggaccaagagaacatagtctccccatcttacactcgctcggaatgggggctggccccactctgctctatttaatctgagcactgttgaatgaatctgcgatgaaactccacatttcctttaatcctcacaacaaagataaaccaatttttagattcgtaaactgaggcttagagaagttaaacgtattgtccgagactacagaactggaaaatggcaaagtcaagatccaactccgaagagcctccccctgcccactagcggggaggaaatggcaaatgacacagcaaaaaatgtttaaaaccaggattctcggtcgccgtcccgcccagcgccaacgctccgtcccgcctcgcatcaacgcctcgctcctccccgcccagcgccaatgccccgccccgcgcagccgcccaggtgccagttgcgtaaccacggcaaagctcgcggcagggggcggggcagacgctgactgtcgccgggcggcggtcacgtgagcgggagcgcagcaggccggcggtccgagtgcctcgcgcgcgccccacagcggccgcacgcgtctcgggctctcctcccagtagttcactccttagtggctacagaaactggagcccgccatcgggctttcccctgaactgcagcttccgtccccgccaatctcttctccggccccagcgctgactttcatgcgtggagcattctggcccggaacagagatcccagggcggaaactagggcccgaggctgaaagtccgttcttggcggcgagggccgccgctaaactggctgctgagggcgtctctagctcgggttccagaagagagtggaatggactgagtgcttgtgagaaacttcctaattgaggcttacctactaaagttctttacgttttaaagggttccattgcatcagccctcaaaatgtttccttccccagccctctttcttctatcatggtggttatgtctagggactctccactgggagacaatcattttgttctccccgaggagggaggtcagaagtgggagacacccaggttgtgttagaaactatggtagctggggcgatggctcatgcctgtggtcccagctactcaggaggctagggcaggaggattgcttgagccctggaggtcgaggctgcagtgagctatgatcacgcctgtgaatactctgggaggatgggtgacatagcaagaccctttcaaaaagaggagaaagaaactgcagcgtaaagtagcacacctgttacaaaggtaaatgctcttttgtctatccttgctatttttaaaaatactcaatttttcctagttttccttttttgttttttgagacagtc

SEQ ID NO: 57461 - DNA, 1590 bp, Homo sapiens
tggctggggctgtgtgtgtgcgtgtgcgtgtgtgtgtgtgtgtgtgtgtgtgagagagagagagagagatgtcccctgcagctggactataagcctggccctcaggtaggggaggaatgggagagggtagacaatggtttcttttgtgactctcaccatcccctatccccacatatgcctaaatttttcttttagtatccattgtagcccattccttagtgattaaaaaacaagggagaagagctcagcctggaagggatttggaaagggcttgagccaaggcccagtgggagactgaactgagtggtacagaaagagaggaaatgccatggggagagagggtgagagggaaagggggagccctggaacaaagtcaggggtggggaggagcagcagctaccctagagcaagaggaagggagtcggggtgcacagggagacagggagctggcctggtctcagggaggccctgggaggaaggtgtgcttggagtggtaaagtgagtgccaaccaattcaagggacttcagagtgatgactcattcccaggccaaggaagtgttcctgttcctgcgcccagttccccagtgctctggaatcttgtttagagcttttgagtattcccagaactttgttgaatctggcccaaggaattgtgagacaaaaatctactgagctgctccagagctaacctccttccttccctgaaggcaggtgggatcttgccaattcagggcccacccttagcctccagcaagactggccccacaagtacccgacccccaccccaaatctggagctctactgagggctcctaatccacactccagctccagctcttccggcttgccagcctgcctccctcccattctctggccttcccaatttctgctgccaaaaatcaccctgtgtcctttgtcctgggagatgttgccgcttggtggagggccaggagggagcccaggagaaggaactggtggtgggctggcggaggtgctggcttcacggccgggagcagactgactgccagaggctacctggagagcaggggagggagaggaagggttgggaggagcctgcagtctgtggtggggactgtctccaccttagaacaagtgggattgagcaacaaggatacccagggatttgggtccacattaagcccagtcttcacccgactgcttccctgtgacccaggggatctttagtgatgactttcaacagatttgagaaggaaaatggagatgccactagatggaaggcctgaggatggtgtctcactcctccaagctgtatcccttacctatctacccatgagcttgccagcaacctccccccgctcccacatctgtcatttcctttaactgccctcgtttcccatctccattttttctttttttttttgagacggcgtctcgctctgtctcccaggctggagtgcagtggcgcgatctctgcttgctgaaacctttgcctcccaggttcaaggattctcctgcctcagcctctgagtagctgggattacaggcatgcgccaccacacccggctaatttttgtatttttagtagagacggggtttcgccatgttggc

SEQ ID NO: 57462 - DNA, 2403 bp, Homo sapiens
ctcacgcgttccctcctctctctcctcactgacgtttcctctggacttctctctctccagcattccttcatccccccacccccaattcttatatttatgactcttttgtcaacactaatcacccccaaaagctttactttttccagaagccccatctttctatatatgtcatcttttcaatttttctctctccttatgaccccaaacttccatcccattctctctgataatagcccccaaacccgtctggctccatctctgccacagatccctcaccccaagcttctctcacttctcaccaggcacccacaaagcccccaggcagctccatctttccaatccaatcccattatcccaatctctaccccaggatcccccaaactcctcccacttcacctctgccacagacccgctcgcccccaaacttcagcctcccctcatctgccctcaccacccacagcccctcctacctagccctctcccgcgccgggcccgcgggctccccacattccgccacggctagccctccccgcgccccggccccctcggcctcggcctcggccaactcgcgctgcgcctccccctctccggctccccctctctcccccctcgcggcttgcctcgcgctccctccctcgcgtctccctcctggcccctctctcctccgttcctccgcgctccctccttctccctcttcctcccttctcccatccccctctcccaggctccctcccttcgccgtccgctttcctgtgcgagtcgccggacgcaccgcccagcccgtccgcagccccgcgccgggtcggggcctcgggccgggccatttcggagggaccgcggcttcggggaggggctaggaggggggagagggagccgactgccggggaaggggcgggggccgcgggcgaggcggccgaggggcccgggatcgcgcgggtgcgggctgcgctaggcgggcgcgggcggcggcgggtcggaaccgcgccgagggccgggcgggccgcggggccgggcggcgcggcgggggcgggcggcgcggcccggggcattccgggcggccagggggaggcggcgagcccggggaggtggggagcagagcggggatcggggtttgctccgggggccggcgggcgattggggccaggcggggaaaaggggggatgggggccgccctccgggggggtcggggccgccgccgccgtcgtcgcggcggcgactgaggccgagaagaggagaggggggcgggggagctgccgccgccgccccccagaggcgccggagcccggaatcccgctcggagccagccagccgtcccgagctaccagcaggtaaggtctgcggccgcctgggccccgggcccgcggggttctgtcccgcccgggctccggcctgcggctccccacccccacccctcccagttccccctcctgccgccgccgcctccatttgttattttcccaatcccgtccccccactgcgggctctgcctggcctgagggccgggggctcagggggtggggcccgccgaggagagtcgggggccagggtttcgggaggatcgggaaggtggggaaggagggagggtctccggaggaggcctgtggggccagagggtatccgggacccgcagactcaaaagaggaggaacatcgaggccggggttggcggaggaaaacgggggatgctgtgagtggggttccgggcgaaggcagaatggataggagagatggcagcgaggtggggcatgaagcctccaggaaaaagctccaaaggaccagaacacgggttccggagcctggggttgggggctttaggaatagacgggaagtgggaaacgggaaaggggtgtggtaggtggaaagagggattgtggctgatgaacctgggggagacggaggcttgggcaaagagaggtccatttttgagaagagccggaggttttccagcgtggaagagggaaggccatgtctttgtgacggttttcattcccctactgcaggtcacctctgaccctgttttccctatcccagacatagttatttcttggagagggcactggggcccagtagtgtgggttatcccaaaactagtgaggaggaaaacaggaacacagaagggggagttgggaagaaaggggttctgggaggatggaaatggagaattgagcaaccttacaggcactccaggcaagttgcgacctccaccctccaccctccaatttccggagcgtccgctgcccctggagctgtgatctatatagggaggccttagttactgctttgagctcaaagatctccctttgtgcatgggcttattttgactagggtaggtaccttcaagctcccttacctgaggtgctataggagggtaggagttgctttggcaactggggtagggggtagc

SEQ ID NO: 57463 - DNA, 1558 bp, Homo sapiens
aagcaggccccaatggccctccagtctcttcctcttccaactcttcctcttccacttctcaagggtcctacccatgttcacacccctccccttcccagggccctcaaggggcgccctaccctttcccaccggtgcctacggtcaccacctcttcggctaccctttccacggtcattgccaccgtggcttcctcgccagcaggctacaaaacggcctccccacctgggcccccaccgtacggaaagagagccccgtccccgggggcctacaagacagccaccccacccggatacaaacccgggtcgcctccctccttccgaacggggaccccaccgggctatcgaggaacctcgccacctgcaggcccagggaccttcaagccgggctcgcccaccgtgggacctgggcccctgccacctgcggggccctcaggcctgccatcgctgccaccaccacctgcggcccctgcctcagggccgcccctgagcgccacgcagatcaaacaggagccggctgaggagtatgagacccccgagagcccggtgcccccagcccgcagcccctcgccccctcccaaggtggtagatgtacccagccatgccagtcagtctgccaggtgagcggccaggtggggcggaggtgggcctggaaaggggacgacgacaaggcggcgacgagagagggagtagcagggaggggccttgcgctggtgtagtgttttagaaaagcacgcccctctcctccgtccaggcctagtggccagtgaggcccgcagcagctcacagcctgcaggggtggttttgaggcgggggctacaagcactcgccggggccgcggcgctgcgggctccatcgggcagctcgcaccgcctgagcgcccgctgcttccacgcccggcaggttcaacaaacacctggatcgcggcttcaactcgtgcgcgcgcagcgacctgtacttcgtgccactggagggctccaagctggccaagaagcgggccgacctggtggagaaggtgcggcgcgaggccgagcagcgcgcgcgcgaagaaaaggagcgcgagcgcgagcgggaacgcgagaaagagcgcgagcgcgagaaggagcgcgagcttgaacgcagcgtggtgagtgcgtcactgcctgcgccaccgccttctttccctctttccttccttccctctgcgctgcgctgcgctacgctacgctgcggggctgtggctgggtgggcgggcgagtcacgtcgccacctgtcggaggggaggtaccactgcagcccaggaaatggagcccaaaaggttttcagcgagagccatctgcattcctgggttgggaaaaggcatgctcagatgggactacctgtggatcccaagaagggcaaatattcgggagcgggggccgcagttaagttccaggtgggcagagtttcaatgagttgaggcattttggcattcggctgtcgaaacaaatgggcagcttaaaaccagccacctcttttcataactgccgctttgactccacttttccctgtatcccacagaagttggctcaggagggccgtgc

SEQ ID NO: 57464 - DNA, 3774 bp, Homo sapiens
aggttatggtgagccaagatcccccccagctgcactccagcttggcgacagagcaagactccgtctcaaaaacaaaaaacaaagccggttatgaagcgggggtggggtgggctagttttaataggtccaggcgattagtacctggcatccttaaccacctacagtttgagaagggagtgggtgataaaagcctggaagggaagggaaatcgggccgggcattaggctccatcgctcatcaatagacaaggcctttaggaaactgcgacaacggcttttgctctgggcctttactgccgaatccaggtctccgggcttaacaacaacgaaggggctgtgactggctgctttctcaaccaatcagcaccgaactcatttgcatgggctgagaacaaatgttcgcgaactctagaaatgaatgacttaagtaagttccttagaatattatttttcctactgaaagttaccacatgcgtcgttgtttatacagtaataggaacaagaaaaaagtcacctaagctcaccctcatcaattgtggagttcctttatatcccatcttctctccaaacacatacgcagcagtgttacagctcttttagaatttgtctagtaggctttctggctttttaccggaaagcccctcttatgatgtttgttgccaatgatagattgttttcactgtgcaaaaattatgggtagttttggtggtcttgatgcagttgtaagcttggggtatgaaggtttgggccacgcctgggcgcttccggctgcgccggatgctgtttcctttccgctcccaggggcgttgggaacggttgtaggacgtggctctttattcgtgagttttccatttacctccgctgaacctagagcttcagacgccctatggcgtccgcctcgacccaaccggcggccttgagcgctgagcaagcaaagggtgagaatcgtcctagtcaaggcataggctgctggcctggggtagtcaaggcatgggctgctggtctggggaggatgcgggcggaggatgtggggcgacaaacctggctacgtccgccgggaaaatggggtaggggacgccgggtaccgtccttctaagtggggcgcttgcccccaagacttgggatcttattgggttacctacagcctcaatccactaattccttgcgctctccgctgggcccgctgtctgttctccgacgcctacccgggacgcctccctgggatgcttctggcgcgcagtggtcctcgcggaggtgatccaggcgttctccgccccggagaatgcagtgcgcatggacgaggctcgggataacgcctgcaacgacatgggtaagatgctgcaattcgtgctgcccgtggccacgcagatccagcaggaggttatcaaagcctatggcttcagctgcgacggggaaggtgggtcagacgcgggaaggcgggtcagacgcgggaaggcgggagttgggtcgggagagggcgccggatctgtgggcccatgagcggttgtcccctttctcgccacacggcggcagccacaatctgactaacattcttggcactcagagcccagggtctaccctgagcttgtgcgtccgagttgcgttttgtacagtagaggttctgtatcccttacccgaaatggttgggaccggaagtgtttcgggttttttcagatttcggaatatttacatatacatggatatcttgggggatgggacctaaatctgaacacgaaattgttttgtttcatatacacgcaccttatgcacatagcctgagggtaattttatataatagtctgaataattttgtgcatgagacaaagttttgactgcgttttgactacagtctcccccaccccccactatgaagtcaggtgtggaattttccattttcggcctcacactggcactcataatttcagattttggattttctaattaaggatggtcaacctgtactgttaatcacattattattccattttgtgatgaggaagcaaactctaatggtgcagactctcgagtagcagagctggacttaaatgctgttgtgccaccttttagtgacatgtctgcatgacagcagtggctgcagtctctccagggtgtttcagctaatttttgtttggggggggttggtggttaaatttttggtgagatcctggtgttccccaaaggtgttgactgattcagctctgctgcctcatagccttcctgagttccagctacagacctggggtctcgtgttcattcttggggttccagtgactaaactgctaaaatggttcacctgagagcaagaagcacactgccttgggacattttcattcactgcatcccatctagttgtgcccagtgtagaccaaatgtcatcatccaaaccacacgggacagaggcctgcatgcgtcctgtttggcaaacagctgcccagccagtgggggagcagttcatgcttagactaccaccccctccaggtgtcttaggcacgctggtccttaggagaagggttgaccttccactccctcttgcaggtgtccttaagtttgctcgcttggtcaagtcctacgaagcccaggatcctgagatcgccagcctgtcaggcaagctgaaggcgctgtttctgccgcccatgaccctgccaccccatgggcctgctgctggtggcagcgtggccgcctcctgagagttggccctcccttgtgccactgccaggggaggaaaggccttgatgttccagacaataataaatgcgcctgtgacttagccttggtgtcagtctcttgcggacctgacaacccccatctctccttccctgattccctctgcctttccaggccccatccccctgaacagctcctccctatggtcctggctgggcctaaccctgccccagggcctaaccctacctgaggctcctccccttcccccggggcaggttgagaggctggagtgggtccctcagcgccctgggtgggtgggcctgcacagggggtacctccttctctgaggaactgggctgttagggattttccttaggccctttggtttccgcctacggagaggtttcccccattggttgctcttcctcagccagggttacttcctggtctgttcccctacccaataccccgccgctctgtcagcttgagctccaggtggagctccaggtggctcctcctctcccgggggaaggcggccctggaccagcaggcgggcctgctgtactcccgctttggggctgcagggaagctggccgctgtgggcggtctcgggccagccccgccccacctgtccttttcctggagactattagtccagggtttgtccctgcagtgccattggcctggcaggcaggatcgaggaggaagtggctgattactgagcggttcttcctcacctggcttgggccactgtgcacagctgtgccgctggctcagccccgccccctgcggccctctgccgtggcttccccctccctacagagagatgctgtcccgtgggtaagtcccgggcaccatcggggtcccagtctcctgttagttttggagggagggagggctttgttgatgctcactccgacgtgtgtgaacgtgagtgcgatctgccgctgccctgcgcctgtttccggtccctatgaacttccccttcccgcaaggtgtgaggacccccggctcactcatgctcctctgccccctctttaacattttcccctggacaagtgtgtatctgttctctccattgcatttctacttccagcctctgggctcctgc

SEQ ID NO: 57465 - DNA, 2050 bp, Homo sapiens
gtgctgtctcctgacctgcaccaactgcctgtacttgcccccctgcacccggctgcagacacaaggaggatgtgtatgagaacctgcacactaagaacaagagggaggagaaagtgaagaagcagcggtcagcagacaaggagaagagcaagggttccctcaagaggaagtgagcggtgctgtcctcaggtggccatggtacagctcttctgcctgggtgtcctccctgccctgccctgtgtccttggctccactgccttccctgggtggatggggtggccgcagcctcattctgtgcttcccagctgccccagaccctcttgttccacctccaggttccagctaccctctcactccctcactcccttctcttggcagcctcagccctgaccctgtggaagcatttcgcgatggacagactcacaacctgaacctaggagtgccccattcttttgtaatttaaatggctgcatcccccccacctctccctgaccctgtatatagcccagccaggccccaggcagggccaacccttctcctcttgtaaataaagccctgggatcactgtgtgtcgcctctgagccctttgcttgcccagtgagtgggcggccagagggcagggcaggatgggtaactgtgtgtgcctccgtgcgtgcctcgcgtgaaagctccgccttccgtcagacggacgtgggtcgggactccgcctcgcacgtgggagggtgaccgtgggtgaagctccccagtctccttctttaaaatggagggcgatcataacagggtggttgtgaaaagcaccgagatgacggctgacgataagacgggcacagtgactcatcacacgcttgccatgtgcccaggcactaaaagactacacacgttagttcagtctaggcacttctgtcattctcattttaccgtggcggaaactgagggacagaaaaactaagtaacttggtcacttgcccaaggtcacagggctatggaacagtgaggctgggattcgaacccaggctgtctgaccccagagcccacactccttaccctggagttgcagctggggccaccctcaggggggccctgatcacactcccctgatgctgagttccagatctgaactaagaagagtagttaacagccggaagcgcagacctgaggccagcccggctgcgtcccctctggcgggaacagggacaggctcctcagagcacccgggcacgcccagctcctcccctcatccaggccgctgctgcccttatcctcttgggcagagtttgaagagctggctgacgtgaagagtgctttgttttttgtcccctcttccttcccccatgtcaggagtggggtttcttctttatttgaaacactggtgtcctggggagtaaagccggtgggagtcatccctcaggaagtgctggcgcccactcctggaaaggctgagacagcacaggtcccaaagcccagaggctgggcgtgcattactcagcaaatccttacagagcccccggcgtcacaggcattcacagtcccccgacctcctggaacttaggaggctggtcagggagacagattcacaaaccgatcacaagcatcaaataattgcaggcgggtattaagaaggaagcaaacaaagcctgggagagagaacagcgagggattgagcaacccaatagctccctggggctgtggccctccagggcacgggtggggcaatcacctgtcgggcccaggtcccctctcccagcaacgccctttctatacaagccgcagctgcacaaaggcaagtcccacctcctctaaccgcccttgggctacctgcccttggggtgggacttggactccactgagggctgtgctgtgaggtgggtccgggagcagctcggtccggagagtggagcgcgatcgttccctctgcaggcctcaatcgaggggcaaggctgatgctccgggccagctggggtctctgggtagcggtgggtaacttcacactagcgacaccttgctgggacccgcctgcccttcacaggcctggcggggccttctccctccc

SEQ ID NO: 57466 - DNA, 2379 bp, Homo sapiens
tgtcatagataatggggtactggaaccaagggatcctggagaggacagggataggtattaagaggccacagtttcggccgggcgcggtggctcacgcctgtaatcccagcactttgggaggccgaggcgggcggatcatttgaggtcaggagttcgagaccagcttgatctacatagtgaaaccccgtctctactaaaatacaaaaattagccgggcgtggtggcgggcgcctgtaatcccagctactcgtgaggctgaggcaggagaatcgcttgaaatcaggaggcggaggttgcagtgagccgagatcgcgccactgcactccagcctgggcgacagagcaagactccctctccaaaaaaaaaaaaagaaaaggccgcagtttcactagccttgcccggtttcccctcaccacgcgttttttggcctgctcctctccacgaccacagacaaggagagattctcttgtccctctggaaaacaacagtttgtatgctgctggaggttctcgcagcacccactatcctaggggcagggatgaggagggtgggaaaagagcagcgttgaatcctgttgcacgtccgactatagccactgctgggtcggcgtcaagggtgaaaggtcagggtcagcaggctctgcccgccattacctgaagtgaaggccctcggccaggatagtgtcctgctgcactccaccgatccgattgaagaagatggctctgtgcccgccttccactgtggggagatgggtggtgatcaggccaggccgctgctcagaggaaatgctaggcccgtggaggggcgcggggacagggcaaggggtttgggggagggactggaagcgtccggcgagcaggcggaggttgctcaccggtgaacacagattcgcgcacaccgtaggccacggcgccggcccccagcaacagcttcagggccgtgcccatgccccggggcccggcgggcagccgtcccgccaagtccttcaagttctgggccatgtctgatcttgaggccggcggcactggaggtcagaagggggtgccggcccgcctctaccccgctccggcttaggtactgcacccttcacacgagggttcgggcccgtaaggctggcgaaagaaagggcagcggaagtgcgctccctttgaaaccctcccccttagcccactacggacccgaacttcgcgcacaggaatcgcgcatacggaagtcccgcccctttctggaaggctgccctcccagggagggcagcgcaagacagcaagtcatctccatttcctggcccactttcaaaatggcagccggaaggaaatttgtgattagaagccgcgctgttcttatttaagagcgttagcgcaacttccggtattgttgcaagatggccgcgcccagtgatggattcaagcctcgtgaacgaagcggtggggagcaggcacaggactgggatgctctgccacccaagcggccccgactaggggcaggaaacaagatcggaggccgtagtttattgtggtgctggaaggggccagtctggagacagtcaaggtagtttgggacaggaagtggagaagtagtaaatcgataggttgggactccgtggaatgagggtaaggggcccagagtggatgtagaaagcagagaggggtgaaagatgcttttgaaggaaggtggcttggttggctttgcgttgatttgacatcctgggatggtagtactcatttttctttctttttttttttttttttgagacggagtctcgctctgtcgcccaggctggagtgcagttgcgcgacctcggctcactgcaacttctgcctcccgccttcaaacagttctcctgactcagcctctggagtagctgggactacaggcaggtgccaccacgcccggctaatttttttgtatttttagttcagatggggtttcaccatgttggccacgctggtctcgaactcctgacctcaagtgatccgcccgcctcggcctcccaaagtgttgggattagaggcgtgagccactgtgcccggccggtagtactcattttcttttgctctttttgaatgatattctagccctcacctccttgcttccaattggtttaccaggattctgtggtatagtagtctaagcagaggaaagtttcgttccttgcgtcattccacatcccaagacaagttactgggcagatgagaaacgtagttatgtagcctagtctgcccacactttttgtaagggcttcgtgtttcaattcattagtatccatagtcacctctctctaatatccacctatgatacactgtccagacctggttattatttaaaacttttacatctgcatttttatctatcattcatctctttccccacatgtaatag

SEQ ID NO: 57467 - DNA, 1164 bp, Homo sapiens
cacgggctcaagtgatcctcccacctcggcctcccaaagtgctgggattatagaggtgaaaccactgtgcccagcctctatctacctacctacctatcaacctgcctacctacctatcaatcataaatatatttcatatatacatgaaaataggctttaaaggcagaaatgtgactggttcaggcaaaatcctgtggcataaatgtggatttttatgtttgtactagtgttagaatggataactggaagaaccctaaactaaaaagggcccactcctggcacagagtgcctgttacaacagtccagggcctgcatgactcaggtctctatgccagggtcatgctggagaatgcagctttcagaagagtcacttcagagtgagtgaaatacctacacaaacatctggaccaagaggggcaattacctgtttggtatctttcctggtatgtcaatcagctctccctgcaccagcttcatgtagtgattcattgagaactggggccctaccaagaaggccccatagaagtaggagaaaccagcaacttccagcagggaaggaacaccacgtatggcatatttctgttgctcagaggacaaggaattctatgccaagaagagaatgcatggttcaggatagccttgaatctccccacaagagccactttgagtgttccccacctgtgtgccccactgactggggttcttcaaatagccttctctttgggggatgacaaatagttgcttcttgtggaaatgcgtatgtgtgtgcatagctggctgttgctgctttagcaaatgccttgctggcattgatctctggactttgtgcaagagctggatcctgggcaaattagatttgttgatccttgctcagtgctatctgaaagggagattgcacaggctggggaatgagggagagctccgctctggaatttgggttcagtcttttgttaacaacttttttcttccctttcattaagtcttgaacctctctgccgatgaatgggtacttacctgatctttccctccgtcaaagtagtcaacagccaaacctgagcagagagagaacggatgggtagggtggtgggagaggacactgaggatgtggcctgtagactgagtgcagccagaagtgtatggcggggggcggagggggggtgccga

SEQ ID NO: 57468 - DNA, 545 bp, Homo sapiens
tatcattattatattcaatgtattatcattatatacttgcctcctgactgatctcaccctgcctttgcctcccttcagtctagccttaatgaagcatctagagggttctattcaacttaagtcagcaggtcactcctctgctcaaagccctctcaaggcctctattctcactcagatcaaaaggctgattgccagcacccgcaggttctgtccctctgcccgggccccactgtcctctgactcatctctcaatctggcctctacccttctgctccagccccaaagctttcccttcctggaatgttaagcaggtccagccttggtgccttcacatggtaagttccttgcctggaaggctctttgcacagataagctcaaatccttcctacacctcaggtcctttgtaaaatgtcaccataagtatcagtgaggacttccctatcttatctagaagtgtatacaacactacccctccccaccctgtaaccctcccccatcacacacttcttgttcttctttcctgctttttctatttttcttctcag

SEQ ID NO: 57469 - DNA, 639 bp, Homo sapiens
ctacttaagtgatgggtaactgattaggttcagtgcttagaacttcatataatgagatacaaaatctcattactgacccactctgccagctagaagagcacttgtagatcatggacatttaggtggggatatagccacctttgatcctttctgttcactagattaagccttgttgctagtacaggcaggagccaacataccttccacactccagcaatcctgtacaccttgggctgagtcatatgctgaacagttattcatgaatacagattcttacttagaactgaagaattacctgctccaaacccttcattaggtagataagagactaaggtccaaaggggataactggcatgcccaaggttaacagagcagagctcaaattagaatccacatcacctgatttccattctactattcttgccacatgccttggcacttggcagtgacctgggagtgaatcactaataaccagctgtgtgctcttttaaagctacagctctattattctttgatgtccagataacaatctatgctccagcacctgtttatagacataagcacacccatttttatgtttgcttatcctcctattgaaaaatattttaaaagttcattttaatgctaaatttaggtgta

SEQ ID NO: 57470 - DNA, 1999 bp, Homo sapiens
gtttgccttcaaaacccatacttttttccattgtactatgctacctccatgtattaaaccatggagtgaggatgcggtaaaaaagcctataaaccagttgtaatacagcttgttgtggcataaattcagatacaccacatcctttgaaccacacgtgtaataaacgcttggaatagtatggatcgattttaaggaggttgttagtcctgtttcccaagtccagcattaaaatgatattccagggtaaatgacaggtaggtggcttggaaaataaaaaaagcaacatggtataaaaagaaaatagtaggactgggacagaaaagagacgaaagtataatataagctggcaataagcaaaacaggcgctcagaatatgaaatatggaatatggggctgaaaaggccgaaagggctaaagttaggggccctatgcctaccgatgagatgcgcgcgtgtgcggggtggttattaatgacagagcaggacacatggccagacagtggaactcaacagagcgacaaataaagacaggtcgtgggagcaagggtagagcctggcacaagagggcgggggcccgactgagaggccagagggcatggcaggggttgaagagaaagatgaagaggttcagagggcacagcgccccagactcgagacaggacttctgtcttccctcagtagctgttggtgtgcttcaggattcacacccgcacccggcacagccctcccgggtggctccgggaagagagggaggtcctgtccccattcctcccctactccccggggactccgcgaggggcggagggaggcaggagggtccttacccaggaagatggagatgatcagccgcagcgcctgttctgacgcgcccagggacgtcgccaacttgttaaggctcagctcctggaaacccgactgcagaacccccgccagcgccaccacagtcccctcgtccccctccgctgaggacgccatcttaactccgggagccccacagggaccccccagctccgcgcgccccgaatgcgggcaaaacgctatcgcttcacccccaattccggctcggggcccgcccacggcgtgcgcattggctggaggcccgccccgcggcgccagctcaccccgttattggccgacctgcgcagagggcggggcctagcgcggcaaggtaggaagagggcgggtctgaaggtttgtaaggcaaaggtgactcctgccgagaatgcacacggggaggctcagggctgggcggggcttggcgtcgggacccagagctgccattggaaaggtctgagcccgtggcccggcgacagttcaactccgttcgaaatgctcccaggaggagccctccggggcgaccgtccggccggccggttcgctgccttcccattggctgaggcgggagcaggcgagagtctggacgcgggggggccgcccgcgcgcgaggttactcccggtcgccggcgctggggttactggggcatgtaacggggaggcgggaacgcccgcgccgcctttcgcgcgccccctaacggcgcctcccggcccgttcttaaattcttaggttgttagactcgtcgccttcactcccggaggttcagcggaaagcccagtgccccaggaacagacattgtctgctccttttatttcatggatcccttttccatgcagtttcctgtagtaaaacatgaccttccccctagaggcgatgaaattaagatatgcctatttaacacttattattttaattaaaaattcaaataattttgcactgagtaatacatgtttatgataaaagttataacagtatagaaatgtaaaacagaagagtcctgtttcccctccctgcttttcattctcacttcctacaggtaatcctgttaagattacgccaaaaaaaaaaaaaaaaaaatctgtcgagcacttaccatatgccagggactgtgctgggcttgggaatagaatcaggagcccagagccacggagtgggaggatgcaca

SEQ ID NO: 57471 - DNA, 3703 bp, Homo sapiens
tgtggagtggcactgcccctcagtcccttgtctgcaattctaaaatccaaaggactctgaaaacaaagtctctgtcttttttttgtaatgggatctcattctgttgcccaggctggagtgcagtggtgccctctgcagcctcgacctccctggcacaagtgatcctcttgcctcagcctcctgagtagctgggactacaggcgtgtgtcacaatacctggctattgttttttgtttgtttgttttcaagtttgggactaaaactcaatttggcagcaaaacctgacccgaactgatgtgatttgtaatctttagttatccatttaccgtaagatcaatgtgtttagctgcagaaatcttaatgtttgttaatagggggttatcctggtccataaagggagggagaggaggaggtgttacctaatattgggtccatggactacatagcctaaaaaaatctataaaatttcaaaacacacctggcttcaagggttatggataagggagtctgggttggatctgaaagggggcttggttgtggggtagaatttcgatgtttggaagggatgtggagggatgttatgaagaggaagcctcacgccataccaccttgggtcttggtgttaagtcattatcaaccattacatttgctttaaagcagagatgacttacatttctgataactactttcccttaattcatgattcacacacatttggagggctggactttctgggtttggttatttcccctggtaccaatccccgccttttcccagaaatcacttgactttcccgaaaactcagaaacacaccctttggctgaaaaatagcattaagcaatcggtgaaattccccattcctcctttccccgctggagccctggatagagggctctctggcctgggaggaggacgctgtccttgtttcaaaagcagagggagctccaagatcaaggctgagtttccctaagtcatggtctcccagccccctctgtttagatcagggaatttcagacatgcacactcgggtagggaatcttatgaacagaaccaggacagggaggctggccggaggttcctgcagagggagcgtcaaggccctgtgctgctgtccctgggggccagaggggttgcccagcatgcccactggcaggagagagggaactgacccacttgctcctaccagcttctgaaggtaaaatccttacaaacgaggagcagagctttgatggaggaaaaaggaaaggcagaaaacttcacgtaggagggcttggggcaatgatagagggctgacaaaggcagcataaaaaaaggcagaatatagacaacctatttctcttaggctcaccccatccacccctacttcacccccttacctaccactgttttcagggttaaagcaattttagcaaccctttactaggaactgtggggagatagcttgtattttcagtaagttggcggtggggggcagggacaaactccaaacaaactctggaaaacgaatgtaggaagtttttatgttccttgtcatttggctgtcccttttctccttcctcgcacaaccctgtatcagtggggcagcacttccttctcagaccgcttgtcccagggtccctgccttcccctagtgaaagaagctcctgcctccatcggtgggcgttgggagcatcagcggagatgcacgcaatgataaacagcagacagggctgcttgaggagatgaggtgatcacggttaaagaagaggggctgtcctacatggatgatcatgatgcgccaagactgttgaaaacctgagtggaaatgggagcatcgttcttgagggcaggagagagactgataccgcgggggtggggctggtggaggacaatagaggaagaagaaaactgggagaaagtactcgattcctttggagaaaaattaggagaaagtctagagaagcaatgagggaaggatacaatttagctatagtctagaaagttagtcgaagttaactagggagggtgtgaggggcacggtgccatgtggggatgttggtgatatggccctgtgtgttatacctttgaaggtgacactgagccccaggtgacgccgcaccaccaaagaaggtgcttgtgtttgtcagacaaatacagccaggcctgccaccccttaggctccaaagtccggaggtgcagaaagccaggaccaagagacaggcagctcaccagggtggacaaatcgccagagatgtggtaagtgatcaagggtccctgagatgacacagactccattcccttcatcttctcaagaaaagcgctcaagggccaggcatgatggctcacacctgtaaccccagcactttgggaggctgaggcgggaggattgcttgagcccaggactttgagaccagcctgggcaacataaggagaccctgtctctattaaaaaaaaaaaaaattagcccagcgtcatgcgtgtcacctgtggtccctgctactcaaaaggctgaggtggtagaatcacttgagcgcgggaggtcaaggctgcagtgacctgagatcgcaccactgcactccagcctgggtgacagagtgagaacctgtctcaaaaaaaaaaaaaaaagggctcttgtctgaagcctgggttttggtttgacctgggccttttctttattccgacctaagattctcccccatggccgattgactgcctctcttcttccccctttcttctgcctctggcaaatagcgcgttctgtcctaggctactggtgcctggtcacccgccaatctatgcctctgttttttcaggtgcattgtcctgttttcacttttggcatgggtttatgctgagcctaccatgtatggggagatcctgtcccctaactatcctcaggcatatcccagtgaggtagagaaatcttgggacatagaagttcctgaagggtatgggattcacctctacttcacccatctggacattgagctgtcagagaactgtgcgtatgactcagtgcaggtatgttataagcacaaaaagaatagagatggaagactagggctaaggtagcggaataaggatgtgggagggagtgccacctgtactcacagtgaactggagtcaagtcctagtggcataaatgttctattctctctgtcccttcttttaactccataccaaaatattaccctttcctagattttttttttgtgactcttctcttagataatctcaggagacactgaagaagggaggctctgtggacagaggagcagtaacaatccccactctccaattgtggaagagttccaagtcccatacaacaaactccaggtgatctttaagtcagacttttccaatgaagagcgttttacggggtttgctgcatactatgttgccacaggtaaggctcacccttctgcatgtgccttattgacccagctaaaagattagaaatgagaaatccactgagcaacacattgaatgaggattctgttcgtaattcttataaaaagtgttgacttggcctgggtcgctccataaatcacttttgtgaaattcaaatgcatgatcatatcttagtggtgatgatgatcatggtaataacacatagtacataataaacagcaatttgttgagagccactataaactgggtatgtattggggattggggatttttcctattttaacacaatcgtcactttaatccttcaaggtag

SEQ ID NO: 57472 - DNA, 1615 bp, Homo sapiens
accaaactacactgactggctttcttgatgtagaggctttggtcatgctaggtgcagggctgaatgagaccctaatacgttctctgcattgctctgtatttatttcgccactttcccgatgccttctttccttctgctttggagatgttccctttgtctccctggcaggctagaggcctgagggattgtttggaggaagatattttttttctggctgatttaatctgatttactacttgaatcctagacgagctgaggttctgaaggaacggggcagggtgttggggtcggaggggggaatggaagaaggaagatgtggtggtgagtgtggcctgtgttctctgtgctattccaggggagtatcactgtgctggtaacgggagctgggtgaatgaggtgctgggcccggagctgccgaaatgtgttccaggtaaggagggctgaggcttggggagagatgatagccatgggtgactgggagtcaccttctgaaagcaactgtaatcctcttgggaaaggactgaacagtgacctgccagagtccagctcagtgaggtggcagtatcactgtgccgtgggctgccagggccgtggggaacctcctcagccgcactgaagccaggccaactggaaggaaatagaaacgtcagccagcgacagttggtgtctggtaatgtagctgcagtgagaagatacagaactgctaaaaacagggcctgaaagctgagagtgtgtgagtaatcaacactcagaaacaagtctagctaaatagcctagttattatattaaaagtttatagggcagcaagatatagaggaattcaaagaatgaggaagataagagttgggtagcagaaggctgaggcaaatccaataggataataaccatcctgggtggtactgaaagctgaagactgagctgatttgttgcatttattatctcattcgtgtccgtataacagccctgtgagctaggtgtcattggtcttatctgaccaatgtcaaatgtgaatgggtggggtgcaagttcacagagttagcaagtggcaaaggcaggctttgagcccaggtctgtctaagttcacagcccattgtgctcaacttggagtccctccaggctgtctagtaagggatttaagtaagcagcttcacttgaattcagttattagtataactgaatggtaatggcaccagtcactgggagtgagaggtcagggccaaagaagggacccctctctacttcctaggctgacctgtggtttactaggagggactcaggtgcaactaggactccagtaaagaaggtgattaaagtttgatctgggcatctgaagaaggcagaaatctttcctcctccaccatctgtgtgagaaaagggtttccagcactggctcttgattgggcaccggcctcatgtgccgagttgggaggtgcaaaggggacccctgcctccaggggggctgtgggtcgcactgtggatagtgtgaggcattagtgcatctggactcagtgattcacacactgcctccgtttaactgagctctcccatgagccagcttatgacatcggcaaagcgggatgtttaggtaaggccagagtgggtcaggtattgagat

SEQ ID NO: 57473 - DNA, 1543 bp, Homo sapiens
aataaaaaataaaaattagctaggcatgatggtgcgtgccttagtcccagctactcaggaggctgagttgggaggatcgcttgagcccaggaggtcaaggttgcagtgatcatgccactgtactccagcctgggcaaccagagtgagacattatctggaacaaagcaaaataaaaaaaccccacctcattcagaaatccatgtacaatagtttgagttggctgtttaagatcttctttaagtagaaattgtttcaatatgtgaacggaaagttaattttcctctaatactcattgtatcatgcaatattatgacaacaaaaaagaaaaactaaagaaattgagcatgctcttgtctgctttcctggtggttttaatcaatttgtgacaatgttttcattagactgaactctgtaccaagatgacatagcagaaaatctcggtaaggatggaccccaaaactctcccttctattttctaggggaaggaaaagaaaagattcctcttccaaaagaatgattagtgatgagaaatgactacagaatagagacttagcattttaaaaactgaggacaggacaactatcttaggacagcggttgccctaacagggcgtcttaggaaagcggaggtctgagaggaagagctgagggggaatctgacctatttgatgtgacacgtggctttcaggagggcagtttttactagaagccaaaaaaggttggtttgggcccatcaagaatggactttgatattccatagaccaagagggctaaattcaacagttgaccttagaccgcagggtaaacgtgatgaggtaaccagaggaactctaattgaagggcctgaagaattgaagggaattacaacagggagtccctgggaggattatatggtcaaccaagcagcataaagtcactgtgtcactcctgaactgtatgcctcatagccacctcctcacccttcctgtcattgcaggagcaatggagttgacagtgtgccctgggtgagagtgtttccgtgagaggaggattcttctagagataaaaaggcattggaggaatattaagatttagaaacatggtctgtgaaagggatattgttcttctttttttatacttggggcaatagcaaaaaattaacctggaatctgacaagtaacagaaaaaggaagttcatccctctcggagaatcaccagtctatttgggttctgcccttgctgatgggctgaggtattggtgaagaatttccctctttgctgccaccttgtacggcatgacgggaatgggctttgcatcgttgactgtgctgcaaggtcatttctctgggtgaatggcagggagaagacctaaatgaatcatgatcagagacttcagagctgggaagagcttgtcatcaggtcctagaggggctagaaagtcattcattgtgtttaaagggtatccatcgtagtaccttgcaagttacttgggaacatatgtccgcttcatctgaaactcaggaaaagagttagctttttgaagaaggtgaattgtcacttttctt

SEQ ID NO: 57474 - DNA, 1411 bp, Homo sapiens
aatgggaattagaaggtcagaggagtcatctgagtttcctgggaactcctccgattattaaaataagaagagggctgggcacggtggctcatgcctgtaatcccagcactttgggagaccgaggtgggcgaatcacttgaagtcaggagttcgagaccagccttgccaacatggtgaaatgccatctctaccaaaggtacaaaaattagctgggcatagtggcaggcgcctgtaatcccagctactcgggaggctgaggcaggagaatctcttgaacctgggaggtggaggctgcagtcagctgagattgtgccactgcatccagcctgggtgatagaatgagactctgtctcaaaaaaaaaaaaaaaaaaaaagtttaaaaaaagttaaaaaaaaacaactcatcacttgggaatgttttaactctgctggtcttctgaagttcaggcctgtgtgtgctgggtcatgtaaagttgtttaaacaagtctggaacagtcaattgtgcaataacaccatgatactgttctattacaaatacttataatgcttaatccaagttctgtgtccttttctgatttttagagatcttaaagaatacaagtgatttaacaatattgttagtgattcagcttggaaacaaaaatttcatagcactcctctcctaaggaatatttagagactggaagatgagctgttaaaaaagctgttataggctgggtgcagtggctcttgcctgtaatcccagcactttggaggccgaggcaggcggatcacttgaggtcaggagttcgagactagcctggccaacatggcaaaactccgtctttactgaaaatacaaaaaatttagctgggcagtggtgacagatgcctgtaattccagctactcaggtggctgaggcacaagaatcagttgaaccctgaggcagaggttgcagatagccaagactgcactactacactccagtgtgagtcacagagtgagagtctgtcttgaaaaaaaaaaaaaaagctgttatatttacaactatgcatgtgggaaaatcagcattttctttatattgtacaatcaaaacaaaacacagatatttattgttatccataaccctaattgtaaatgtgtgcataaacttaactgttcttgttgccttcctgagtaaatattttaaatatgaccttccttacaaaatatttttatataaattaaatacaacttttgactcattttgcacactggcatttctcataaaactttatttggaaaaagttatattcaatgacccaatggtatcaaagtggaagaggaaagtgacaactagagattgataactatatcctctgcaatcctcagaagaaagaaaggggccctttgggttgtttcaggtaaagtacatcaatgggactacaggaa

SEQ ID NO: 57475 - DNA, 3941 bp, Homo sapiens
ggggactccagctggcccagcaagccctggctcaaccccttcccctctgctacaccactctggctcaccctggcaggaatgcctgtcttcctgaagctcatagcctggacggcaggaacagaagtagcctccaacgtagttgtgacacaggtgctggcactggggctggggatcctcctcccctgatttgctccgggaagcacattcatcaaggtctggaaggcattcaggaaggagggttaagcttctgctgggagacctgagtagtggctctgatcttagggaggtcactcaccagagacctaaagacaaaggcatctttaggccacctggacctccaggcctctccaatgctctctggggactgctccatggggacagagcccaggttgacaggcctcgttaggaaaagctctctcgaggggaggaacaaggaaagccaggctttcggcttctttgcattcaagattccctttcttggccccccattcaatatggctgaggtcagagaaaagggatccctggggggctactcacccacagcttggtagtaggccaggaagcccttgtagaacatgatggtcccattctcctcgttggagaagtctgtgtggaaggtcagcagcatcttgttcccttgggacataaattccttctttcccggggggttgcccagtggagaacccagttgcccacagaacctccccaggcttttcttatcagcagagatctggtggaagaaggacagggggtaggaagaagatctgttgcggagtggcgcacgtggtggctcagtgatggtcctccttgtctcgcccagagtgcatcatgcaccacaatggctctggctggtcactacctgctgggctcagctgctgcaaacttccccatgtgactttcagctgttccctgagtctcccactgactcactctttgcgtgttgtcctggactgggtacctcaccctttccctgttttctgctcctctggcaggtttcaggtccttctccatccccaccacctcctatggcctgttcccctggggtcctggttgtctgtacccagcctttacctgcccctcattcccagagctcagacagctccgctttattttctgtcttcagattccacctcagcctaatcaaaccattcacacctcgagtgcctcctgatgccctcggcggaacatgagccctgaagcccacccatctcagtgtcagcaggcactgcctcgtccctcttccttcctcctcacagcctcctcaacctctccttgactctgccagcaaacgccctcccccaacactgcacactcgccaagtcttctgagccggtaagacgtgccattgtcatgtaattcacgcataatctccaggggtctcctgggaatggtagttgttggaccttcgcaggctctgcttgagccctgaatctcatttttactggatagagaaagacaggcctgggaaggtacccttggttgccacagaggtgagggttctgagcacactgtccttgctgaaggctattcctgtgctgccagagcccacatttctcctcctcatgtccctgtgttcctgttgaagcaggcagccatgtcaatcatttccttggagacagggaagctgaggcacagtggtttcccaaagactctcagctagacagcagatggggaaggttttcctgactcagtggatgttgaatttcctgagtgggtcctgtccccttccttctctgtgcttctcccctcagtgctcaccgagggcctctacaccagtgagcgcccatccagggcatccccgggctctcagagaggccgttggccatcagctcttgtggggctgggctgtgtctgggggtgtgcatgccatacagatcccagatcccagagggcccagttttgtctcccctctgcccgcccatcctgcccctaccttgacataatcatagaagcagccttcagaaggctccaggtcaaactgctggaagacgagcttcaccctgtatcccgtggggactgtgatcacagtggttgtttcaaagttgttggggtaaggcttggggaacagaggggaagtcacctccccaaataacttctgagggatgggaatggagcctcctgccctgcagaacagggccggcaccaggaggtacaagagccacctgccaaaacaaaagagagtatctggagctggaggggttcagcactcttgccatgtgggcagtggctgtggcaggggatgagacggccataccactgggcattctcctctctgcccaccctgaacctcacagacatgttctcagcaggggtgcgtgggtggggaggatggcctgtgcagctgctgcatcgggtcactctccagggcagtgtccagtccagaggccaccacactcccctcacactccctttccagcctcctcccctgcccggacgcgtccctcccctccccttccaggaataggactggcttgggaccagttaatggagggtgagggtttccacccgtgggtctctgaaagggctcccacaggttcagcaagagcgtctgggagaaaccatctgtggagtgggggacacaggcacagagtgtcccgtcctgggcaaggggtcccctcctctcgctgctccctgccaagagcccagagggaagaaaggaccatggcatgagcatctatgtatgaagtctcctctgatccctaggaggagggatggggcgtgtgttgtgtgtgtccacgcgtgtgcacagtggaactgatgaggtgtgtgaagagagaagggtgttcctgtctccctgaattgcctcccatgccctggcttctcccctggcttctccctcccacctggttgcccatcacccttactcacatttctcaaggcccgtgttgaatcctgggctctcccgacagcgtcttcgtgcactgtgtgcagagggagcccgcgtcatgcacagcagggaggggagggttttctgtggagtggaggggggaccattcccggaggaatgttggagggaatgaactatttgcataaacaaaagatctgagtttccactttaatttagttttggttttgaaatccctgtttgtggtgccacctgctggtcggtgagggaaagggctaaggagacgggagtctggctttttagggcccggggagccttgggttggaggcccagatgtctcagtctctaaatctgatcagcttctcccttcttccaagactttcctgggggctgctgctgtgtttacaaggttcctaccaaagcagtgggagaccacaggtggtggtgaattctcttttctgggctgtcctttcccattgaccctgttcttcctgccctcattcagcccacagccctggtccaagaatggcccgggtttcaatgcccaggacgtaatgataggaacactggggcagaggagggtgtgtgggagcgggcagaggagagaggagcttggttgccttggggccctggcctgctttagccatgaatgacacttggacatagaatagggttggccatgtcagggcaaccctaaatcagccctgggtttgagaccctctggggcggctgcggagggggtaaaatgtccccatctccttagcatctgctcaacacaactgccagggctgaagctaaggatgcgggtgtggagcaagagggactcggtttttctgagatgaagccaggcccctgggagggaggagggaccctagtctctcctgtccatcaggccatagtgtcctgctttaaaacttttgctcttggccacgtgtggtggctcatgcctgtgatgccagcacttttcgaggccagggtgggaagatctcttgagcccaggagttcgaaaccagcctgggcaacatagtgagatctcgtctctaaaagttaaaataaattaaaaaacaatttcattgtttttggaaggctttcttca

SEQ ID NO: 57476 - DNA, 1956 bp, Homo sapiens
gctatgttgcttaggctggccttgaaccctgggctccagccctctgatcctccagcctcagtctcctgactatactgctgggactgcaagcttgcatcactccatcaagtactgtttttaaaatgtccttattctgaataaggctttggcgttagaagttttgtaatagctcttccaaggtaagtgtgaacggtgacttaatcttttgttattatttgtgtccagcttcctcacctgatagagcaggcactcaacaaatacatgatgacatatttttaacaaccaatatgtgcgtccctgcccctggctccatagatttgcaagatttgtgtgtccattcataagccttccaaacgcagggcctgcttgctgccctctttgctctgtggggcccagatggcagccccggaggcgctggtgggaggctgtgtcctggggtccaccactgctccccggtaagccaagcccgactgcccctacatggaaaattcatccctcctccagatgggggattcagggcaccgccacttcccacaaccccgggaatctccctggccacagtcctggcgggaccccccccatccccagctcactgtgacagagtcccctgcacagtcctgggacggctccaggtcgaagtcctggaagacgagcctcacagcaaagccctctggagccttgatgtccgtgctgctctcttggcctttgccatacggctctgggtacccgggggatgtcagctgctggggtagctcttgggccaagaggacggagccccgggttgggcaagcctggaggactccccagagaagcagccaccacctgtgagttggggggagggcaaggtggggccgcgcagctatggccggaagcctgtgggtgtgggaggagcgggggagccgcgctaggactcagaggcctcgcgaggcagggctagaagctgtggcctcacccttgaggcccgggcacttcccgtctcctcccttgctccccttcctcaccccaatccctacagcctcccgcgcagcctgagctctaggattgtgggttttccatcctccgaagacatcacctttgctcatctcccaggagagtctcgtccaaaggaggggggtgctttctgcttcagcagatcccaccccaccctgggatccgagggagcaatggtggggcgagtgagggtctgccgtaaatatcccccgaccaccctctgggaaggtgctagaggccacaggcaaatttcagtctccccatggaatatctgctgtgctgctgctgctgctgctgctggtgtgtgtatgtgggggaggtgtgtgtgtgtgtgtgtgtgtgggggggggggggatgtgtgtgtggggggggtagggtggggggagggagggtttgcggccacccaccctttctcttcccctcccgtcctcttccctcctcctctgccggggccacactcacattgcgcctggacagcctttggagtgagggcttctccagagatatttcccccacactctgggtccaggcatctggaactggacatctgggacctgcgagagaactggcccaggatagggaacaaaaggtgaaggccggtgggggaggaggaagttcctggaaatgttaagcaactccacagttccccttctccaattctccgggctgagcgccacctgccgtctgactcaggaacagcgggcccgccgcagcttaggggagaaacgtccaaaaacctcgctggccctcagaggtcagggtggcagggcactgactcgacccttttgtactatttaacattaatttttgccatgtgtgtaggatggctccttgtgagttatggctgctgccttcaatcagccatgtctcttcctccccgacctttccgttcacgacatacccggggagcctccctcttgtagaattgaagtttgtgatccttgaacttgagctttctcttccttt

SEQ ID NO: 57477 - DNA, 2359 bp, Homo sapiens
cccctgatgcttgtgctcccttaggggatctccaggcctttgggtgtggtctggcccctggagaagtgtggtcgagtggaggatggggtcctgcagtggccatgttctggacgcccacatcacggggagttttgagggattgagcccactttagcttgggtcttaaaaccaccatggtaagaagtgtcaacctttgggggaaaaataaaaatatatagaaatatttagaaaaacccaccatgggggcctacaagttcctgagtcaaggcctctgccgagactccactgaccagcatggtcactgaagggcatggaggaccgtcctgtgggaagaggcttggacatgcactgtgaactcaagagcaaggacactgtgttgatctggagatgtgggcaatgggcgagtacacacggagcatcctcctgtgccttggaatgggacaaggtggattccagcagccctcagagcttctgctgggtggctttgcaaagaaggggctttccactctactgtggacatctgcagagattgggcagggaataagattttccattcaaccctgagttccttttttttttctattccaaattcattccagagcatgtggtaggatcagtatcacaagcccctagttcttggccagagccctagtgactgtcttgtgtgcatgggggggccagccgttgcaggaagatgggtcaagagtcttcatctgatgagggccagggactttccaactccctcaacccttcccccaggctcttttcccaccctcacattgagccctcttcactctgatagttgggccccctaggacttttattctgaaagagccaaggcccctggaggtggagaggaggccagaggctggagctggccttgaccctgagccagctccacccttctgggctgttttccaaggcagcaactctgggacccttgctgtcctcagctctcctctttatctctggtctccagccttgctggcctttgagcagagggtccctatagccaggactgctgggcttctccctcctatgccttcacacccctgtattactgtcttttattccttgacctcacatcctccgtctacttcctttttcagctttttctggctttcttgctgcttgcccttcccaaagcagacacggaggacaggtcaccatttagaagctccccgcctccccaagcactggacaaaggtcttaccccattccatccctcattcccaacacataggatggaagtatcaaatggccagatgccttcagatgtcagaaccgtggagtccgttgaaccctgtgtgtggggggctgtgtcttgggcctggttttgttgagcacatgagactttctcaaggataaggacaaagaaatggacaaaaagactctgccagtagcccctgtttaaactcttgaaccccagtcacagttttccagaagtccatcaggatagaattttcactaatcgccaaatgcccaaagcttagttctttcttagaaggaaaagaagaggtcaaatggacaggagagagcggagattggttgttctcaggggctccttccctttgcctgcttctttcatttgggacgccagaccttgacctggaagtgaggtcactattgggcagtggagtgtgagaaaggactttggcctgggggctgcaagttacagattaacacggggaggggtgaggagggacccagagggaggaaaggtggccagaggaagggacagctgacctggcacaatctgggcttgaagggggcacaacaagagcgtctgtgagctggtgctgtctggagggatcttggctcctctccggctatctgaccttcctgaagacctgctcgcacactgcatcccttgcagtcagttcctggggagagaggggaagtgagggggagagagaaagagggcgtttgccagccagagcccctttctcaaggtccttgacctccatttactccttccggatacagcagcttgagtgtttgatgtatgggcaattgtatcattattccacatcctcaactttccacccctcaggaaggaaggtggctgggtcaggggatgtgagtggctgaagcctccatctcgccagtgatgatttatgggcattcatccgactcgtagccagggcccaccttggccactctgtttcttcctctccccactcctcccagtgcttttgctttccctccctggtcaattccttggatagggattggggctgggctgggggaagagtggtggacctatctggtttggacaaggggatgccttatagctggaggcccttctcccagacacccagcccccaccccatttaccagatacagcatctctccctcc

SEQ ID NO: 57478 - DNA, 4153 bp, Homo sapiens
atagttgctatactgtattgttttttatttgtatcattttgtattgttattttttatttttatttttcccaaatatttttccatttgcagtttgctgaagctgtggatgcagaacccatgaatatggagggccaactgtattttgtaggcagttgaaaacattgccctggagctcaggagatggctctggctggagaattcatgccaagggcagcctatagatggaagcagaaggcatgggtgtagatgatttagcctatggatagtgggcagacaaaagggagaagacattaagaacaaaactctgcggagaaaactccagtttaaaggattaataggaggactaggatctgcaaaggaggctaagaaggaatatgtaagaagtagaaagaaatgcaggagagtgaagttattgatgctaaagtaaaagggactctgggtgaccaacagtgtcacaggctggagggtgggcaaatgtttgctcttcggtctgggttggcctgttctttgccctttgggctggtgataagagggggcagggaagaagtgggagagagacagggagcaccaggacctgttagttctggagactggtatcctggggactgcattccctgctgtggtgaccattcccctcctccccgctgctctggctggggaaggtcactttgttttgccccatgttgttaggagtctcctgtgatgcctccttccggccaccgcccagccaggggaaatgtacctggcattttcgtccgtccacgctcctgaggtcctcctcaaactccactcccacatcaaactgcacagtgtagtttcggaaggtgctgagcgtcctcaccgtcatgtggttgccctggtgttcgatctccttgtccggcttcagcagcagcgcgatcttccgcacagccaagctgatgtctgtgggggctgcctgttagtaggggtgctgctagccagccaggagctcctctgcctgcagcagcccctcagggctgtgagtttcccttctttgggtctgggactgtggattcaccccctcctaccaatgcctggttagaaatggatcccaggtctggtgccagccgcctgagcctttccacagtgtccaaccccgggcattccctcttctccatgggaccaagaagcaggaaggaagaggggagaaagggagtgacaggggtctgggagggcgaggccattacttagggcttgcaggtagtcctccatgttcttctgcgagacaaagcggtagtagccagtgaggttgggaggcattgtgtggatgaaggtttcaggagaatgcaggagacagggtgaggaaggagggggtgttgtctggcaggtgaggctgagagattccagccagctccacacacagagacaggatgtgtaatggccgggttaccagggctttttataaggctggggccctgttgcaataagagtccctaccagacttcttccctccccgcatggtgagtttgggggtggtgtctccagcctgaaggaggggcagggatttggcaaagttgcgcctgaccttggcttttcctgaggaaggaacctggagcaggatccttcctgaggaaggaacctggagcaggatctggggctgtcagtcatccaaaactcagccatccaaaggtcagtgttggcctccacctcatttctggcaggcttgggaaccgtcccagggcctgaggggcagtctttcctgggagacacctgaggctggtctggctgtgtgaggtggagatgagttccaacaatatcctgagatcctgggactgagtgatgttggaagatgtgaggggagggggtgaggatggccagctgccaccatgaagagcaccctgtaggcctggctctcagagctccctcaggtagtgtgctcaactgggaccccaaagtggcattccagactcttggtcctaaagagccattaggagggaggtggagcccgaggggtgctgagttcaaagtccggaacagacagcctgagaggagtttgttggctattctggagaattttattctttttggcttgggacccagggggttttctctccctctgagtcatcgatgagaccgtaacccccagtccccagccctaggacagcccatgctttccagatgtatttctgtgaaggtggggtggaggcgcctaaataatattgtgccccgcccccagctgcccaattctctctcgaacctgccatcgtcccgggcttcagaatccactgggcttggttcatcatggtttaaggtgaaattcggggcgaaggaggcaggacaggtaggcaggaggaggcggccggtcccgacaggtgcgtgcgcgaggggtgcacgacgtcctgcccctccttgggtcccagagcctcgataccgccctgcggaccgccctgtggcttcctcgcagccctgggctacaaatgccaggatttctcaggctcagactgagggttttacttcacccttcccagagggcacgcagcacggatctgtggatggaaggggctgtggaaacaggttatggcagagttggggggcggggtgacgcggtgccacccctcctggccgccctcaggtcccgctgacgtctctcttccccaccccctggcttctggcttctttctccccacgtccctcttctttcccaccccctccgtggctctccagcttcctccccagcccccgcagttcctcggctcccccaaaattgcagccaggggaaggagccttgaaactctccagccccgacgccccagtctcattggctccctcccccgctgcagcacctggtccccccccctcccagtcacctgattggccggcggccccatcaatcgttgcccggctgtgctgacgtcatcctgcagtagcggggttggggtgggagtgagagagtgaggacgctgggctgggggaaacgggaagccgctgcaagtccaccgcctcagctacccagattgggatctgcccaggcccgctttatggactagtgtgggcggcaggctcctttccgtccctgccctgctgtaccccgctccttggagaccccctgtatccctcccgcaaggtggaatccgcaggctggaggctcccaggggaggcaaacgcctggccctgccctgccccacgccgcaccatgaccctcctgctgctgccccttctgctggcctctctgctcgcgtcctgctcctgtaacaaaggtgagtgaggtgggggtgggggtaccgaaagaggggcgtcgggcagcgccgtgcggggtgggggtgggaaggaggtgtcgaggctccctggcacctgacaggtgtctggccctcttctgatcaccctccttcccatccgttctcagacctgctccgtctcctctctttctcttcccccagctacatcttcctttctggtccatctctacccatgcgtttctcttgctggtcatcttgctcccatttggtctccattcccgtcctggggtctctattctccccttcccctaatttctacacgctggtggctacctcgggtctgggaaggactgcccccgagccggtgataggcctctccccgcggctctccctttcactggcgcatgctaagggtgtgtggcagatccatctgcttcgcctccatcccatcctggggagaaagtatttgctgcagttcagcaattcggagcacgtatgttttttgcgtgtgcctctgcattcagacccttttgcctgcatcagctgggctgtgggttaccagagctgccctctctggcagacagcggatacattcagctgggcggggctgtcggacagacggagagggaggacgggagggagggcttgcgggcagagggctcaggtaggtggaaacggatggagactggcaggaaagggcagaagtgggtgtgtggggggcgctaaatgagtatgagagggaaagctgagaaggagaagaccggagatgaggcgtgggagggggtaaggaggggatggaaaagggtaaaggtggaggcagaaaaaagagggaggaatgaggaaaatcaggaaaagagtgagtcaaggaggagcccgggagcctaggagtgaaagggagcaaacgcagagaccgcagggggccaggaggagaggagacagaggctcagagacctgggaag

SEQ ID NO: 57479 - DNA, 418 bp, Homo sapiens
tgatttataggatagatcagtccctatccccaaggagagaattggtactattacatgtaaaattatgtgctacgtatgcagtcacaagaatatttctaaaaaatatatgcaaatatgcaaagcgttacattcagatggagtgctgcccttcaaagctgcccttcaaagcaacctggccgtggtcccaaaggttcccggtcatggtcctttacgaatggtgcaattttattttcaacttttgagttgcgtaattgtagaaaaaccagaaaatatcaaatatttcttttaaagaagaaaaatcaggccaggcacagtggctcatgcctgtaatcccaacacactaggctgagtcaggaggctcacttgagtccaggagtttgagaccagcctgggcaacacagtgagactctgtctttac

SEQ ID NO: 57480 - DNA, 2112 bp, Homo sapiens
tgaaagagggcgaaaaggcaaggaaaaggagaaatgttgcacagtcttatggtctgtcccctgccattctgttcccctgaggtgtcagagcagcttctctgtcttcccagggatgagtttacacagacattccctgtggccccctgaggcctccacctctgaaatctgcagaacagccaggaaacaagcccggcccatggcgccacctgctgcctgcctgcctccgctcatgcaccctgggctgggatggtacttctgttcgtctggcattattgcccttggtcatttaccggcagccctgggcccctccttgctcttctccatgacactaggactcccttggtcttgaagctgggtgagattatcagggtttgtttctcaatgactttgaggtttgacagcagagcacactctttggcagatgagggggcttgaggcttagtcttattccgtgattaaaagcatttcttgtatgtttgtcctttcccagcctggagtgatgggaataaggccactatgttgacttagcggaaggaagggctgactcactgttcaccttccctgtacgttaccagctcgaggtctcaggatgcgttggaccctattttggtctccggaatttgtcatcatgcagtgctattttccccattatgcagaggtggagagggattaaggcgggggcgggcccctgtctccatggagacagtgacgctaccccgctaggggttatttggaagcggggcaggcctaggaggctgaagaaggcttcggactggactccccagcccctggtgttagggcttttctctttcttgggcttgggaacattagccagccccattttagaggggaaaactgaggctcagaaagggcactgaatccccttaggtcacaatgcgcccaagggaagaggcaggatcgactgagcctaggatctcgcgtcttcggctttcccccagagcctgggaagcccttcttagctccactcttctttgagctttccgtcaaacaaatcctagggcccgtggccttttcgagcgctcctaaaggcgactctccaagacccgctctctaaggtgctcttcccctttaagactcacggctcttcccgtcaggctgcgtcgcagtcttaaggccccgccttttcagacagcttccgctgggcctgggccgctgcggggcggtcacggcccctttaagcctgagccccgccccctggctccccgccccctcttctcccctcccccaagccagcacctggtgccccggcgggtcgtgcggcgcggcgctccgcggtgagcgcctgaccccgagggggcccggggccgcgtccctgggccctccccacccttgcggtggcctcgcgggtcccaggggcggggctggagcggcagcagggccggggagatgggcggtggggagcgcgggagggaccgggccgagccgggggaagggctccggtgacttaaggggagggaatgctcctctgccgtgctcaccgcgtgctggggctgcgcggggctaggtatggtcgggctgttttcccactgtcccttcttcgggcagtgtcgccgtccagcctggttgttgaagcgtccccgtggtcccccggggtccaggcccctttgtggaggcagctgctggcccccagcccatgggaccgtagtcgcggaggcctctgcagaggcgcaggctggaagcggtggcctttgaggggggcggcaggagagagtaccgacctccctcgaactcctggcagaggtgggggtcgcagcaaaagcactggggtggagggcggccagtgtggggcagacgcctgtgtgccttcctcagatacgggcagagttgtggatgtgagaagggtctggcttgggtacctcagttccaaacctcctgtgtccatcagagagctggcggtcaccatggcaatgcgggagctggtggaggccgaatgcgggggtgccaacccgctcatgaagctcgccgggcacttcacccaggacaaggcccttcggcaggagggattgaggcctggcccctggccccccggagccccggcctctgaggcagtgagtgttcttgaggtggaaagcccaggtgcagcctctgagg

SEQ ID NO: 57481 - DNA, 768 bp, Homo sapiens
gttgtgtgtgtgcaagtgtgtgcacgtgtgtgtagaggagggtgaaaaggtagcagcacagacctgagcagatgacccctgcgtcctccttgtgcctgcagtcgtgctgcccccagccgcgggaagggcactgccacaagtgggactccattcctgtgcagttcaggtcatccagccagatgggccctgacccctccccaaagtgagcagagaccgtggcattgaaggccactccacagcccagcttttgacacaccacgtgggcatcgctcaggtcccagccgtcatcacagatggtgccccagaagccgtcgtgatagatctctactctcccggcacagcggctgtccccatccactaggcggagccgtttgtcctcttagaggagaaagtccagttaataggtcacattctttagagttgcagtgtttcctaaaactgattctgcttacctaagcagatcaaagcactgccctctggaactgcagacaaatatgggtcagatacatttgcgaggcatggaaacagtggctgggtcaggcttcctggtggagggtgcaggaaatggggcaaaagtaagaccaaaatacatggaaaaggttgaagagttctgtaacaacatggaatctgcaattgtgataaggacttttcaaaccctgtcgtctattgaaatcatttttattaatgatgtctactcgtaaatcccaaacacagaggtgttaacttccccttaggaatggtcctagttatcattatttcttacatgtt

SEQ ID NO: 57482 - DNA, 451 bp, Homo sapiens
gggacactattaaagtcataatagaaacccctaccttccagcagatgattcctgagggtaggtcttaccttgccttcctactctagttagactcttaccataacagttcacaccaacatcttctccatgataacagttatggcttccccattcccggtgttgacattcccagagagctgactcatttccataacaggaaacatcatcaagccaaatttttccatgtctagtcacggcttgtccaaaacgaaacatggcgaaagaaaatggacatccaagctgtttgcacacgacagttgaggcagtagtgttccacccatcatcacacacagtcccccactgtccctggaatttcacctccactgtcccagagcagggaccgtctccattgaccagcctcaactccaaatctgttccatctgcaagaaagacagaaacatacattagagat

SEQ ID NO: 57483 - DNA, 2458 bp, Homo sapiens
ttcatgatttctattatacacatctgaatagaatcctgaataatttagaacatgttaccataagtaaggtattctagtaatgcaacctaaaatatgggtgtggttgaatggagttgatgggcagaatgcattaatgactcaggtgtgagaggctaaaaacctaaggagtcttacacatggtaaaatatttgggtaagcctcactttgaaaagaaaaccgtgtgctcactgatgcttaaaaaatgcagaatttattgggcaaagtacaagaaacaaaactacaaaaaatcagaatatttgcatgacgtggattctccttgccacttttagcatttacaagaaagatgaattcagactacaagcagtcagaatgcaagcagaaatgggaggagaaatatcaattttataagggggtatggtctgcctgcaggtgttgtatattgttaatcaagagtcctataatttggaattgaagaattgaagaaaaaactctaagtatcctgtccccccaaattgaggtggtggtaaaactgtagccttgtcagaagataaaattgatactccagatacaaaggcaatgagtctaccggcaaagacggaatttaggtcttgtccttcctcccaaacccacagtttcaaacggccttaaggcagtggtcaataattaaagagaagggctggtcacagcatagatcaaagtatatttatatgctcttggactatagttactttcagatggcattgggttataaagcaagtagactagaagcttagtaaccttggaaagaacttttttgttgaatttgagggcagctgacatcagcccttgattagtcaatctttaatccaaaggtccctaaaccaatattagcagaaagtgggttgtgaaaggtgtgctgtccttagatagagatactctccaaaccaaacttggatgtaactgtgaagaataatgtgccaggaagaactgccctgagagcaacactggggcccatgaaggacagcggacagaagacaccttctcagaggccagcacttcgtctaccagattggctttccaaggaactcactgagctgcggggtggcttatccttcctgtccggtaggatttgatacttactgcagcaaatctattctggatgtttcttggtgacaacagagacaccaaaacagccttaaactgcttatctatttgactaattttaaatgagaaaaagtgaacactgtctttcttcagtcactattatttgtttctcttttagatacagcagaacttaatgctaatcaatgtaaaatacaattaataagaaaatatacaaaccattataaatttagaaggaaaatctataacctaaaatatttatattagtaaatcagaagaaataaaacttaagattcaactcaagaagttgggggccaaaaagaaatcaaactttaggaaatctgaagagaattattagaaagaaaagtaaattttaatgaattagaaaggaaataaaagtaacattaattttttaaaatccaaataatggttttttaaaaaaaaatttaggtaaaagaatggctaaccttgtcaggtaaaaaattaaaagaataaatgaatacacacggtaataaattataagaaatgttatagatatggaagtaatttcagacagctctttaaatactgatgtgaaatttgatcaagaaattttactaagtgaatacttcaggtacaaaacaatttatacaacatgccaccatttggataatgaaagcaaatgatagctatatatagatttgtttgtattttcttgtatttacatgaaatatctcaaataatatataaatattccaaccacataagttgtctgtgaggaaaagaattggatagtagtgggggaagagtttacacttttttattttgaagtttaaaccatgtgattatattgcctggtccagaatattttttaaaaagtaatatagaaattcaaatttatatcttaaatgattgccttttttcaatcggaggataatttctacttaactagaggtaagcaccatttgtaacatcagggaaatgcccctcactgcatgcctaggttgggaggtatctggagccatattgttggttagaggacatgcagcacgtacaagtttccattctgtgaggtctctacatgtttaatggttttcttgtacactgtgttttctaaagcctttttgttgcatgagtaaaagttacatttactttagagttatttaaaaagcatcacttttcaacaaagttaacatttgtataaatataattagcataaaatactaaagattatccacaaacctaaccagtttacaactcatttttgagctttttaaagaggttgcagtgaaatattcacaggttttccaaaaaaaaagaaaattctttcacagtacaatagagggagctgaaggttatgtcagtttatctaacatgg

SEQ ID NO: 57484 - DNA, 932 bp, Homo sapiens
tggaaattaaatataggttaaggagatgcaattaagtatgggtgccaagttgacaaggggtggatttatagacataattttaggtgtcaacttgattggattaaggattctagacacttgataaagcattatttttcatgtctgtaagagtgcttccagacacatccaaaataatggataagattagtgtgtgagtctgagtggactaggtggggaagatcttccctcagcgctggcctgcatcagggatccagagagaacaaatacagaaggaaaattggtctctctttgagagctgggccagacttttcttgtgctactttggacagcagaactgcaggctcactggcctttcgacttcagcacttacatctggagtggctccagaatgctaagacttttggtctcagactgagagttacaccatgggctcccctggtgctcaggcctttggacttgggctgagtcatgctacagtcatcccatggtcttcagcttacagaaagcctatcatgggacttttcagccaccaaaattatgcaagccaattcccctaataaattctctctcaatgtctatatatatatatgtcttactggatccgcctctctgaaggaccctgactaatacagatttggtattggggaagccaaattgattccttcttacggtattttatgacacagtgaaagagactgtgaaattttactcttgtaaaatgttgtgattaagtgtgcaagtctagataatggcaaaagataaagtttaaaagctaattgttattggtgctgtaaaaacagaaaataggttaatttcaatagcagtgttggacagtatattcttacaaatcttataccgtgtgattctatttatatagaattctggaaagtgaaaattaatcgactgtgactagatgcagtggttgcttagag

SEQ ID NO: 57485 - DNA, 622 bp, Homo sapiens
aattcaagactattattcaggaggcagcaaaggtgacacagggagaaaaagcaggcaccatggcaaccagtcaacttgtgcatgagccaaggtaggaaaattggactgtaagtactgccttggtggttgggcatttttggaggtcatgtgtgcgtgactgagacacatcccagatatgaagcaagtgcagagtcccaatccaccattctgttctcccatgaagcaattctctaggtgtgcaagaaacctccagcagggggagttgagtacataggaaaaaaaactcaaacacagagacttaccgaaaatgggaaacagaaattctgggcggagggaacaaaggaaagcggaagccaaagtgacttcctctaatattcccccagatagctccttggggagaattctgcagttttggagagacaaccctccaaccagggacaagaaaaagcaaaagatgataaagtatttctgttttatctggatcaaagactttttatttttatttttatttatttatttatttttattgatcattcttgggtgtttctcacagagggggatttggcagggtcataggacaatagtggagggaaggtcagcagataaacaagtgaacaaaggt

SEQ ID NO: 57486 - DNA, 1246 bp, Homo sapiens
cctagtccaacaaatctgaagtcagacaggttcctaaacctcaactttattcaaattgctttccttggcaaagaacatagtaagttggccttccagccaccaacccccttccctttggtctttcactccggaggctcttaccctagacgcaatgggacagggagcgggggatgggggaattcagctcaggcttttatgcaaagtcccccttcagcaaagaacaaagcttctggtacctgccctttggacagctgcgggcaagctcagcctcggtgagtcttggtggccttgacagcccccacttaacacactgtgctgattaagagagacaggagggcaagtttttcccttttttaaagaaatcatcctcgacatggactacctgccttgaagcatgatctatctagttccacttacctcctccccgacgcccccattctgactcttctccagagtggaggtctgagaagaaaaaaagaaatgccgcatttcatctccttgtttcacacccaggagtacttctactctcaacagttggagtctttgcattgtgaacaaaagtcaggttgtgtgggagcaaagccagctgctcccagtgcagacccaggagcagagtgcagaggagaatgagtcagagttgtgtcttcaaaaattacgtaattgcgatttgctaagagtttactttctgtttgggaaattggaaaagagaaagaaatcttacttttatttcttttttttttgtttttttcgagacagggtctcactgtcacccagactggagtgcagtggcacaatctcggctcactgcaacctctgcctcctgggttcaagcgactttcctgcctcagccccgccgagtagctgggattacaggcgtgtgccactacagcccggttaatttttttgtatattttagtagagacggggtttcaccatgttggccaggctgatctcgaactcctgacctcagagttattcgcccacctcggcctcccaaagtgctgggattataggcgtgaaccttcgcacctggccaggtttcttgaatgttaggtttgggaatagaaaggaaaatggaaaactttagactttttttttttttttttttgagatggagtctcactctgtcccccaggctagagtgcagtggcatgatctcagctcactgcaacctctgcctcccgggttcaagcaatcttcctgcctcagcctcctgagtagctgggactacaggtccgtgctacca

SEQ ID NO: 57487 - DNA, 562 bp, Homo sapiens
agctgggatcacaggctaatttttttttttttttctattttttgtagagacaggctctcactatgttgcctaggttggtctccaactcctggactcaagggatcctcccatcttggcctgcaaaagtgctggaattgcaggtgtgagccccaccaggcctgcaatcatacttagccctcaagctgtgtaaggctctgtaggttctttcagtgcagtccacacaactatcacacacagttcctggtcaattcttatctcattatgtcaataaaagtgactccttttatttactcagagttgctgccctctatcggtgcggggggcgggaaagaccatgttttaagtatctgccacatcagtcttttctttttttttttttttttttgagttggagtctccctctgtctcccaatctagagtgcagtggcaggatctcagctcactgcaacctccacctcccgggttcaagcagttgtcttgcatcagtctcctgagtagctgggattacaggtgcacacccaccatgcccagctaatttttgtatttttagttgaagtggggt

SEQ ID NO: 57488 - DNA, 1793 bp, Homo sapiens
aaaccccgtctctactaaaaatacaaaaaacattagctgggcgtggtggcgggcgcctgtagtcccagctactcgggagtctgaggcaggagaatcgtttgaatcccggagagtgcagtgagccgaaatcacgcttcagcctgggtgatggaccgagaccctgtctaaagaaaaaaaatgaataaaaaaaataaaaaaagatgtagttctctaacgaggaaggcttctgtatgtgattaatgcccttcattcagagaaatctttacagttcttttcacctgcatctactctctccaactattatacgaatggtttctaacccaactgcttgaatactgtgatccagggtcagtcttcagctttctaatattagagaaacttagttttccctgtccttgtctaaaggcagggtgaaacccttttcctttcctccgtgtcattcattctcttatgtaacgtaaacaaatgggaagtctgggaccaaaggctcataagaatttaattatcatgcagattccagaaagccagtgtacacgcagacttcggaggcagtaaacaggaaaccatcgatcccgtgcaggaaatgaccttgtttgaaggcaacgaaggtgtcgcggatttccctcgttttccttcagttcctttctaaactcatttccgtgtttcaatcagtttggtccttctctacattaacagagtccccccggcccagagagaatggcaaacagacccttccctttagtggacatttttatgtcttgttttacatcactgcaaatctcagccaatcagtagttggggtaggaggtaccaaaataatcctcacttcctcccccaaataccacccctcgcgtgcgtcatcctgtgatagattaccaacgcagccaatcaacaagcgatcttgggccgggcctacccgaaccccagccaattaagaggaagatgaagaattggggcggaggatggaaaacttgccacctcttttggaaatgatttgaagaggtgcgtccggaacgagggaaacttacgacttttgctaacgatcgcggcgtgctgtgtatctcctgtgccagttctgtctccccaagaccccaccccaagatgggccccatggcccacgtacccggcccccagtttcagtaggacgtgtccttatccctgaggtcctccagaaaggaacccaaccccaatggcccgtgcttcacacgctcctccccgcgccggtggagtagggggcaggagagacctgctgcctctggcgccaacctttccattcagtgcgtctttcctgcctagcccacgttcccgggccggagctgacacgggggtgggaggagccgagtgcttgctcgtcttgggcagaggcgaaagcttcttaaggtggaacaggaatgttgggctgctgggcctctaccgctgggatgtgccggcccctgcttcccaacctcgcctcccagtttttcatctcttgttccctggctccagtctaatttttaggggagtggaaatcaaacaggctgggaagaggatagaaaaataacgtagaaaagctgggcgcggtggctcacgcctgtaatcccagcactttgggaggccaagacgggcggatcacgaggtcaggagatcgagaccaccctggctaacacggtgaaaacccgtctctactaaaaatacaaaaaattagccgggcgtggtggcaggcgcctgtagtcccagctactcgggaggctgaggcaggagaatggcgtgaacccgggaggcggagcttgcagtgagtcgagatcgtgccaccg

SEQ ID NO: 57489 - DNA, 1766 bp, Homo sapiens
agcagaataatatgacttcaggatgtgacagctgtaaagggtaagcaggccaagtatcaaggtcccttcttcgctgagcaagattgcggagaacaagggccatgcacaagtttaggaagctgaaacaaggaacaggacccagatcttctgatgtttatttcaccgttacacgctcatttatcatgtatccactcattcaaggagcatttactgaattccaggatgatataagggtaacatataaacttcaccccaatcttcacctcaatgctcatgatcctttataaattatctcgagggaaagagaagcccatcaaagacagtcctgagaaagctggggctgttcatctgtatacggagtttaacagaatgaaacgccggagttggggtgtcagctggaattgacggtatacggtgcgcactagggactctcccgacggggagcagtgagttgtcatcccgggtagacggcgaactcccggagccacgcggccgcaggtgggcgagggcggcgagatccctcgccggcgtgagagcggccgtggctctccaggcggagcgcacaccgggtagcgaggctcgcggctcggcgctgcccgcggctcggcgtctcccggctcctccttaacccgcgccgggaggcggtggcggcagcggccggcgggcgggggagggggaggggcgcggagcgcggcgcggaggccggggaggagccggggcctgcagcggagccgagccgagcccgagcccgcgccgagccctgacactgtctgcccgccttctggctccccgggagcccagactggtcggagcccgagcggtggcagcgcggggagccccacgcgccgaagggagcggacccgacaggacggccctagaggaggtgctgccgccacagtagcagggaccggagtctcgagccgcggcctcccggaccgtgctgcccaggccagctcagggacagccgggagtacgaaagccccaccctctggggcaccccgggagcggaggcgggagcggggacgcgagcaacctctccccctgttggagagaaaagacccttaccactcgggtgagggaaagaagagacccctggaggggacgcctctctcctgcctagaggcgaggaagacccctgtactggccggggaggagacccccagaagtggaaagaagggagctttccgtagggaagcagagtgagaccaccctagcgcgcccccgcccctccaaacacacactctcaacagttcaggactttggaggcaaagagagacggggctgtgcctgtggagtaggcaccctcggcccaccactattcacaggagacaggagtccttacgttcagaagccactccagggaaagaagaggaatcggctttcagccttctggagaggggaagacctccccctcaacttcctcgtgcctagacagtggaacggggtggagcccctccgctcctatctccagcagacagaaagagccctccacctcagaaagatccagtttgggggggaggggaactcccccaagggggaggagacaactcctggttgggagaggctcctcccctcctcccccgggtaacaagcagggtgtggggggtgtgccaccttccccaagtaggacctccttctcctccccctccccctcctccaaccttgactcctcatcctcaggggacccagttcccctcaccaacttgggaggctcagcctcgtccaggaagagccactgaggatgagagccgtcacctgcctctgaa

SEQ ID NO: 57490 - DNA, 1910 bp, Homo sapiens
cctttccttctgaagaagaaaaccagtggtccacaaaacattctcctttccttctgaaggttttacgatgcattgttttcattaaccagtcttttactactgaacttaaatggccagttgaaacaaacagttctgagaccgttcttccaccactgattaagagtggggtggcaggtattagggatgatattcatctagccttctgagctttctgggcagacttggtgaccttgccagctccagcagcggtgaagactgctgctgttgtaatgaggcaggcttgagtttctgtctcagttttgccacttgctatctgtactgtcagggtgttgtggttaagtttacctttggggcgcagaaaaagcatatttatggtgagagttcggtagcatttatcattataatagaactgggagctaatataggccattagatagttcattatgcttccgattttatcaggaattgggttgatcccacgtatagtctatttaacaggatcaaattttccaaaaagataatcggaatacacgccgaaagtgtggcaaaacattttaacaggtgtcgtcctgaaaaatcggagataaagagtgtaaggcactaaatcaagttgggtgttttcagcgtttagactctggagagttgaaatccacggtgtctatgaccagatcatacatcattctctgcaggtacctcgtctgggactaccggctggaggttgcctcttttctgccaggagactacagttaggaagtgactcctgtaagaaaatccgtcacgattcaatatggtcctcgtcctcgtaggacactccaggcacctgcctagagtaagatggcgcttttcgtaagcacctctccaggacagagatttccataacgagagtcacgcacttgcaggccatctttgccattatccaagacggtgagccgtgcagcctcatcgtttccaggtttcaatatggctccccgcgtcaccgaaaaggttaatctcagaaactaacttgaactcgcgcggaagtgacgcaacagaagttgtcgcgctttgcatctccgcctcccgtgctccgcctccggtcttacgtttcgcccccggcagcgccgacagcggacccaagatggcgaccgagttggagtacgagtctgtgctgtgtgtgaagccagacgtcagcgtctaccggattccgccccgggcctccaaccgcggttacaggtactaaccccgaggcgctgccgcacacgcgtactctgtcgcagatgacagcttccttctcagctagcacgctgtccgtccctgccactactacctctgtattgtcaccttgctagcctccctacctgggttgtcatctccctgaccacctgctccatctccactctggactgtcatcaccatatttctgccgtttttttttttgttttgttttttattaaattaccactctgcgttattccactctgcctctcccgtaatcccctggggcacccatctgctccccatcatgcactttcagtcgtgcttgctccattgccagtcccctttcattcgctcttccctgcgtccttcagcttatcatcctcatcctttctctctctctctctctcacacacacacacacacacacacacacacacacacacacacacctttccagttccccatgcacatttatgggtaatcgtgttgcttgccactctggattatctgatttattttttgtactgttgtcaatttcgtcaccaactgtcatcatccaccattcggtttttccttcagcagttttaccagtgagcaaaggttatgatcataagctttacaacggttgttcattctgtttcttctcattgtattttcttgatgattatatagtattttctgtcttccttccctacctcccttcttaacctctc

SEQ ID NO: 57491 - DNA, 1234 bp, Homo sapiens
agcaaacctcgccccccaccccccccatccgtttccctttctcagtgaagacggtttgggggcgggtggggaggcgcgtcctcggagcgccctcgcgctcccttttcgctccccgcgcgcgatccatcgcctctcttcccccgaggccagcgatggctcgggtgcgggcgaggagctgggagggcggctctcgacgcaggtgtcagatccgctcggcagtgctcggcgcgctggcccggcccccagctcctccggccgccgccccccgcccgccgcgccgcggcgccaggagggcggggccggggcgcgcgccgctcctcagcaagcgggcgggcggcgttcggtctgagggagcggggcggtctccgccggcgtcgcgcgcgctgtgtgtgagcggggtcgcgcgcgcgcgcggcaggcgagtgagggaacgaggagcggccgggtgtgagtgtgtgggagtgagagtgtgtgggagtggggtgagggagaagctgacgggacgcgaggctgtgagaaactgggcgagtgtgcgaggacgcccggccagcctgcgggagccgcagtcggcggaggagaaaggaggcggctcccggtatcccgaccccctccccctcctctccttcccccacttccagccgcccggcggcccgcgcttcctcgaaggccccagcccggctcagtcggccgagagcgagggaggagccccccgacccaggtgagcggtacgaccgctgttgccctcgggtgtagagcagtgaggcgaaggcgcgccctcccgagtgggcgagttcagcggaatggatcccccgattagcgggggctgggccggggaggggaccggcccgagcgcgcccggggtccggggctagttgaggccggtggtcgccgctccgcggagtcggtggggagcgaggcggggcccggccttcgcgcgtgtgccgggaggcgccggcccgtggcgtgtgcgtgcgaccgggcgagccgtgtcgagggggcggcgacttcgggcgtgtaaggagtatggtttccccgccggcgagggggtgtggtaaccccgggaacgccggctggagtcggacccgcgggctgctgacctgtcctcgggattgcggcgacactccccctccccccccttcccacaaattctatggagcgaccgcgggaggaggatcacgtggtgcggtcccgcagctactgtattcgattccacgttttcctccttacgtgtaaa

SEQ ID NO: 57492 - DNA, 2314 bp, Homo sapiens
ttctcaaggtacaagagtttgtctatatactttggaaataaggagcaggattttatgatcttgaaaaatctttcagttttcttattctctaacgacagatctattttatttggcaatgctaaaaattatcctttattagggtggccaatgactaagccagcaactgggaagcagcttacaccactgggcctctgtagcactcacttccccatctgttaagacagccatggccatttaccagtggaatttctactgtcttcccgctggctcctttctgatgtagcagtccttatccctttttctccagcagcctacatgtttagaaaagcagcctcaattggctaaaaggcctaatgctgaaagaactcaagagagaaggagcctcagacaagtagcggctatgtcccaagagcggaagctccccacaacgaggaacacaagataatccgtccatcagccattcttatccacaccacagtcgcatccccctcaaagctctcccagggtgccagaaattctcgctctgtctagtgtcccgactttccaagcgcttgtagccataccctctccaaatgatgccacttgacctcccaccgtgatgcaggccaaaattcctcctacaaataaatccaccaacacctccaacggactccatacttggggtattttcctttccctgctttctaaatatcgtaaatcccctctctggtcttggaagtcctttctccctcacacctttcggaactccgtgactctccgctctcatgcctccgcctccattctacccttagggctcctcagccagatctttggctagaaccatggtcaagggagaatgcgattccggctcctgtcacagacgcttaagtgtgagcgcaacccagcccgcctcctcctccacgcccctcacactcacgtgtcgtgggaaactggagtagccaaagctcagaatccccagtgaatacccttctggggatgggagacggggccagctaggggccggccgcagaccccggtcccagagctagtttcagaggccagcgttccccctagcgcctcgctgtgccccactctgggaaccggaaacaggaagcgccaagaggccgctgggcaaccgctcctcccaccagaccccgcggcatgtgaccatagaaccatttcgcccctttccccttcccgggctccctgataatcttaaactctgattggccagtattctgggactttagctccgccctcgttccatcagctccaatcactatcgaggttgtcgtttcgccttttctggttgcctttctttcaatggggtcccagagtcccgcttccagggcctctcggctcgcgcaccccggtcacgcggggtcacgcgcctgaccgctcccgggtagggttcgagtgaagagggtgagaggggcaggtggcggaagcggaagttacgcaggcagctcgccctcgggctccgcgggagttgtagttctcacgctaggtctcctccgggcgcttccctagcccgttcgccgcctgagagggacgctgttccgccgcgtggaagcttcgagtctcgactccactgttgacccctagacgagagtagtgcagcgacggggccgtgatgtgcgtcctggctttcttaacgacacctctcctctgtatttcctttttccagttgagtaccttggggtgaattattattgttactgttatctctgtcgttccttactgcttcgtggtattttgcttgataagcatgctctgcaaccacctctgttcgccagaggttacttctgcaaagtaggaagaaacgagcaatacgatggtaatctttgcgcctttgctaagatcttttgtaggttccttatgtcttactagccacttgttgaagtcctgctcattcttaaactctgttcagatgttatttttcctgtaacttcgtgcattcactctcttcagaattaacaatttcttcctgtggaccctcgcttgtggcttgtacctggctttagcatgttttcattccgcttccactcttacgttgcttctatgtgtgcctctctggctctatgcaggtgcctggatttttgattcttacccctctcattagaactactacagtgttttgagtctaataataataaaagctaacggatgcatatctcggtggtgcccggcacttttgtaagtgctttaaacgatagttaattcacttggtcttcacaccaaccttatgaggaagtatcttatcccaagtttacagatgagtaaattaaagcagatagaagctaagtaacaccgtgggtcccaagctattaagtta

SEQ ID NO: 57493 - DNA, 2241 bp, Homo sapiens
tatttcaaaataaaatacaaactatacataaaactgaccccaacaagtatccatttcatttcctgtcgtgtatctatatgctttcctggaaagaataaacttcagttcacaaaatcagatgtagaagatacatcacttttaaaaattctacgtaattttaattccaagattcccatgccaccaggctggtgggaaatccagtttaagttgtaattaggccttttctccagtattacatatgaatttgagtgtaataccccaaaacttgagaaggccattgtatctccagtccactggggcaatgaatagcttgagcacctgatcattataatgacccagatgtgtatctttttcttttactctgcggtgagtttttctaagggaggaatcctattttgtttaattttgtattatagcatgggatattgtgcctggcagatagtaggcaatcagttagtatttcaggaataaacactcttggtcagtgatacagctaatgatttgcaacaagcatatccttaaagtaccttttcagtaacgatttccatatgaacaaagaaaaaaactagaaccaagaggtaaaattataatcctgttgtcttgttcccatagccatactctgatttcttttatgttctgtgccctggcttgatacttaatttgacagctaattataatgtttattaagctctgaaatatactttctcctggcctttttgtctgaagttgtttgaggtgtcaccatggttggaagttaagagcatggaagctagacttcttggtcttgaattctagctttgtcactaacttagtaactttgggcaaattacatgtctctgcttcaatttcatttgttaaggtagtacctatttcacaaggctgatggtggcagcagtggggcgtccagagctgccgctgccatcacgccagctgcagcagggaggggcgggcagcggcggcggagcagctgcgggagccgcagtggctgctgtgggacatctgtgcctcgcgtcccctgtgccttgagaccccaaagcagccgactgcgccgccaccatcctcgcgttgccgggtggggcgacgtgctccccggccaggagcctccaccgctccggaccctggccctatgtcgccgctctcgcccgccgccgccgcggagtgggagtggggaggaggggaacagtccttggagccggccccgggagtactcccggagcctgccgccctggaagccgccacgatggaccgggctgagtcgcccgccggaggggaagcagtgtagtcgggcacggaggggcaggcagagaggggccccaaggcggagctgggtccggggcggagcggtgttcgcacacaaagcgctggggctggacccagggttcggggccaaggcgagaagtgggagcggggcccgctttggggacccggacagcggtgtggccaccgcgcacacctccgacagcgccgcattcctgggccttgggaggaggctctgagtagggccgcctggggcgcgtcttcagggtcctcccggcactggggtgaccgccgagctagacgcgcctgagggctgagccccagggctcgtgatctgctcccggaggcgccccccaggcagggccgtgagccgggcgagggagagtcctgggctgcccctgagccccggggccacgggaagaacttgcagcgacgtcatccctgccccggacacagtcccgggcccagggaggacctggaacattcccttcctccccccccccccccccgcccccgcccatcagcccagcctgcaaggaggcgccaccggacctgcacactcaggagcaggtgagccagggacaagcaggagccccgccccttccgaactggtggagcaggagctcccagggtgcagctgcagccaccttgccgcggctgtggacattttctgtgctctcagaggcccagcaaagtcccctgcccactgcaggctccagggtgcctactccggctgcctggcttctctccactgttagcacccactctgaactcagagcaaggtcgggccgagcctgggtactgtcacagcctggccgagcgtgcacacgctcaggacagtgctgatacgccagccccctgccgtctcggccccctttggaacttgggcaccaacaagcgtgggagggaggctgagaggggtctgaagacagctggacactgacttgcaggcgctccttggcatgaacagcctgggagcaggag

SEQ ID NO: 57494 - DNA, 540 bp, Homo sapiens
actacttaaatataggagctgtaatttcaagattgattataatctttagatagttgaagaaccataacattcacatatctaccttggactgtatgccctacatgtttattttatttatcagaaaattgatccttttctctctgtaagtatatgtgggacatggaatgtggaaaacatgtgaatggcaatcagttattggcatcagctatttgctaacatgtctttcttgacaactatgctcatatctgccaccactcaagcaaagttcagtctggctctctcccatattaaactttgctcagttgctgaggtcagtgtcctggagagaacccaaggttctttgcagccatgagcagagtcatgcttcagtttctccaaaagaaataaaagatgagtattataattatcttctggatttaatgacatttttatttggctttccctttttattggatgatttcctgttcccagtgaatgtctgctggtatgtatcctcaacaacattaaacctgcttggcctccttcaaataatatgtttct

SEQ ID NO: 57495 - DNA, 1604 bp, Homo sapiens
ataaaattaaaatacttttgaagcacatctttaatgagaatgatgagctgttttttcccccagtgaatttatgcatccatggattgcaagaattaaacaacattaattctgttactatttttgttttgtgtagctataagtgctaagaagaatggctcacataaaagtaaataaatggcaggtaaaacaattgcatcattgttaccacttcttgcaacttctgcattacatgccaaaaatcacctagtactctattatcaagaatcccttctcatcactcatcagctggtatttccttcagttcctccttcagttgtgttgaaacaaagaattcatcaccacctcatctgcaaaaggatttctcttctgacattagagtcccttgctttttcaatatcaacaccagtatttcaaattgttcctttatttggcactctatagatttttatactccagggcattgttccatgtttggttgtgggagagaattgtctttatttttataaaatagaaaatggacccttgagaaagaggaaataagaaaagataaatagcatggtctcaagtagatcaatatgaatgtgaatatctaaaatttattcttttaaaaagctaaaaatttctgacaccccttaggaaggctttgcatattagagcttcagagagttggggaagaatgattaaaagtaagcaagtaatgagtaaactagatttgtaaaatctggaaggaatcttagagataagaagatgacagtatcataggaaagaaaaaggaatgatataaagaaaaatctgcaataaatgaaggactctaggttcatgcttcacgctctctgtgtggaactcacggttttccagagactgaggcgtctgtgggcaggaggaccaagaggagaagaaccagacttggatgaaggagtttgttcttccccatgttgcagaaagaaggagctggaggagaacagactgtattgtaccctactccctacaatccatctggtcccaaacacttcccaaagcaactgggctttatgctgctctgtgtgcaaacaggaagttccacccacacaagatctctaaacaaagttgaggtctctgaacattctctggaaaggtcattgatggcctatttatagtcaaggttaattcctggcgggctaaatagaatccctggagggctaaaactacattcccattcccgtaagagctcacttttaccgtacagcagctaataagcttttcaacctcttctctccctcactcccccacaactcctcacaacgccttttatggtgcttctcacatctcttgtatgaatagctggcaaggaaaactacaatttaagcaacactgggcaggctcaaaatagatatttcactacaagtcagtgtggctgcaagttctccattagatatgcctaacctaaatgtttgaagccacatcagaattcagtagtcctctttgaaaatggcacgaattaaaccagtagctttttgacattagggatattactgggttgcagatgaagagccaggccctggaagaatgatcatagaaaagagtttcctgttttaagaaagtgaaacaaagaaacgtgaagtaac

SEQ ID NO: 57496 - DNA, 2018 bp, Homo sapiens
aacattataacacaagagggaaaatacagagctatatggtaaatataccttgtcccgcggtctatgagtaaaagctctagacactacattctttctaggcggtctgtcatggacacactcagctcctaatctcagttccttgttctcaccttcttcctatccctttattaaagcacctcattcttctcttctctgctatctttccaacaaacttttgagaatgtctgtccagtcctcctaggaattgattcatctctccacagcagtacatttttgccgtctgggttgttctgtctagaataatgccagggaacggcctttggtaggacacccagtggtgggcttggttagctttctgaggaatatggactgtgctttaaattctgtggcagtccatggtgagtttaggagcttgaagcctggttccctcttaagttctcctcaccagtggttttggtgttttatcagcccttttttgggtcccctcatagcacaaaacccactcatagcacaaaaattcttataattggtaataatgcaattaaaatttccgattcctcctgccgattgcagctccttgaaccgttctctgcctcaccctaacttcctgcagctttcgccagtcattggccacttagtcctttgggggctgggcagcggctccgtgcactttggagtcgggggcgccttcctagagcccagcatccactggggctccgaagccgtagcctgtctgtgtcctccacccactttgtgccctcatcctcctctggggctatggcagcggcgatgccagcgtcctctgcaggtccgacaggctgctgacgggcaccaagatcaccacgcagaacatccacgaccacttggttcctacctggacaaggtgcgggctctggaggaggccgggtgagctgaaggtgaagatctgcgactgggccccggggccccggcaattacagccactacttcaagaccattgaagacctgcgggacaagattcttggtgtcaccattgagaactcccggattgtcttgcagattgacacccgccgcctggctgcagatcacttccgaaccaagtctgagatggagcagtctctgcgaaggagcttggaggcagacatcaaggcctgcgcagggcgcccgatgagctgaccccggccagggctgacctgaagacgcacatccaaggcctgcaggaggagctggatcacctggagaagaaccacaacgaggaaatcagtgctgcgggtggccaggtcagtgtggaggtggattctgctccaggcattggtcttgccaagatcccgggcaacacgtgaagccagtatgcggtcataactgagcagatgcccaagatgctgaagcctggtcaccagccagactgaggatctgagctgggaggtcgctggccacacggagcagctccagatgcacaagtccgagtcgcggaccggtggcgtaccctccggggtcttgagattgagctgcagtcgcagctcagcatgaaaaccgcattggaagaccgtactgcaggaacggaggcctgcgttgaggcccagctggtgcggatccaggctctgagcagcggtgccgaagtccagctgggcaatgtgtgtgctgactgccagaggaggcctgagcaggagatcactgccgaccgcatcctgctcgagcgccagaaagatccttacagcaacctgcccacctgcaaggtccgctgagtggcaggctcctgggcttctgctctccttcagagggaggatcctgggtaggggatgggaagggagggacccttactcctggctcttccccttacctgctaataaaattttatggcccaagggggtggggggaagaatgcaattaacttccaaaccagtttttcttacaccagttttctctggcagaagctggagtggggtgactgggtctgcgggtatttcatactcgctgttacatgtttttgaaatatgtgaaatctgttctctttgctatgtatttaggctctaactatg

SEQ ID NO: 57497 - DNA, 1666 bp, Homo sapiens
atatacacatttctaaatttctaagatataactcttgagttgaatctcacaaaaaatgagaagatattttccaagcagactgtggcagacactgctcattggctaaactacccacaacatccctctctctaggcatcttcaaaccagagtgactatggtgctgtttgggcaatgagatataagtagaaaactgctgggtagggcttatgggaaacatttgctttcttaaaaagaagagttgtagtgggcatacccctgaatgtccttccttgttcttacttaatggaaaatagatgtgatatttaatatttcaatgaccatcttgagacagcaaagtaacaagcagggggatgaaggtctgcatgttaaggaagtctgaaagataaaatgggccttggtcctcatcagcattattgggcaattctatcaaccttggaacaccaacctatggactttcctatttgtttaagcagctgctagttgcttttctgttatttattgccagagggattccagctgatacaaaatattttcaagataggtcagtgtgataaacgacatgggttgtgaaacaacatacagtgttaagtcatctgcaagtacagaaaggaggtcaacttgactgtggcttagggattaggctaaagagagagagagtcagagccctgtgtgccatgtgaaagaatctggtttccattctgcaggcagttgtgtagataatgaagtgagttaggcatgagagaaacatgattactctggcatgaatatgacacacacattggagaagggcaatatagtcagcaggaagaccattcagggggctaattcagtgttcagttggaagaaaatgagggcccaaagtaagattacaacagtgggaagagtgagaaaaaatatggatttcaaatgtacgtgatgtgacctaataactactttaatatatatgggcacattggagagagaagttgtgttactgcaaattatcacatctgaagcaccattgaggtaaaggacacaattttctaataaagtatttaaagaaaaaatttccacctgattaatgattagatgtatatccaattatgaaacactactgatcacaaaacacatcttgatttcagagatgtgaaaagatgtgcctctttgaatgaatgaaaactggtatagctaaactaatatttatagatactgtatgccaggcattgtgataggcaccttgcttatttcacttagtgaactcaaaactttatgaaaaaggtgtgggtttttttttcattttagagataagtaaaggatgattgtagatttcctactagggcaagtgctgggtttgttgctaataacagatagggaaagtagacatattgaatttgaggttcttttgagatatccagtgaagctattcaagtagggagctgggcacagagttcagaagttaaagaaaaaagtgattaattgggttcagtcaatatttaaaggctgacaatgagccaagctcttgaattaggtactggggatgtgtggcaagtaaagcaatcaagtggagagatggatattatttagtcagttcacaagaattttaatgcatattttgtatcagatactgttctgtggttaacaaaaaccacatgttcctgccattggggattatacattcctgtggaag

SEQ ID NO: 57498 - DNA, 400 bp, Homo sapiens
tatcttggggcaggcatatctctggtcggggagggtttattttcgtgttggaatgtttctggtcagagatgtcatttgtggtttatggtcatgctgacgttagccattaggccaatgccctttggggcagtttttgattaaggggaactttaaaatgccagtgcttgtccaagatgatgatactcctgccctgtcacctactctcttgtgattaccatttgcatgggatatctttttcatcccttcactttcagcctatgtgtgttcttaaatctaaagtaagtaccttgtatatagaatatatttgggtctgtttttttaacttttcagtcactatatgtgttttcattgggaggtttactcaatttgcatttaaagtaattgttgataggggaagatt

SEQ ID NO: 57499 - DNA, 1054 bp, Homo sapiens
ttaccaaaaatttgtcaaaatagacagttaccatagttggccaggtgcggtggctcacgcctgtaattctagcactttgggaggccaaggtgggcagattgcctgaggtcaggagttcaagaccagcctgacctcgtctctactgaaaatataaaactagccgggggtggtgatgtgtgcctgtaatccaggtatttggggtgctgaggcaggagaatctcttgaacccgggaggcggaggttgcagtgagctgagatcgcgccgttgcactccagcctgggcaacaagggcaaaactatgtctcaaaaaaaaaaaagaaagaaagaaagaaagaaagaaagaaagttaccacagttaataatacttacctatgagcctcagtatgaattataaaatattttatagaaaagtactctttatacaatttgacaaaggcattctcttttattttcaatattttacttttttatgcctgctacaaagaagcaatttaagttttcattcagctgctctgtgatgtggaaagagtatttttgggccaagtgttattcaagtgtactgatgatgaaagtcttttgttaatatatgaacagactttgagtaatcagagatcgtttactggaaatgacaagtttcatcttgtctgattaagtacacattaaatcttggcacagattttcttaggcaaaactttgctcaacaataatttgaatccacatagaacccttgcctttagtaccttgaatattctttgttattgcattaattcccattcctaaattttacaagatgtctgagactattaagtaaaatgcataaagatatttctcatattattgctgtttaagtgactcctttacgttttaaaaattcctaagaaaggtcttttacaatacttctactttgcattaaataataatcaaacctcgccttgggggtgtgccagacagattaaaatgaataaatcaacacttcacccaaacattcattcatagacttgcttttttttttttttttgagacggagtctcaatctgtcacccaggctggagtg

SEQ ID NO: 57500 - DNA, 1998 bp, Homo sapiens
caaatgaataaggtctgttaagtgggagttagttagcttgataaaaaagaaattgatattccagaaatcagaagatatacatatatataagatatatataatctttacatattgttaacattatcttaaatatctttattataatattattctataatatatcttctgatctctggggcatcactttttaaagataattatatacgtgtgtaattataaatacatatatgatatatatataagataatagagttagatgtgctctttcaaaaccttaaatgcaataatcttatgaattctggaagtattgactatgtttgagaaacaagtgacatgagaaaagcagtgtttaagagtatgcaggacagatagaggtaaagaaaagctggaggcaaggaagttaaattagaatggtttttcagtaatctagttatgaaataatgacagacagattaaagtgctgtaactgaaaatgagaaggaagaaaaggataagcaacaaataccaaaagaaaaatttgcatagaatattacagaacatttggggtcaaagtgtaacgatgtactctgagttttcaggttttctgaatcatacctttgtttccattgatctgttttctcttaggttggaaagaaaatacacacttggtgaaatgaaagtcaattaatcatgcttttcagtttcttttttttaaacaaacatgccattaaaggaatcatgattttttttttttcattttatggtcacaatacctcagtgagtttggtgttgtcattctgacttcagatttaaagaaactgagcctctaaaaggttaagtgagtctgcaaatttccaaagtcacatagtcatagcagataggagtgtgatgaaaaattgtccctttgttcttaaaacagtgttcttttttcactatacaggattttttttttttttctggtgaggaaatatccttaatgactcctttgttttcaattagaacattactccttgccttcccaggcagtgaatctgctgtattaaaatgtgtttattctttttttttttttaacactttttactgccatcctcattttttattaaaaagtaaatttggtagacattcaagcatgcagagaaaaatttctctaggcctgatggcagtagaaaagaattttgagttaggccttttgcaacatttcctgatttccaggtatacttgaaacacacaaagagactatgcagaggtagcgtatctgccaaaagttgcattactctcttttgctcaatattacataaatcccttctctttccataagaagatatgacagagacagttaatatccacatgagccttcccatttctcagcctcctttgcattcagggcaggaacatgggcggaagtgatgtataccattcccactcctggctttaagagtcaagtgcaacctccttccccatgggtatgaccttgaaagccacgttggcgatggcagagtcaccagaggaaagcagactggttctctctgactcactgtttggcacggggctgttctggagagtgtctgaactcacaagtagattttgtgtgagcaaaaaccaaaccgttaggtgcttacccgctgagatgtgggagtttgtttgttactgccattgaatctaattctgactaattcaggtattgactccatcatggacaaggaagatctaaaatggcaagactattaaaagcaaaaacaaaaagttagttgattttgatgtcaaagagaaaataataattgcttaaaaatcctctatttgaggaaaaagtattatttggggctaacttaccaagaagttgctgcagtctcaagatccaatacttagaaaaacaggttttcatcttaaaccaacccaataaagcaccatttttcttctattctgtcagacaaataaatcacacctttacctcctattatgctgatacgcaatcctcgtggtagacacaaagttggcttatggatttttgagttggtaaaa

SEQ ID NO: 57501 - DNA, 684 bp, Homo sapiens
agcatgagttctgcttctctacacctcccttgcacctacgccctgtgtaatgtgacttcacacctcctctcatcaggatgagaagtctatttatcccaccccttgaatctgagctggccttttgacttatttgtctaataggatgtggggggtgatagtgtttagttgcaagtgaaggcccctctaccttttggaactctgcccagccaccatgtgaacagcctgggataacctgatggagaattagaaacacatggatctagcagccaagtggacagtgaactaactgtcccagatgtaactgaggtcatcgtagaccagccagccctcagctggccagtcagctgcccatagacgcatgagtaagcccagaacaaatcagatgagcaaagaccagatcaatagaaagttccagctaacttgtaatctccagagcaaaactaaagccttttgttttaagccactaaactttggagtaatttgtaatgaagaaaatcctaactgacataggcagcaaactacaattatatgtatttattctattagaaccctattttagcattatataattccattaattatatttgaagtgatttcgagtaattcatttgttctgatttgattggttaaaagattttttttttcttagaaagtattcctttgggttgtttttgtccgtgttta

SEQ ID NO: 57502 - DNA, 1429 bp, Homo sapiens
gtcttgcagaaactctcttcaaagttgtaactttatttaactttaatataaaaatgttactcttgtttttacagcacagctccaaactagaggtataccacttttgaagagtaactcaaagtataaatagcattttgcaaactggaagtaaccatgtgactatctattagtcatactgttgtttattacaattttcttctcgtcaaaaaagaaagcttgccaaggaggaaggaagtttgtgatataacaatttaaagctgaagaataaacacatattttcttactttctcaactgggattctcatctgaaccacagaacacgaaattgctcaagtggctgtttttctgattcatccaggagtggtacttaaccacgtatccttccagaactgtaggagaggctgatactaattaattcaacagcattctttaggacattactgctttcttatcctgtgttaagaaagatcaccttaaaagcgatagaatcaaagaaaaagcaatggtttaaactttggctactgaaagaaaaacaaaaactattatctctctctcaaagacaaatgcgtgcaaagtcacacgtgtgggtgtgagcacacacacaaacacacacaaagacacacagagggaaaaaagaaaacgaaagtaacaaagtgcccagaacgttatcatcagcatacaagatgacaccattatgcttttgctaagttaccaggccacaattttgtcttcaaatctgctctaatcagtttcccagtgattttgtattacccctcaacaaatatattagggaggaaactgaggagaagaagccagtgtcccgcaagcggcttcgggattaacactgcatttgttctgagagagaaacttgaagaggaaaagcaaatgagaatagagaagaaactgtagtacaaaggaattaaaacaaagaaaatatgaagagaataagaaatacaggtttaatcatttctgggcagaaggaaaggacagataacaaaattgctcttttcatttttggacagaaaaaaaagacagaaaattcatgaggaaatgaatatattctacctttgttgttaacaaaagattgtatccaaagaactattagaaaagcatgtatagaaaaatatagagattactcaagtatggttgagtgaaatttagttttgttccaaaaaggaaaacagtcaagatacaacagttaagatataaaacattttcaacacagggaaatgttccccgctgttgctttgcagttcatcctcacccctgaagccaggcagcagccaacttactgtcaataaacatgagctttgctggttttagaaattcctgttaagcagaatgatacagttggcaattcttgtaagtctgatgtctttcactgagcataatgtttttgagttttatccatgtttttgcacagatcagc

SEQ ID NO: 57503 - DNA, 757 bp, Homo sapiens
ctcactaattcacaaactctaaaaaagaaaattatctgtaacaagcccatagaactgatgtttatgtgggatttttttttataaatatagaaattgatcctcctagttttaaaacttgaaacttacatttgtcttatttgagttcattctttaggaatctgacctttagtcctctcagatagtaacaggaaaccgaaagtcaccagatcaccacttccagacaagggactcctcactgccatgattgtctaaccgaccacctgctccctgttgaccaactcttcttccctacccctccctaattcgggaatagtcattgtctccgggattggctttctgtgccctgagcaatgggacctagactgaacccctggcatttcagtaacatcgctattgctgttgccatctggtggtcatctaagaatttaagattatttttcttaagcatcaaggactataaagtcaagaacataattctattgtaaaactgagagtgtttgggggagaggcaaggattatggtaaaaactgttgaactggtaaaaatttgaggacaagtgtctataaaaccctttaatcactctagatgtgggagatttggagttaaacttgagatatacatggacccttcaggagtgaagaaccatagaaagtgtatgaattaaaccactcacctatcataataatgcaaactgtagtaataataatactcaggaagcacataaggccaatcttccagttttgtatcaacttgggaa

SEQ ID NO: 57504 - DNA, 1335 bp, Homo sapiens
ttctgtgtctgtcatttcattctggttaagagccattgctggggagctagtgtgctcatttggaggtaaggggacactcttactttttaattggcaaaattctttctcttctgagagggctggtattcctttaactgtggtgtaagttgaatatagtcatttgcttcatttatgagtgctgtcagagggccaaggctctgtacaagatctttgtggctggattcttgccctgagtttcacagaccaatatttaatatattggcagaatatttttggtgtaatttgggctatcatccagcagatggcgcataagagtaacggccagcgctgcgggtttttacgtttcagcgagctcgcaacaacgtcctgtggtgtggcccagcgcggggagctgaccccaccagctccgctctcaagccttcggagagtcctctccagtcactatcgtcattcccgcatttcctttgctaggctgtccgggctgggcagctccctcaggcggacacccatggctggcagaccttccgcgcctgcccctaatctgggcatatcactccctcggttttctgagactcgggactccttgcccgctggagcgcaggccatgaatctgggtcccgcactgcggcgctgcacgccgcagcccagggctttggccccagccagcacatccgccatcctgcaccccaggttccggcacgggctgcgacggggcctcggaactgctcccaagcggctgggaaagaactcagtcaggcatgtcggcctgcaaagcacccaggatgggcagtggagtctgcaccgttgacaggctcctagagcggccaggcagaggacttgagaggggctggagggcaggaggtcctgcggaacagaagtgccccactccgaagggaaagtcgaccctgctgttctctttgcgcggcagtcagtggggttagagttattcggaagaggacggagagccttgggggatgggtgcgcatggccatgttccactggaactgcccccaacgcaaaacaaacaaacaaacaacaacaacaacaaaaaccgggctctatgcaggctggagttctgcctctgcctgcttgtagggcatatccccatgccagttcgaatgtttatggggagtgtaggatctcttgtggctggaatcctagaggtccacagcaagagtgggctgccttgccaagggttgttcagggccaggaactggcactggtgttccagaacctgaaagggttcccggtctccctttctgtcagcgggagtggtgcttcctgtctgcgtctatttggccatcttgtctctgttgaccaaatagcttttttgag

SEQ ID NO: 57505 - DNA, 446 bp, Homo sapiens
cagacttcctaattttaagaactgtgacatacaccccttttttgagacagccacgcacactgtgtcacaagagtctccaagaattttttcttttcttttttttttccccttggccacggtacattttaggaagggtgaagataaagtgaaggttgtgaaatcaagcaggcgataacatgttaagggtcaaatgtctcagttcctgaattttgatggtgcaatacaaagcagaccgcttggtttgaaggcagctttgatcctgttataagatgatcaaaggctcaaaagatttttctggtcaccaccactaagtcaagggcacttctccttgtcactaggaaaggccctaagtatttacaaatttaaaataaaatagtttgtgagcttgaacaacagttaggaagcaaatagcacttcaatggccataataacctggatcctgggta

SEQ ID NO: 57506 - DNA, 615 bp, Homo sapiens
gaatatttgagaaaactaattgtttattaggcaattaattaactccagaactcaaggaggcaacacagagccaagaattggctgattatgcagctccttgttaactacattcttggaatgctcactcagcccggagggaaaaatgttctgagtataacctgctggggatctgaaattatcctgagtcatttaacaaattggctctgggaattattgaaatgcatgaattgctaatagcgcctgaagggaccttgttttactgctgccaaatgagtcatttagtcatcaaagacacattccaaaagacattctaggctcttctattaaggcaccaggacatcacagacttggcaaaggtaaaatgttcattggcattagaatatcttgggggaaatcttgcctataatgtcttatcctaaaggataagacataatgtctattcctaaaggaatctctcttccccacatccactccctagcccctaccaccttatttgaaatatagaatcacttccaaccatgacatgctactaccctgtcccctgtgtccatcccatagtgtgccttttcctcatctgcttcacatgtgctgctcctcagtcacatggagtctctc

SEQ ID NO: 57507 - DNA, 4385 bp, Homo sapiens
cgtgagccaccgcgcctggccccctgtgggtgtttttaaaattagagacactgagaccccgactgaagaagataggccacggggctgctgttatctaatatttatcagaactcacccgacttgtatgggcaacgcagccccttttcactgttctttttctttgcaaactccacagtcctccctgtcgctgccctacagtactggttggaaggtctttcttctttgactctaggtggggaaatccagaacgaggcttcgcctcacctgccctaatgcccaatcttctactagcattccaggcagcgctttctagtcacgtgagggatacctaaccactggaactaaataagatgtgggggaacaactgaggtcatcacctaaattgcttgatactctcttttccagaagacgagccccctttctgagtttatggcagaaagtgaatccctccctccctcccttcctttctttttctgtaagacggtgtttcgctcttgttgcccaggctggagtgcgacgccgtgatctccgctcgccgcaacctccgcctcccgggttagagcggttctcctgcctcagcctccagagtagctgggattacagccatgcgccaccacgcccagctaattttgtatttttagtagagacagggtttctccatgttggtcaggctggtctcgaactcctgacctcaggtgatccgcccgcctcggcctcctgggattacaggcgtgagccaccgcgcccggctagaaagtgaatcatttctatatttgattgtacgtgaagccctcggtagtccttactgacatcatgtctcctttagactttgattacactccgtgtccttcatctgactcctctcttcagattcctgagtcacgctctgtttatgttgctgttcaggagcgaactgcggcaccgcccaaacactgtgacgccagcgcgggaggagggccgcgggaggggcagcggaacgcgcagagggcacggtgcaagcacgggacagctctgcattggccaaagggatcccaggaggcctggccctcttttctcctgaggctggatcccaaccagcaggaaaaggctggattttcgccttttgtatttgttttggggcccaaccaagaaaaacagtggagggggaataaaacatgtttaaatcttttttttgtcttaaaaccatctttaatttcacagtcacaaaataaaacataactcgaatgttttgatgtttgcagtgacatcgattgtgaaaaaggttagccagaaaggaaacgcagtgagacagagcgctcggccaccccctgccctgggcgcctggcgcatggggggcggggcggggctcgcggggtgacgtcacagcccgacgcgccacccagctgtttttgtgctcccagctctagcgaaaagccgccggtatttctccatctggctctcctctacctccaggcaggctcacccgagatccccgccccgaaccccccctgcacactcggcccagcgctgttgcccccggagcggacgtttctgcagctattctgagcacaccttgacgtcggctgagggagcgggacagggtcagcggcgaaggaggcaggccccgcgcggggatctcggaagccctgcggtgcatcatgaagttccagtacaaggaggaccatccctttgagtatcggaaaaaggaaggagaaaagatccggaagaaatatccggacagggtccccgtgagtgtagaggagcggaggggatgggaggggaagggcccgcgggggcgggggcgggtagtcgagatggcttccctggggcgcccaggcggctctggagaagggaggttccgagaattacttaatcctgaacgcccttcagtgccagagccaatggacgtccagactgtagagcttttaaaaccccgtatgcctgggccccgaaccccacttcagggctgacggcgttttgggggccgagccgccgtcttcagtgactcagcaacccacacacggtctcagcagctgagaccgtgtgtgggttgcggtgcacaaaatagggcccctgtgggcgagactggttagatcggggccatggattggctgcctttaagaacgcagggacattgtgctgtgcggtgaggtttgcgcaaacccagtcgatttctgccttggctggttctcctttaatgaagttgactttggctctcatatcattggtcttgggacgaaaaggttcagaagctattcagtaattttcttgcattacagggggttaggggagcacaagacagtcctggcctggaaaacaaggtcacgttctctgcccaacagccctcttgcctcatcgttctaggctccggggcttgtgtggggacagccagcctcctcgtgttgatttctgatcacctggtacctggtcgcgataaggcaggactgagacgttttttctccgttttggacaccggcttaagtagttaaaactaccgcaggcagtgagtaggaacagaaaagtattaggtatctttcagcatccgggcgttttccccattaccccctcccccgcccacttgcctggtgtttctctaatgcaggctgcgcagccgaattggagggcagaatatggcttaagtggtagggggaccagcagctgttggattttggaaatggaggagcggagattttaaaattgtgctctttatcttcaggtaggaacattagtattacgtgtcacataatggtaaaataattgctgttatctgatgtcttttcttgactcacagccactctgggtttcttctctaatccttacctaacgttcgtggttttatagctaccagaagccaccagggccttagcccagcagtagaaacctcttgtaacccttttcctttaaaaagaaaaaaaagtcattagggctcttcattccccaggaattacaaaaaggttttcagcttatagaggggtgagctaatcccttactcgggaaaggatcctttacaaattactttcctggtttctggaccttggatacctgaaaattttgcccagttctggtgataccaatcttttgagcaatgatatttaaaaaatacaatcaagttttattgatagtttaccctagcggtattataagtactcagtctgtaatcattgacttacttccttacacgattacccgttctacagatggagtattcaaagcacaaagaaatgcagtaacttcctaaaggtttcacattgctgatctgtggttgagctggaattccaaccctgtctgaaggactgtggagctctcgggtatcttaacctccatgccatattgtttctcagtttctaatatagttgtattaaccagaattaatgacgtgctgtggactttacactgttaagtattggaaatagataaatatttatgtgcattcactctgaatattttagagcattctgttcttttcctgctcatagtttggtgttaaatgttttactcctgtgataatttttaagccattaagcctgtcactcagatttcagctttcctagggttatgttttaaccagtggtgagctgctcccaaggtgaccagtctgtgaccttctttctagttatgacgcaggttccttgatttggttctagttctgggaattcattgcatccttgggcagaactcttaatcgtgctgtgctagagtgtcttgtttacagaaaagagggttagagtaatgattcctgaagcccattccagcttgaccattggtgttattaaagcaatggcgtaccctgactgctcgcataaccagaacttagccccaccaatatttcttcagagccagcgttgaaaagaagaggtgtgcttgtgccttcagagaggaagggttggtgggatcttgaaattatcttcaaagatacaacatatcaaaaaaactgttaggaacagattgtctattttaaaaattcataaccctactgagtattagtcacattttacaaatgaggaaaactgagacccaaagaggcaaagcatctagcccaggggtctaccatagtgaggagtagagctgggattcctggaaacttaaccttggtactgggaaaccaatattttaatgattacccctcccccttctcttcctctccaaacccctcccttccctccaggtattgccctctgctttatcactttctttatctgtcttcctttgtggtttttatctcttactgctaggtgtccgagttcctttggggcacaatgctagcctctttctgccttttccttttaattcctggcttacgttaccctatttcagtttttatttttaaatttaaaatgtgatcatgtccctctggtcttcctggttcaggattttttctacaagaacacaaaacaactttttgtttt

SEQ ID NO: 57508 - DNA, 529 bp, Homo sapiens
agtcagggactgtgtgggcttccgagtttccctttttattttgaaagctccaggccggtatttggctcttctcagatggtatataaagctggtactgactctaaggtgaaaaaatgcaattgaatttttttccaggacttacccttctactaattccttgttttcttactttcttttctgcccttttcttcttccatcatccagttggccagttctacttcttaatccggaagagaatccacctgagacctgaggacgccttattcttctttgtcaacaacaccatccctcccaccagtgctaccatgggccaactgtatgaggtaatggttctggttgcacaatactggatgccgtccagtgcagtctggcatcctctagcccttgttctagatgcgttgataacacatctgagaagtggggcagaaggtgttatttatccggatcctcttacatatggcagtgtaaggctctgagagattagatacctcttgttttttagggattagccactctactagatttaatc

SEQ ID NO: 57509 - DNA, 1974 bp, Homo sapiens
cagcgcaatggaaccgaggatggggctgcaggacgataccagcacttcaggaactgtggtaaggagtataggcccaaggcaggaaagcccgtcccatagggacaaaggggagcttgatcacctcccagggactgaccactaatccaacccagagtggctgggggcagcaggagtggcctgccaatttggatgaagcttatgtccccactaacaaagtgaaagtggttcactggatctggagacaggaactgggagtggtgtgtgtatgtgtgtgaatatgggagcctaactaggctcacccaggtcatgagagaggctcattccatccgatgaggactcctgcagtaggagtggtgtatgtgtgtgaaagtgggagcctaactagactcacccgggacatgagagaggctcatttcgtccaatgaggaatcctggggcaaggaaggtgtgtgaaagtgtgtgaaagcgatggtctcgggagaggccaatgcagggagtgacgtggggaggcacagatcccttagcacgggctgtgtgctctgaggcgagtgtggggggaaatcagacctaggacattgcatacagctgataggacgagctttgcagctgtagcaggctgtgacaggggaagacaccttcctggctaagcagtgtccgaaactcctgtaataggaccgggtctgctggacctgagagtgaaagtgagagtgagagtgagagtgtgccgcaagggaggaaatgggagggaaagcgtcaaaaccaactcctttggagtgcatgataaaaattttaaagaaaggatttagaggtgattgtgggatgaaactggatgttcaaaagttaaagacatactgtgaattacaatagccctcttttagtgtcagatggctggccgaaggcactgtagagaaattggccgtgtgttttaaggtggtgactagggtcggaggacagccagggcattcagacctagtctttatattgactcatggctaaatgtacgcagccctgcctagcagtttattgtagaatgctcgcagctcacgccgagataaaccaactgtgctggcagctacggagttaaagggaaagtcacagaggcttctagcaccaccgatccaaaagtgaaagtgaaagtcagctgccctggaagctatgcagaccaaaaaaaaaaaagagtctcaggaaagagaaaaccagttttgcaagaatcacaggatggaatagagatccttcctacctatattccaatctatccccccttaccaaggctaattgcccctaaggaggtaagttcaaacagatacatgctcccactctcacctgagaaggagaaatcggagctccaggaagttaaaacgaaaggctcaaaaaggtaggcaggccgtctcaggtcaagtcatgcccaagttatgcttctgcctcttaagaggacaagcagacccccactaggacccagacgatgcagtccagcttcagcacctacaaaagtgccgagaagcacttttacaaaggctaaaggatgttaaaaggaaaaggcaaccaatataaaaaaatctcagaagtgctccatggtgcagataaaagcaccagccagttttataggcattttgcttgtacactctgtttaaccccgaggctgctgaaaatcagtgaatagtaaatacggcatttgtaaggcaggcccaaggagatatcaggcataaattgcagaagttagaagctccgtaggtgtgaatgctactcagcttattaaagtggctaccaaggtgtacattaactgagaccaggaggcaaagaagaaagctgattggaggcttaataaaggcttatttacaagcagcagcccttatgggaagagaggctggctttgcaaggaggcatagatgcgggtgtgaatgcagttgtggaaaaggctagtctggacagcaatttgaaagccagccaaggctagagagagattaatgtacatgg

SEQ ID NO: 57510 - DNA, 1928 bp, Homo sapiens
ctcattactgtaccttaaaattttgtatttgcttgttgtccagcacaaaacgtgcattcaaaaaaacccaaaaaatatatatccaaatgaactttcttgttgcaggtaggcaagatcaatgtaacattctctaaggatagcgctgtcagaaaacacactgttgcacactacttgggtagcagtttcacctcatcctctgctcatactgctctggaagtctgtttttttctctcaaaggccaagtctctcatttcgagactcatctcaagagtgccgtcctctaagaagatcttcctgactccctcctgtggaactttacctctcccctcttgcttggtactcttcatgcgtcctatggtgaacaattacacgtaaacacctaaaacatattattattctcatttgttaacacgttgggctcctccccttcaaagaaaacacacagcctaaatgaaaaaaaggtactggtcaccacaagattttattcatccactggaccacccgctggtgggggtgttttcaaaaaagtgctagcattttcaatcagggcgacgatctagagtcccttctggtgcactgttacagaattctgattactgtaggttcaacttttcagtttgtgacaggattagctttaatttattgcaattaattctctttcatttataaaaccaacttatgcctcctctattcttaagctcctatttccttcgagggaagcagtggcctccgccgcctgtaccctccacaccacccggcctctcggtctcgctcccctttcccagcaccgcgtgccgtgggcctcttctcaccgtccggccgaaattcgaactccagaaactcgtgcccaaacttgcccttgtgccctacgtagtagcgcaggtagaaatcgctagccacagccatttttgtacccgggaagcccgccgaaaacgcagccaacgtgtcccccggcgccttgcagtgacgtcatcgcgcggaataagtgcgtcaccacaggcgcttctcttcctcctgcagtgcagccctagactaaagcgtgaaagccgagtatcgcgtgagagtccggaggcgctgaagggagggtcgcagcgccgtgactttcgctttactaggaatggaggcacattgttttcaaaataaagattacattatactagcaaagattagaaatgtgagcatatgatagtcttttttatggacttagagctaaaggtttgcaagtcacttttacttttctggtctcccaatccttgcggcgtttgtgaggtgggtgtggctctatgccccctttaactgtgagctaaataaagataaagcttagaatcgaaatggcagaccgggaatataaactatttttcttacttaatttctaacagggtgctttccctttggatagcgattggtagttacccgggacctctaagcctataataatagagacaaagtcaaaggaatccaactcttaaaaccctcacaccccccacacctgaaaaaccctgacagtcaccgtgctttttttaacagcagaacttctaaggttcttaattcattcaataagggttaacttttagtagcctgtgaagttttggcaatttgacttacgatacaataatggtttagcccattattgtttctcgccagatagaattaaattgggggaatgaaagaatgctccagtgtggcgtagtttttaaggtaagggaaagacttttacacaaagtttccttttcagatattattgatcacccttttgttatcaacacacagagtaatcctatctgtcggttgacaaccttcagtgatttttagtagaaagtggtggagagaagacctgggattcaatcccaacacttaacagctaactaacctcgggcaagtgactatctctaagcctgtttgttcatcagcctaatgcatatacagca

SEQ ID NO: 57511 - DNA, 458 bp, Homo sapiens
attccaggagcaatgcaatatgtaccaaacagaatcaaatgaataatgtagcaaaattttgaaacacctaccaaaaggtaaagttcttacagagcccaggaaggttatttcaggtgcttacctacaactctagttaacttggcttgtttgttatcactcctctgaatgatacgaagcaaagaggtaatggaattccccaagcttgactcagcatgccctttctttccccaccccccacttttttttttcttattttgagacaaagtcttgctttgtcacctaggctggagtacagtggcctggttactactcagtgcagccttgacctcctgggctcaagcagtccttccaccccagcttcctgagttgctgggactatagcaatgcatcaccacaccctgctatgaataattttttttttgtagagacaaggtctggctttgttgcccagactagtc

SEQ ID NO: 57512 - DNA, 852 bp, Homo sapiens
cgggctgtgatgaaagaaccatgacactgaccctagactaaggtttgaattccgccgaggtcactcactacctcagttaccttggataatttacttgatttctccctttctagttctttttctgtaaaatgaggaagagaatggtaaagtctcctttgcattactgtgaggattgccaaaggtctggatcacagttggttctcccgtgggaatcattgccatcaccgtcattgccttgtgtacggccttcacgcgtttcgccagcttctgtgtcattggtgacatcataaaatcagggaaagggaaatctgtaaacactggccgttgaagaatacggtttctgagaatttccactctgaattcacattccgttcagtgttatcgccaccctgtggatttcttgggtaatgaaactcagaccgggaaatgaaaacggggattttcagtaaatcggttccagtaaatctctgctgctcttgtgggcgccctcttttgagcaccggaggaatgagcaccgttcttcattcttttggttttgtaaagttgtagagctgcgttcataagtgagatcattaattaatctgcccttctccgtagaccttcctcctccccaattttcaatataaaaactgattcccaggtagctttaatttcaaaactggtcagtggtaaatttaggaagagaatttaaggtctcctgacttccaatcaaacatagttcccacttgcccaattggataatagatgtttgtttttacaattagctaattatttctcagtatttacttattttataagtagtacataattaatcaattgaccaactggccttatggcactgtgtttacatgt

SEQ ID NO: 57513 - DNA, 806 bp, Homo sapiens
atatctgatttccttaaaattgttattttgaattcttgatcagagagctaaccaactgtcatgtcattggggtcagtaactagtttggtacctttgtccttttgggaaggccatggctctttgcttgctgttgtttcctgtgggtatacttctatgtctttccatagaagggttattaattaattccagtttttcaggtctgggttgtgtttgttgttattgagtctatttgcttggcaaatcctcactgctgggctgttgcctcccttttgactctaggtggtgtctcaacctcacttttaccttgtctttagtaaacggttggagtattaactgtccgaaatgggaaatgtcccaaaggaattaccctggaagtatgagaaacttggctaggggttatggtctggtgacctaaggaatgtacctcctaaagcatggtgctattgaacatctaccctgatttggcttctcctttggccaagttatgaacagtgtccagaactggagatgatcttccctcctccctattttgtctcttgctctcttcaggaatattcctccctgaggacagagaatattcatcttccctaagggagtcataatgcatctcatgggctaaggaagaacaagtttcttgccagggaatccaaggtggtaaataatctgtttgagaacatcaatttcactttattcactctaaaatccatgaattgggggagattctctgcatgtgtggtgccaggaagaataggaaggagggacatcatggaggtggaagtcccatctcctactgtcttcttgatgat

SEQ ID NO: 57514 - DNA, 718 bp, Homo sapiens
gtagtggtgtctatcaaaagagaaatctcaaaattaggaaactccagtcttaaaaactttgatcactgtgagtaacctgtccatcttgccttctgaagaagaagctttacactggaatgtaagcaaatatctctggagagaagaagaagaagagaagagtctttatctttaaacaaatctgccttctgaccaagagggataccctatttctaaatcccaaggctctttgccatgacctggtcttgggcaaagtgaacgagactcctagggcacaaaacgtaaaaaggcattcaataggttgcagggccctaaaaccaagtggctcctcaaactttgcaccctgcatgccttgctcacctgatcctagttgaggcccttctgtttgctcatcaaacatactgtttgctcacaagataagagctagaccatgcagaagtgcaatacattcatggagaatttttttcccaacatccattcccaagatcaaggttacacagttgccaaagattgtagagtattctgaatatatcatctattttcttcctggacagaactaaatccatcagaagtaacttttttaaaaaatgtttctttcttttgcatacaatttgtttttattttagattaagagatgagtccagaggtaagggggacaggagaactgtgacatcagggatgacactaccctttgagagcactggagcagttagaaaggatt

SEQ ID NO: 57515 - DNA, 902 bp, Homo sapiens
ttactttcagcatttattatgcatctagttcatgtttagtactgtgatagttttaaacacatttaaaaagacttgcaagtttatattaaatagtaatacatgtaaatattccggagactttggaaatattttctctgtacatgtgagaagaggtagaaatctatctattgtctcataaagcagtcattgtgtttgaatgagttcatccacatggcaagaattcttattctgtgcctctcccctgcccagtagggcatattgcttcatcagcaccaaataccttcacatttttttcacatatactcactctcccagcaacatctactccatgatcctcactacagggaccaatgtagataaaggatgacatactgtctagccaagacggggaaatcagcagcatgatacagtcattcttcttcaatagctaaaaaagtaagtaaagtgagcaaagcaccaatgaaacaaattcagcaacagctaccaaacaaagtagaaaaatatgcctcataaacgtcaaagatggcagagaaagatgtaaggtgttccactatgaagaactgatccctcaccttcagtcccctgaagcaaagctaagcaaaaataaaataaaataaaaccaaaatatcttggaaattaccgtatatttagtcaagagagctattgaaaaggcaaactcagctagcatggacaaatattaaggaaaaatcccaaggctagaagtacaaacgtactatccacatagagacaagaaggttaccctggcctcgctatatccaggcaataaagatgaggttgggaaagaagacaaagagaaagacaaactaccatggtgggtggggggttgtgtggtgggttctgttgagacttcatggatactttgaaaagagagcagagctcac

SEQ ID NO: 57516 - DNA, 519 bp, Homo sapiens
agggagcacacaggtgaacaggtgcaggagcacttttggatgccagcaggaacaaattctgtgcaggccccgcagcagcatctgggggggtgcccgcacccctgaaacctcgagggggagggtgttacagtgctcttttagctctgctatctgcagacgtcttaagtgttagtagctcagtgggccctttgccttttcgcttgaggcggctgcctcttgccagcaagggcagaggttcagtgtaacaacttttcgtatctgcattcctggctcctgagctcttgtccagcttccaagaaaaatgaggttgcacaaccgaattggagaatggtaaatgagggagattttattttgatggaagtgactctcagcaggaaggggagctggaaagggaatgtgaagcaggaaggtaatcttcccctgaagtccggctgtctccagccagactcttctcgaaagtcacgccttcaacctgtccctctgaagtcaagccacttctctccaacgtcccaccatagt

SEQ ID NO: 57517 - DNA, 2052 bp, Homo sapiens
tgggaatataattttgtatgtatgtccttatgtatatacgcgtgtgtgtccactagttttttgcttgaatgtttatcattcctgtcacttgcaatttaaatattcctaataaatagaaaaatccaaagactaagattgtgatcctttttatgtctatggtatattatgaatacagagaccttgtgcttttattggcgtaggaatcatcttgccctaatattaatattatgaaatcaaaagggtaagattcctaacatcccacataacacagcagacaaactaaagttttaatctagctttggcccttacaaattttgtgccctacggcaagttacatctcgcttagattttttcattttaaagtggaactatctgcatggatgttcgtacatgctatataacacatcctattccagagccacctaccatcagttgagctctaaatggtaaatgccacagtgagaagcagacaggaaggggcggagcgccagcggcgcccggggctacgcgccgcactgcaccgagcggcggcagcggcaagcttgggtgtgagcccgggagccgctttgcttaccgtcctgccggtcccagccgtcgctaggaggtccgcgggccctgcggcaaccctcgctacagacgctgggcgggcggcgacacctggctcatggcccccgcggcggctccgtcctccttggccgtcagggcctcaagccccgccgcgacacccacctcgtacggcgtcttctgcaaggggctctcccgcaccctgctcgccttcttcgagctggcctggcagctgcgcatgaacttcccgtacttctacgtcgcgggctcggtgatcctcaacatccgattgcaggtacatatttagagccatgactaagctaacggcctccggggccagcatgatggccgactcccagggtccgttgcggcgcggcggagcagccaatggcgagccccacagtctcgcgagagtgctcaggcgctcttcgtggctgccctcttagctgctagcggagctcctcagggggcggccgggagcctacaatccctagaaagagaatacgctgttccggaaacagaactgcagttaagaccctcgaaaacatctaagaaagtgtgcatcctaaaacacctgacgaatttcagaatgtgacaaagcgcagaggatgcattatttcaaaacaaaacagaaggctaaaatttgcaggaaaaagaaaatcagtaaaccgggaatcctcggactggattgtaagcaagatttcaatgaataagaagctgaaggtattaaggctgtgatatagaaggtacatatttcatcccacaagagaaaacaataataatcagaaattttcggtgaaaaaaacgcaaaactgtacaggaaaatcatcctccaagtaccagacataaaatgctgcaagcttttgaactaatggcgagagtgtaagaaaatgggctctacttcagtgatcctgtggcaggacgtggatcaagacttggaaccgcagaaaacgaaatcccatagtagcacaaagcttggctgttcagtgaataacatttaaataatcgtaaaatacaaatgttgtttatggtttttattgtttaagggcatacttaattatggttacaaagtggagtgcaaatgttatttaccatgttttaaaaatacagccggaaaatacaagtgggaatgttgaaggagggcgggggaagtaaatggaatgggggttatgtccttataaagtggaaacttgaaaggtactgtctgttgttgagtggggaaagacatttttattacttacagggtagccataaagtttctaaaacggtaatatattaaagagggagagtggtaggggagaacagtatgaagtcaacaggaaatggctaaagatggagagctcaggtagaatagtttaaaaaatgaaaattgatagagtacctggtgtatttgaatacagcctagagagctttcattttccaaagagtgtggggataaattagtgaatgcatatttttcaaaattaagaaaacagaacatataatttt

SEQ ID NO: 57518 - DNA, 991 bp, Homo sapiens
cagaaaatgttacattcatgtatgagcttatgaaagatttctgttctaatcctgaaaaacccaacactgctctgtaatctttctagttcaatcaagaaatcatacagaatcaaaaggaacatggtctgccacctaagatgggggaggcttggtacttttcttcatgaaaaggaactacttctgttgaagatggctagaaaactagatttcatgacccaagaagcaagatagccctagagatcactaatgttttcagaaatgctctgcaagtcatgtaaaggctaattgagaagaagattccattgataggcatggtttagctgtgaaaaacaccgaaaacaagtcagtcaggagatagtgattaaagaacatctaagtttgtagttacgctgaagaaactaaaaataaaagatgcaataacaagtataaaaaccacaagtcccatatactatgagttgtattcaaagtccaagttaataatcacaattttttaaatctacataattaatctatgtcctactctagacaaaatatcatccagtgtctagaatgaaagcaaaatgactgtgcaaatatacaaacaccccctaaaataactattgggtaataggcttaatacctgggtgatgaaataatctgtacaacaaactcccatgacatgagtttacttgtgtaacaaacctgcacatttacccctgaaactaaaagtttttttgtaaaaaaaaaaaaaaaacaccccttaaagcatgatctggctcagagaagatgctgtctaatgaagattttgctagaaaaagccacctactaagacatagcagataaaccacccaagacagtgaggaaattggtgctcctttttcttggaaatcagtattggtatgggtttctacctgatgttacattcagtacagtttaagaaaacatgccttgatatacttgatttgtgtcttatttgccttcagaactagagctatgggttggagataagcca

SEQ ID NO: 57519 - DNA, 1070 bp, Homo sapiens
gcaccccagagtcagccatccaaggagatcacacacactctgcagacactggtgataagggtctgggagcaacacactaggttactttatgtcagaggcaaagggaaaagaaattgcactttcttctcataacaaactccagagtgctcacttgggagactgacagcccaacaaatacaagtgacaaggaagcaatttcaggaatgtaataagggagaactagctaggtttaaaatgtattgctaaagagttatgcaatttttgacttgtaagaaacttaaagaccccatctcatctaaaggtcacaaacagcagccttggagccaaatctggcccacagatgtgatgtgttttgtttggtgcatagtttgaattagttgtcagcatttaaaaaagaacagttcacattttttaaaagtccagattcctgattactgctgggaaaccagaaaatctgtggatcctacattgccagcatttcccggtggcagtacgaaaagccgagcagtgatcgtgccctttggacgttgctcgagtctgcagtttcccacagtccctggctggcctcctttaattcatttacataatctgtctggactctattggcagcttttgagtttaaagcccttgctaagccaacctgttcatttttatagataagaaagcgaggccctgagaagccaagtgactcacccaaccatacgcctatgttggtgtcgtttccatacattcctttttccatcccatgctttctcacttacacggtgaggtttatttagcaaaattttgaaaagagatttggaaagcaaacataaatggtgaggttaaagtctgaagaaactatgttgaaagccggaaaacacaaaggtgatgttaaaaagaggataatttagaggctcgctaactggaactcaagagacttccaataggaaattgttaatgagaggaagtggaaggaagagagaggttacaggcataataagaacaaatgagagaagcgtgagctaaggtaagatgatgagagagagtaaaacaggcactgttttacttgatctgctcccatacagaac

SEQ ID NO: 57520 - DNA, 1168 bp, Homo sapiens
atggattggtttccagctttgataggctttaacagtctaacctgaaattccttattaaaagttgcaacaaagcagactcaaaaagagcttacattgtcaatcattattcttgctatttttatgtaataatcaggccaaggtcaatgagattgacttattttgcaacaaaaatagtgttactttgattatctttcatagaaataggggtgattgtagagagaactatgctgtttcaattgaaaactatagcacacccttgtggattgtcaaattctagccgtgttcactgcctttcagcttttttaacctctctgtaaactgactcctgctgtgttttgcattttgtcagtaattaacatttctgattttaatctcacctgatttggcaccactgagaactaaaacctgactgcctagatccgtattgacactacccagaaaaagccctgcaagctgaaactgggcccttccgtgctctgctctgagaaataaccataactgtcacattgtatatgccattcccagagacattcaaaccacaaacccagaaacacttcagactgccacggcccgtcctccttctatcacctagagatgcgttgagcccaacattcagaaatcttctcaactgattgccctctggcctcagaaactgggtttataaacagttctatctattaaccttggttttcttttgtttccatagaaaggtcctcattaaatgtcttacagcaccatatagagacctaaccggtgggcaccctattccctctggcaacacaatctcttgagatacaactttctgagtaaactgaactcttatacactgttggtaggaatgtaagctattcccaggactgagagactggttcagtgagatggggcaatgtgtttaaatttgtccttttctgcttactcactctcgttccaatctgttttccttccctttgcagatctcttatcttgcaacacctaatccgaatctctctcaacagctacaaacttggcttttgatgtatgaaacgtcctgagaaaaagaaagtttcaaagggtgggataaagggttccagaatatgccacccaatatatggattattttgagctaaaagcaactgagaaccaacagacacaggaaaggctctttctgtcccctaactgcctaaaagca

SEQ ID NO: 57521 - DNA, 3124 bp, Homo sapiens
tgaaggaaagtgggtaggaaaaatctgtagggtggggagactcggggaaatgtgtcctggtccagtgcaggtaacatatatgggtatatatgcgtatatacatatttataccatatttaatatattactctattaagaaattataacaaatttccttttacattacacatccacatattaaacccccaatatgtgctaacaaggttagaatttaagtataatgataatgttctcagttttttgtggtggacactttaagagagtgtaaataataataaaaataatagagtgatcagatcacttgtgctcagggctagacccttcagccccaacggccttaacccccctcaactgcttttccaaccaaatattcctccccctgcaggatcccagggccatccaatcaaccggccaatgacggtttcagagaagcggtcctggggaggggtattatctgcaggaacacgtcctgccaactttgtagtcgagtcacctatttcggttggtagcggccgctatttctttaaaagggcagtggatttcgaaacaggagggggaggtcaggaaaaggaactcagctgcctttgataactgccctgcagccttcccttcccggagcgcgtgctcggctcgggaagcgcccgcggccgccgcatccccgagcgggcgcgtggcgccacctctttccggggcgcccaccttccccgggaatccccccgcccgacggtcccccagcgtctgcggcgcggccgccccggctttgtctccggcgtcgcgctcgggcgcccgctctccccacatttccccgtgtgcaggctgtaacccgatctcccatttcctggtggattctcttaaagaggcagcggtcgagaagcagaacaaaggctattgttttatttcctccttcggattccgcgtcctaaccggaatggcccttcatagataattactttcgttgcatctgcgcttagtgaaacgtttcaaaacccttgtgcacatcgatgtatccaagagacggagccaggggaggtgggaggagtttaataaaacctgttttgtggtgtctggggccacaatgtaacgttttttaaaggtgtcttccttaagcccggaaattggctcggccagcgggaggtctcgcggcgtggagggcgggcgcccgcaccgggggccggcctggggggctgcgccgctcgccccgctcgcagccgcggccccacgcggccccgctacccgggtttcctccgcccgcgcccccgcggccgcccctcccccgcgcagcttttatttccccgatgccgggctgtaacccgagcttttatttcctggtggctcctttaagaggcagagctcagtgctgggaattcacgtcagtttctgcactgaaactctcaagatcaatgagcaaagagctttctcagttctgcctttcagtttctctcttccaggaaggaaaacattcgagagagcgagggagagccgcgggagggcggggggcgggggcgccggctgcgggtgggaggagagaccgggaggccggccgggctgcgtcccgggtccccgcgccgcgccgcgacctgcagaccccgccgccgcgctcgggcccgtctcccacgcccccgccgccccgcgcgcccaactccgccggccgccccgccccgccccgcgcgctccagacccccggggcggctgccgggagagatgctggaagaaacttcttaaatgaccgcgtctggctggccgtggagcctttctgggttggggagaggaaaggaaagtggaaaaaacctgagaacttcctgatctctctcgctgtgagacatgtctgagactcctgctcagtgtagcattaaggtaaaaatcttctcccctccttctacgtggtggaaaccctgagctgcaccggccagggcagtcgtgctgggctcctcagagcaggctgttgcagttgctctgttcgcaggaaattatttggggcgagagggaaagagatgcagctcgcggtggctgctgtaccctttagcgtaaccttgctactcccccccaccgccgagcccctgccggctcctcggcccccacccccttgctttttgacaatgaaatgccggtcacaattggtcagagcaacccggattgtctccagaaccgtaaaacacccccgtaattagtgcgcttaaaaaaaaaaaaaacaaaaaacaaaaaaaaaaaacctgctccctattcctacacccaacatgtgactgaaatataacttttgttcccgaggggtggtcgtcttagaaaaaaagttgttcagtttccactgcgatagaatctttttatttttttaaaggactctctgggtctgatcagacaggatttttttccccctcgtctgattgtaattgcaagcgctgtcggagagacagtcctggtgtcagcttttcctaggcattgcacaatgaatttttttttaaaaccaaggtgaataaagttgctgaatagttattttactccgatccatatgaaagttgagcaatcccaaagtagaaaactcctgtgatggagggagaggaagaactaagcaaccaggcaaaatgaccttctgtgtttgacagtgcagagaggctatctaagcagcactctgtaaatgcagggcggtagatgtttgtaaacacactgctgggctacccagtagttgtgtgtatgcatgtctatatatctgtaaagactgtggtgctgcggtttgttgcttctaaaaagttgttgtaaagtttgccaccattgggaggcaggatgatttatccatctacccgtgttatttttcccatcgctgcatttattgtacactttattcatttcgctgttccaccagtacccaggtagaaagccttccgctcttgtgagaggctgaagctgctgaagtttgtttttggtttggcctatttaatgtgtgttcactgaatggacactacagcaacaatgaacaaataacctgttttcttcgtctgtggggagttagaaaaacccttcctggtttaacactgcctttcaattagagtctgtgtaggggaaacgcagtagttcatcatacgtgcttactaggttttttataattagaatcacattttggtgtttcttatca

SEQ ID NO: 57522 - DNA, 593 bp, Homo sapiens
aaaggagatcttgccatttgccacaacatggatagacctagaggacattatgataagtgacataagccagatacagaaagaaacatattgtatgatctcacttttatctgaaatatttattttaaaagctcaaatacagagacagagaatgaaacagtggttaatgccggtggaaatggggagatgtgggtcaaaggacacaaaatggcaagtgcacaggatgagcgtgtctagagacttaatgtacaacgcaaagactaaagttaacaaggccttttggttctgttgctgttgttgcattacgtaatagtgtgctaagaacaggagacacataacgtcatctaaaaaacaggagatgaagtgggccggtgctcaaacatgctagctccgggaaacaattcaggatgatttgccactgagtcaggtttgttaattttttctacaatagccaaaggctctcaaaaaatcaaggtttcctggtttataaataatctctggaggggtgtgtgtgtttcaggcatctgactcctttatttatattctctgccctggccttcagatgattttcgagcggctttcgattagattatctg

SEQ ID NO: 57523 - DNA, 495 bp, Homo sapiens
ttatcccctcagtgcacccctactgttttgactgctgttaaattgaccttatgcttagaaccgaagtcaaacccgtaccagggctgcaaaaagaaacaaaattaacctcatagtctgcatactctcgaaatggcaaaaaagcctgcaactttccgttgtggaaaataatatacctgggtgataaactgagcaaacatcacccttgcccttgcctctgaaagagagcctgttctagttcatcctggggccagcttggcctggaaccccactggccagctctgtccacaccttgcatattaggacagaaatctgcctaccacattccagctacataaagaaggtggccagcacctgactgcctctttctccttgtgaaattccttggaaataccatttgtgactgcttgggcttgttctgaagaaaattcaaatcttgttctgtttaacaaggattgattgaagaacccgtaggctcagtgctagtacaaagataag

SEQ ID NO: 57524 - DNA, 1212 bp, Homo sapiens
cctcccaccctcacccccatttgaacacacactcacatatatctcacgtcctaatcctactgaactactcaacatttccccaaaccggttgtgctcttttcatgtgtgcaggccttgcatccgctgttcctctgactggaaagctgttggcccatccagttgagaaagtcttccctggccgtgcacgaatgcactaacttgtaaatgtctctttacattcctttcttcccttccagaccgcaaaatccagtctcattcaccttgacatgccctgcgcctgatccgggacgcgaggcatagtgggcatctcctaggttagacggatgggtgagtgggtgagtgaacggagaggtggacaaaatgagtgctcagcagttagacccaactgtgttttgatggtagtgatgggaattcccctggcacatggccaggtgagatgatcattcagcctgaaatgaaagaaacagcagatgtcaggaagtttttgttaatcctgccttgtgcgttagaactctcccgcatacgtcccctttcccgcacactctctctacctttctcccccatttctagctcctggtcttattcatctgtagcatcagtaaacatataccctttactgttcacatccaggtctgtaggggaaattttggttataaaaccggaagagtgtttaacctaatgtcctgctgcgggcttgctttccacgggcctccgggtctgttaaaatgatcaggcctcattatttaggaagctgcctcagccaggcattactaatttgggcattactaattcagatgcctattcaggcaaatgagcaatgaatgtaaagtgcttttgtcagtgaattgcaagtgaagagaagagggagtgggggaagtaaagggaaagtgatagaatgtttgagctttgcttcatttccagaaaggacagccattgcttcctggaagctgggcttggcaacaggcatggaggaatgggaaagatttatttccctttgccaaagctcaataattcagcttgagtatttcaaatcaatacatttcttgcaaagtttccaagggctgcattaaaacagccatttttaaaaattatcagtacatgacagcatcctccgacgagactggcatgtcagggatgagtcgagtcttccaaatagacaagactccagtgagaaaggaggctgccacaagcaggaaaagcgaagttagagct

SEQ ID NO: 57525 - DNA, 1438 bp, Homo sapiens
cacacagctgggaaatagaggttccatgcttgtgctcagtgcctgcatgctgaactaccgtgaaactttttctttttaaaatttagtcataaatttaatttgatatcctgccaaaacaccaaataagcttagagagttaggtagtttttaacgtgggctcggagccaggtcacctggattcaaatgtcagctcttccatttcctggctgagtgactttgggcaagtcgtttaacttccctgtgttctagttttctcctccataaatggggatcattcctgtcttacaggattgctgcagggattaaatgagttacatatgcaaagcatttagaatgactcctggcacatagcaatcacttgcttacaagtaagtgcattgctgttattaggctacacaaaaagcactatggtggggtgttaagagttgacactgtagagctagaccacctggatctctgtcatggcaccaccacttccatctctgtgtgctacagttttctcatctgtaaaaaaagaataataatcattgcagtgataagattcagtgtaaatgttcagtaattgctagctgttactatcaatagaagtatattgtccagagaaagaaaaatgctagtcctgttcctactgctgcgtttaggaattgaagccacatagatctctggaggaggcaggcaggttggtaagggtctacaaactgcagtggaggagttatctttggaccaattaaggacgtttcatctggaggcaaaatgactaagcaaggacgtgataactgtcctcactgtgttgagggttacaaaattggtgtgggtcattgaatcaagttatgagacaacatgggatgttgggaaaagtcaggggatcaggggcaggttgatcctgagtcagtctcttaacttccaggcttcagcttccatctttcacattttatgattctgtctccagcacgtagaacctagagcaaattcctgtttatacagaaagtttggataaggagtggttttgctgaatggctactgtagcagaaaagcttgaactgagtgttgctcaaatcaataaaatcacctgatgactaagccctgttttctattaaactgaaaagagaatgcaacagacttcactgggcttttgtgagaattacatgaggtaatatgtatgaaagcaccttatcaactctgaagtactaccccgatgcaagcagttatgttgattattgccatagctagattataacttttccaagaattagaatataatgaaacacacttaagcattaatctgtcttctgtgattcagaagatccttcaggaagttacaaaatctcagggtcatggccatgggcatggagtaattctgtagaaaaagatcctggctgtaaggtattctttggttttttggattcaaattaaataggagcatattgactacatgaaa

SEQ ID NO: 57526 - DNA, 1765 bp, Homo sapiens
acgtctgcccatacttatttagtttattccttgctgggcaagcaattaggcagttgcaaagggaaggaaataattaaagatgcatcttgccatttgttcctgagaccaggtgcccattaactcacatatcctggtttgctgggctgcatcatgagtgactcttgtttccactccccttgacctgatcccgccacctccactgttgttaggaactgggtaaaagggaagtacagcaagactctctgactcacaggggacctttgggaagtgccactacttttctgctcagttagaaactcccatgttccccaaagcccatttctttatagaaaatacttagattctgactgtaaaacatcccctttataagcaagcgatgcaagaagtttgccccacaatttcccaaactgggaggagggaatggaattgaataaagtcttttgcagtaaggaagactgctcaagtgcgcagttgtaaaaagcgggtaaccgtgatccaggccagtcgataggtggacctgaagcaaagcctgatgttggcatggtggcacaaccccaatccgctgagtgagtgaaaaggcagggaggcccagccaggtgtgcccagacctgcagccttctaagaaggcagtgggtaatgcagaccatgaccaaatatggcaaggccccactgacagacacttccatgtgtgagtcactgagaaaaatccctctgctactcccactgtaccattgcctcgggcccagaaccactgtattcttgcttccacaacaggaatttaaacaaaagaattgtcttccttaaaatgacagaccagaaacacaagtttgagaaaaggtcattgcaacaaaaaaaaagaaatgctgtgtgggtcagaaggtgaagggtgacccagagatagggggaacctgcaggaaattcctcaggcggagcagagagcggtcttgggaaaaggaaataagcgaggctgctatgggatctgctttattagctagggctccaggacttcggacaaagggtgattcaccttaggagtaaaccttggtgacagtgaatataaaaagctaaagggtggggacagatgtgcctggaaggcagccgattagcaggtagcttcccaaactggcagggccacaggcagcagctgaagagcttttattttaatagctcccgcagtgccttttctgaggttcatttcattgtgtctttgtgctttttttctcccttcctcctttgaacaaacagaacagaacaaacatgacctatgagaaaatgtccagagccctgcgccactactacaaactaaacattatcaggaaggagccaggacaaaggcttttgttcaggtagcacttcctttttctcctttccttcttttgggaggatgctgttttctttaaataacggggagtggggggagactgttaagatctctacctgcctatcggatacccaaagccaatcattgctacaaactggataccaggtactggtttgttaggatttaaggaaaatatttttttaacttatgtctgtcctgtaataaagccaaaactaaatgaacagaatctgactcacctttaaaataacgcagtgaccaaataatattatgtggcattaaagtccggtgtagttaaaagcacaaagtcaatggcaaaacaaggaattaaacctagacttccaggttaccatcgctgtaaggcaactttctgaaccagtatttgtcaaaatgcaggtaatgacccacagtgagtcatgaaataga

SEQ ID NO: 57527 - DNA, 1590 bp, Homo sapiens
aattcttaaaaatgcaaatttcccagccgcaccctggacgcattcacccaaaaactctgggagtggagcccagcaactgagccatgctaaggttggtgagccgctgctctggaacattgatccctcccaaactgcagcaaagcaagcacctgggtgtagctctggctgtgtaggtgctactacaatctgctggagtcactgcttgtcggcagagatgccgtgggagctggcctgggtgcctccacgttggccgtcaccaccaggcagtggcctttggcctggaatcgaaggtaccagagggctgatagctcagtttttttatggcaccaagaaaagactttcagattggaggtatgggattttctttattttttaatcctcttttaatataaagtggccccttagcaaactttcaagatatttcacatcagaactggccgggaaatccggcatgtggacagacacggatatgccgtgtgcatttttccgttggaggaagagggtaggcttgggtgctggagggtgttgcctgggggcggagcgagaaggaagaaagggcgctgctggttcacacctcacccatgccctcctctcaggccccaatcaggatggaattaaaagaccctgggaggaaaataaggaaagcaacaaaggaaatgagttccccatacagaaagggaaattgcctttcccgttaaggtcagactggtccgaagtaaaggactggtgcgccttagcaaccgcctctgctgaagccctaacgctggagctctttcgccctcgcagaataaccgggactttcttgcagccggaaccagccacgtcctgattccacactcccttgaggagccagccagctccacatttactcaaagaatccgaagggcaccaagtggatgctctgccacacgattgaagagggcaagctgtctggggggttttccacctcttttcaactcaactattctgagctgaagtactggacccgttttgtttttcctgttttttcctgcttcggtaaatctggaaaaatcctgcaggtctgaaaaactgttggacttgacagcgtgtgtgtagcgccacctggtgaccacagcttatcaaaacagcttccttctggggctcttgtggatgtacatcaaaggctccagcttccagacaggtacacatcctgttctcacgcccggcccactttcccgtgggaatgtcagccactctgatttgccttggctgaaaacctcctgtctttgcatggaaaaaaacacaaataatatgaacaagcaacagagttttctttctctcttaagtaaccaagcatttaaaatcttctaaagcacacatttccctaattgagaaaggaagcagaagaaaaatttctggctgaaattataaatcataataaatggtcggaaataccttctcccttagattcctggggtcctagtgtagaggagacttcagttgcccttgacactacaacatcctgactaaaagcctgtttccaaggtgatatttgatagacatgaaggacccaggtggaaaagaaggtagtctggacggcacggcaaggagtggaacacgcaggctatg

SEQ ID NO: 57528 - DNA, 637 bp, Homo sapiens
gaaagtttcctcttaagtttcgtggagagagactcaggtatagaaatatccttactgccacctgacctgaagcagaagaaatcacagacagcttccagaccaggtaacaccaggaggcaccagtcttcatcctcagcctttgcaggaggacacagcctggtctttagctgtttgccaaatgaggcagtctaattcagggagctctttactgggtttattacaaagttcttatcatgtaagtctcaggacacaaaatgacattgagaatctagtttagcggggtttccaggaaagacgaagaaaggttatttaggtttctctttcatttctcttttgctacaaagggtttgggacattcagttaagaacacattactggttgaggtatgtgacgttactcagtcttctctgcttatgtatctggggaggtatgcaatgacatgacagccattccgtggccagggacaccactgcccaagctggagaccacgaggattcagggactgaagccagcatgggaattcctggtttgagatcagagtcctgagtacctcgtgggaacttgggcactcatccgcaggaggtctagacccccagagaattccttgagtctaaggcacaggtaaatggaagaccct

SEQ ID NO: 57529 - DNA, 1094 bp, Homo sapiens
agctgagactgtagatcccatcaggctggtggtaactcaaggcactgaggggagagtcaaggggagcaaagccaagtgccactggaagagaagctctgcccggcattcccccaccacagttcttgctcctggctccctccacaaactacagtggaggttgtgatgacgcagcctcattgtctgggataaatacgtgaggttcgttgtctcatgccaagggaatcgaggacatggacacacacaagaagtgagtttagcggcagaggtttaataggcaaaacaaagagaaaggagaacagctctctctcctgcgacagagaggggaacccaaatgtgacttctggcctgcgacagagtgcaccggattttatagacaggtttgaggaggtggtgtctgatttacataggatccaaagatcagttgaaccaggtgtgacgtttacatagcatgggggaagctggccaccccaccctcatcttattacgcaagtgggctttccacttgcccagcgccatgttgtctgctccctagggcacacgtggttggaaaggaaaagggaaaatgcggccgccatgttggacatgcctagtcccaggtggccttttcctattggcacagctgccaacattcactgtgcaagcttttagcttgcttgtctatgtctgcagctcaattttacaggctactctttgttagaaaagaaaatgatttggggctgcttttcattaaaaggaaaaccttcccgagaacttccttaccctcactatctgcctaaatcatttctttttaactcctctaacagtgaggccaaggtggatcttgggtttgcacctccctaaagaacaaggtgaaggttctccctccaaaggtatccgtgtctcccaaccccgatgcagagcggtagccacactaaaggggccacagctgccacagaggctcaggggaccgtgtgaagagctggaggagaggaggaggcctctgagtctgctaaaaaaaaacagtgtgacattttattactatcccacatgggcttgggagatggaatgccacccctaaaccaagctaaagctaagatgacctcatcctctgtgca

SEQ ID NO: 57530 - DNA, 1046 bp, Homo sapiens
gatctgcagagccgctggtcccaagagcacacacagcccgaaggcccatcctacacctccaggagaggccaaagagccaggtgcacccgagagggacaggcaggggaggggtgaggaggtgccagtggaagccctgtctttgtggcgtttgattcttttactgttctggcacagtccccacttggctgcctgctagggttttgagcctggcctcctccattgggaaactgatgaagaggagtctgttccctgttatggaggaggctggccatgcctcctgcagagtcacaacccagacggggcctggacggtgggggtgggcgtggttcagggaaaagacaggtctgccaaaatctcccaatcgcatctgactcatcccccagatatcccttttagaaacaatatttgttgaaaacccgcttggcttatcattcctctaggacagaactagaggattttcaaataaatattttgtccctgctcactcagaaatttccgttttcacatgacaaccagcatattaacagacattgcaagaatgctttaaatgaagatgatatatagctttttgatatgagccctgatttttcaaaagcagaagaggcagcattgattttgttttaaaggcgtggtagttcaaaggaggtaaagcagagagataccaggttcaagggaaggccgggaggtaaaatcaatagggtagaataatgggaaagaaatcaatgaattggagtttttttaagtgaacattgcatgcaagggagtcttccctgacctccatgctcccgtagcatcctgaaaaatgactcgcatttccaaagcacctcttctatgtccagcactataaagtgttcaactaccctatagtatagggccaagcacagtggctcacacttgtaatcccagctcctggggaggccgaggtgggaggatcgcttgaggccaggagtttgagaccagcctgggcaatatagtaagccttgtccctaaaaaacaataataataaaagtttcttaagaaaatgaaggctgggtacgggcacagtg

SEQ ID NO: 57531 - DNA, 804 bp, Homo sapiens
attaaaggtgatggccaggtacggtgactcatgctgtaatcctagcactttggcaggccaaggcaggaggactgtctgagtccaggagttcaagaacagcctgagcaacacagcaagatgctgtctctattttttaaaatgaaaaaataataataaaataaaattggaggtgaaatgactggctttgtgttttcaggagggagaaaaaaatgcctgcggtttgggaaaaaactagaggaaaactaaaaaaaatcctgaggccaggtcttccaataggctctgtgagttcagcaaattctctcccttaagcaattaaaaaaaaaaacaaggtcaaatctaaccaccaaagcctccaaaaactgaccaaaggtcatacaacaaaatgagaagcatttattccagaaaaatacaccgcatctcaataagaactgtggtattttagctaggggctattcctatccccatctatactgccaggtttgtggcataaacattctactgtgggcaaacatggcaggccataaagagtggtagctacctttccctgcaagaggggactgaccttatttggaacgaggcatggaaaaatctgtacccaggaatgttgttaaaaacaagagtggactgggcgcagtggctcatgcctgtaatcccggcactttgggaggccaaggcagggagatcccaaggtcaagaggtcaagaccatcctggccaacatggtaaaaaccctgtctctattaaaaacacaaaaaattagctgggcatgatggtgtgcacctgtagtcccagctactcaggaggc

SEQ ID NO: 57532 - DNA, 891 bp, Homo sapiens
ccccctgccaagtaaaagtgaatactctgtcctttgtgtccccaccatacagatttccatagcaaaacttatagtttcactggtttattcatgattctatataatcagtctctttatatattttgcaactagtttgtctcagaaggtatactagaatatcctgtcactcaaatctggaagctatatatgcttcactgactttttcattaaatggtctcatagagagaattttattttttttaaggtaaatttatttcagtcatgctctatgagaacttcaactacctttctaataaatacatcaaaattagtttctgaggaaaattttgtccttgaccttgagaattcttggtcttgagaattagaacttatccagctcacctcacctgctttaactgaattgcactttgcccagatgccgcagggacaaatgccaaagaaatgtgtcactgtggatattataaagatattgttgaatatatttttcattatatcatatagcagcttctttagaggactaatgggaagaaactggtttcatcatctggagtaaatatttttttcagtgaacagcttttatctaaaggacattaactcatacctgatactttcttccctaaggaatctggcttaaaatcaaatgtgtgtggaagtatatgggaattaatgacatatgttttggtatgtatattttcactcctggtctcatcttacatgtatactcttatatttccatctcaattttaaaattttattttataaaattaatacatttatttattttgcatcacttttttatatcttcctaaaacatcttaaatccttttagagacaaagtaggaaaaacatttactatttttttcagtttagctattggggattaaacatttt

SEQ ID NO: 57533 - DNA, 1702 bp, Homo sapiens
gtgggaggatcacctgaggtcaggagttcgagaccagcctggctaacatggtgaaaccccgtctctactaaaaatacaaaaattagccaggcatggtggcgagcacctgtaatcccagctacttgggaagttgaagcaggagaatcacttgaacccacaaggcagaggttgcagtgagccaagatggggccactgcactctagcctgggcgacaagagggaaactgcctcaaaaaataataataataatgatctatttgtgtgatagactaatgtatctgcctaattgcttcatctttttcaaaatcttcaaagcggttatggtcttctatacctctcctctggtcctaattcgctgcaacagacttttacttcactttcttctgtcttaattaaatccacccacagacacacacaaacagggagaagacagaaagatttggagacccctctatctatcataagccaaaagctattagatttctgaatgtcctggatcttccagcacatttcaaagtgactttgttacccacaatggccataatgcaacattgttttataatgatttaaatttgaggttttaaaaaatgataataatatagccaattatactttttattcagctgaaaaatatgagggcctgaaaacaatgtaaatagtatttgagaagagaagacaaatccaagagctacttagaaggcagaataaacaagaattggtaactgattaaatgtgaggagtgaggaggtgggggcctagaatgactcaggatttttagtttctgcaaccgttaggtagaatgacagttgttcacaaattctgatattttgttatagggttttcttggatgtggtcttctctctgtacttaaaatttaaaaaaaaaaaaaaagaaaagaaaagctttgttaaaggttgttttctcaagccccaataaaactaacggataatccaaacagcctctttccagacttcccatcccctacccttaaggccattttccagaatactctgaaattaatgattatattaccaccacatcccctcccacacaccctccccctccctccccctgcccctgcaatctgggattatgtaatttccttactttcagcatgaatcccaaacttcttagcatgacatataagagcctttctaatttgtttctctgcttttggttcctcatttctcacggctctagtatcctgcctattgctaccagactgcctttcataaaatacagtatcatgtaaacacaaatcctttataactggggtccccaacctccaagccagagaccactaccagttcatggccttttaggaaccaggtcacacagcaggaggtgagcaacaggcaagtgagcaaagcttcatctgtatttatagccgctccctatcgttcatattactgcctgagctccgcctctgtcagatcagtggaggtattagattctcataagagcataaaccctattgtgaactgcgcattgcaagggatctaggttgcgtgctccttattagaatctaatgccttatgatctgtcactgtttcccatcacccctagataagaccatctagttgcaggaaaaaaactcagggctcctactgattctacattatggtgagttatataattatttcattatacatcacaatgtaataataatagaaataaggtacacaataaaggtaatgtgctta

SEQ ID NO: 57534 - DNA, 555 bp, Homo sapiens
gtttggttcacccatgccttcataacttcaaaacccaataatcatcaatacataatgatgacaagataaccagttcttgaatattaagaaactagaattgttgctttagcatgtttaagactatgcacctcccccctcttccctctctgacacacacacacaaaataacagcatcaacagcatcagcaacatcatgaaatacctacaacaaaaaatttcaaccctggcagcacttgagaatgacctaagaaatttattttaaaatatccattatgtgggttctttcatcagagattctgattcaattggtctgggctcgaactcaggaatcaatatttttttaacagcttcccaaggaattctaatgcactcacacagggcttagaaccagtgaagaggaacataatgttctcaagcacctgtttatccatagcattctattcttgcacagctggtgttaatgtatttaactcattaaccactgaccctaaatattagctaatcattaagccccagttggtactcgcctgtgtggaggttaccacatagtctggg

SEQ ID NO: 57535 - DNA, 2409 bp, Homo sapiens
gcggtcacatgcctgaaaagaacttactatgaacgccagtaagaactttaccaaaccaaaactacaagccaccgtatcgagcagtacttaaattcctctgctggtaaatgctccacagccatcacagccatctcaagttcaacactaaatagtttgagaagagctgccgacgggccagtcaaaaatctttgtgaactgtcacaaaagtcacagagcatgtgtcagctttgcagtccaattcaaaacatcatagtgccatcgaattcaagcgattcccagagcaaattatctcgaacagcctatgcaatttaccaaagtgccaagcagtccccaggggtgcagagcaaattatcattttggtcccaggaccggctcctcttcacacgaggatgaatttccctacttagtgccaactgtacacttgcatactccgaaaataggggcaagccgtgaataccagaggttacaagggcaatgttttattttattatgggctgaagctcagaaggctcccaatgctgaaacgctcgacctataaccccggagtcactttccaactgcgctctcacccagggtcattatatcccaaacggaagccaatcattacctgtaacaaggcctggaaaaaatagcaagagggctttaaaagttcacctaagaaacaccgaaacggggtggggagtgggtggcggggcttcgatggataaggccaaccttaaagcatctcggactcaaacattttaaaagccaaaatacgtacaaagacccttttccctggaagaccccaggcagagagaggcacacagacactcagtcatcccgacagcatggggtgccaagggttccctaagaccagcagccgggatcgaagctccgatgtgtccggggaaggtctgggaagccaggccaggtccgcattgtggccgggcggtgcacgcagcccctgctcccgggcccctttctctccccctccccacgaccaggcctctccccgctcctctccccttctcccttcctccgtccctcccctccccctagacacatacaacaaggccacctccccccgaaccccaccaactttccagtgcccccactcttcccacctctcaggagcacacagaagctgcaggccaggaggctcctcaggacggcccccatcttcccttctcgcgttctcttctctcaccggcgaggggtggccagaagtgggggaggcgaggagccggggcggccgccgcagcggcagggctgcacgctcatacttcccagcttcccagcgagagaagaaagaaaggggcacgtcaaggttccgcgcgcgccgccgccgccctctctaccgcgccgctcggccccgggctcgcgcgacgccagcgtctgcttccatcccgccgcctcctcccccggcgccccgcttcccccgcgcagctcctcattcagcctctgcctcgcgcagcggcgcagggatacggtcggcaccgcctcctagggtcgccgcgaccgtgtccctgcgcgcaacgagccccttctcccggtactgcctcctgtacggccagggaagggagtcggcaaccgcacgcacagcctctgcctgagaccctgggagaggttctgggctagcagaggcgaactgggagggaaagcctcctcccggtggcgcattccagcgggattctttcccggaccggccgcttcggccctccccgcggagggcgtgaggcggcgttgaacaacattggagccggcgtggtcgggactactttctgcggctcggccgggcagccgtctgccccgctctttgtgcggccgccgccggcagggccaggtggggctccggtctcgcgcccccagccacctgagactgcccagccgcggtgcacgcgcggggagccacggcggatcccgttgcggggtgatgagctccgtcttcggggttggaaatcggtttcagcatcctttttttgggagggcggaatttttgaacgctgtttacaccggctttcagcgtggatctggtgaacgatattaaaacgccaattcaaaactgagattgtcatttttctcccgccttcccagaaatacaaactgcccccagaattaagcccgaccagctaaagatttctaaactggcagataaaattccaagataaatgcctcaaaacctaagagcaaagggacaattggacaagactatttaggattttacaagttgcatataataacgaatgtttggcatgcttcgattatcaattctcagcttgagaaggaaaagattccctagaatctcagactgtgcacagcctctgctactcccagtgcattgggcattcaggagtaatggcccagacgccccctgaaatcacctgccaggctttcgtctgggcagaggcgctccaacagttaaccctaatg

SEQ ID NO: 57536 - DNA, 785 bp, Homo sapiens
gactcaattcaaacaggacttcccctattaaaaaaaaaagtcctaacatttcctaagaaaacttggtgtctccatactaaactttgttcatacctatcgggtcatgcttggcacacttttttgttatttgtgtattaatcgcttttcagcccccgggggttctaacaaggtgcctaacacagagaagttgccccataaatgcttgttgaatgggtgagtgaaatgaaggaaaagtgccacagcagtgccttcaaatttcactgacaaaacttgtactttggccagagttcattggcttttattagcttagactgggtttacaacaggtgtctctgtcactaaactggaaagtaggtgaaaagctaacctcaggacaccaaattaaatactttcagcactgtgccatggtagcccttggatcacagagcatgaagtgtctgagcagtaatttccagctgctgctgccagagaaataataaatgatgttacacagaaagtatcacattatagtttattatacatgaacctctgtgagagtaagctgtaaatggttcgcaccctagagcatgggcttagtctttccaaacaaatccatttacttgttatctttataaagtcctgattaaaacatgttttggagatatagatatatctaacacatggaccatagtagtctcttgtgagtatctgaatcaaaattttagtatctagatagcaccaaacttagaaaagtatgcccttttacagaattacaggttcaatttcatttggctggactacatgtc

SEQ ID NO: 57537 - DNA, 822 bp, Homo sapiens
atatatatatattatatatatgtgtgtgtgtgtgtgtgtgtgtgtgtgtgtgtttgtgtgtgtatttatttatttatttttataaaaaatagagacagggtctcactatgtttcccaggctgatcttgaactgggctcaagctatcctcctgcttccgcttcccaaagtgctgggattacaggtgtgaaccacctggccaacttctgctttcttaaacatccttacctgtaagtcattagggagttcaagtcttcagcattagtttgctgcccagttctccttgcctggcaccaggcaataaatgcctcacttccgcttgctgtaaatcccagcgtcagtgtttgtttgtttgtttttcctgtgtgctgcgtaagcagacccaagttcagttgggtaacagctaggattctaaaggttaagggaagcaagtgaactttgttttggctttttcccactacaccagagataaaccagtacagggagtaaagtcccatttttacaggctgtatatgagaggacctgtgtgcagtgcagagcagctgctgctccgggtagaaaagtcttgcctaaagatcaaacaatcagtatgtcactatgagttctccttgacccaagagctcttgcaggcctggagggaacatctgtcccagagtggtctttatggagaatttctagggttggtccattagggaaaatgtccccaaggaacattgattcttacctatataagaatacatacacccaggccgggcgtggtggctcacgcctgtaatcccagcactttgggaggccaaggcgggcggatcacgaggtcaggagat

SEQ ID NO: 57538 - DNA, 1394 bp, Homo sapiens
atatttttagcagagacgaggtttccctatgttggccaggctggccttgaactcctgaccttgtgagcttcccacctcagcctcccaaattgctgggattacaggcgtgagccaccgcacccagcctgccctgcttctaagcagtccatctcccacttcctcgtgccaataagctccaatccagataaacctgaagccttccctttttgtcactgtaaattctctcactcctctgcctgctttgaccttctgccaaagtgatggaagctgactcccatagcatagcaagctctgagtaaatagcccctgtactcatttatttccacaccactgaatgaataatgaaagatgttataaagccaaattatgaaaagggcatcagttattaaacatttgtaaaatgttttacaaccatcttagtatgcctcataaacacctcgtgaagtgctgccatccccgtttcagagctgagaaaattgagaaggaaccatgagattaagtgacttgcccagagctatgatgagaacatgagccccccagggtttgaggtctgttgtttatccactgagcttgagctgcgctttggaatcattaccatcttaaagcattttaccctgtgttgggtgaatattaagaagtagatcacatttcagcctggcaggcgcgaaagtattgtttttagtttgtttttctaaattttagtagaggacatatgggctctattaactttactatgtagcacaatttgaaagatagtttcttttccagcaaatttttcaccgtaatttaacattttaaaattcagcacacaccgtcctccctggatacttgtttttctcagagttgggcctttttcctctccactgcagcttggaaggtcgtaaatccagccagggggattttattatgcctggggacagttttcaaagttaggtatgagtggaaggaagggagggcgggtgcaacagcgctggacaaagtccgtctaatgcaagactttcctttcttttttttttgtttttaaagataagaacttttttggctttctccccgcaaagcttgctgatgatgttgactgatgaggacatgaaaaaagctgagatttgcagaacataactggagcataagaacgcctgtctggaaggcaggggctgctgggaaaggatctctctggagctccttgctggctgcaaaaatgcagctgtccctattcctctctactctgggacatttaaaaaggaggctgtgtggcagtagcatttggcttgtgtgccactgtacctggtcagcctggcatggaatgccttagtggtttgttaggggtcactgactgaggctaaataaatttagcaccatgtatactttcattaaatattaaacaatgaggccaagca

SEQ ID NO: 57539 - DNA, 2054 bp, Homo sapiens
acggggtaaaaggatacaggcgggtgagagaggatgcccctgagttttaacgtctgcatacaagagtcgctaaaacttactcgcacgtaattagttcaaatattggaaatcgtcttacagcacactataatttaccaagatgcttataactgtatacacacacacactctacagagaattagacaattagcagtttcaataatgaatacagagtcaacgacaagaaaacagggaacattttctcttcctttgaggaaatgcatgttgcctactgagctattcttctgcctctccttctgatgtcaacgcagagccagagccatttatggcaggtgccttgagcccgcctagaggtcccctttggaatactgcagcgactcaaggatcctggtcagcccttattggccccagctggtcctttggatgctcgggtgtgggtgaaggagcctcggcccctggaaaggaggggaccgactctctccgcaggtagcgacgtcgcctgcggccggtcgggggtgggtattggggagacccctttacctggcgtcgagaggaccccggcgcccctgctgccatccaggtgcgaggacagctctgtcgcgcccgcgggaaggaccggcgaatccgcgcgggggtctcggcgaggaccgcagcggatgctccgcagctcccgcaccggcctggcgggttttgtggttagcaagttcctgcttccgtcgcagcgacggcaagtttgccgcgggggaagggcacgttcctgccctgcaacccggagctgcttcccggcaacattagcgcgtccctccccgcggaggctccgggctcccggccccagcgctgagccccgcagggaggtggctccccccaccgccccgcgctcccccccagctcagccacaccgctgaccccgggctgggcgcgctgcgagggggagtgcgtgcctccctgctggtggcccgagggtctgcaggtgagccttgcctcgcggcccgcgcaagttaaaataaatgcacatggggaaaatgtcaaacagtacaaaaatagacacagagacaagtctacccctcacccccgtgccccagtctcctagtctccctcctcagaggcaaccactgagagcagttttttgatgttcaagggcttatagtgcatcctattgggggcatagttctgagaatcctctttccataattggaggatggagtcctcaattaaagatggcaattcttgagttaaatattatctgcaagacaaacttcagggaaggtatttggctttctgcgggatttattgtttgtagataggataataatggtgaaaatgctggtgtctgtaacatatattaaaactgtatccctaacacttagcatagtgcctggtacacaataggtgctcagtaaatatttaactaaaatatttttgttgactgaatgaatggaaaagaactgcatagggcataggttgtggaagtttctaaattactgctggccccatccccacctccataaacacacacacaaatgcaacgttactaaaccattgacacttagtttgccatatggtctaacctttgacagtatcttcacctctgttttgaaagagcttgcagacctgaagcgctatgcaattgcaagttaagtctaggcctgtacggccaacagctacacaccctagtcttaaccaataactacaggaggattaggttgactgagaatgcttgtgaacaaaggtccattgtgtgaaactaactctacttgtaaccaaaggatgactcttgaattacaatgttgctaaagctaggtttgaaagagttaccaaagaaaagtaaacaccagagtaatttcccattgcagtgattttcctgatgcaacaagggactgatctgcaagtgtgttttatcttttatcatctgatacacttcagggttcagggtgtagagctatcacagtttttgaatctctctacatggggtaatccatgctagttacaaagtagacctttccattattagaaacttcgtattcggtgctttaatacaatgaacctgtttcttt

SEQ ID NO: 57540 - DNA, 2741 bp, Homo sapiens
gccaggatggtcttgatctcctgacatcgtgatctactcgcctcagcctcccaaagtgctgggattacaggcgtgagccaccccgcctggccagagactacattttatacatataaaatctcaaggcatttacttgaaatttcttgacgcagacaatgtaatataaaatgagttgcaaagttcggagaacgctagagccagctaactccttgatggcattgcattgctaggtctactttcttgccctagcaaaaatggcagtttcctttctggattactccctcctcaccttctgttagtttcagagtgacttgttgataactgccaaggtccccagaaagcgcctagccaaaaaggttcttcacttctctttaaagatgtgcactccctaatacatgaaacagcattttctatttcttaatttttctctcatttccagctgctgctttcaccgtcttctggtatttttttgtttggtcgtccactgctaaactcccagctcttcagaattcaaaatgagctttgcatccaagctgttgtgggttcgaatcctgggtctatctagcgtttctttctccatctgtaaaacagggttaaaaatacctattttgtaaagttgttctcacatgtgggtattgaagagcttaatagtgtgggtggtgttttaaaggtgacgcatccttacaacaggaaagggcttaccctcttccgcagttctggcttcgaggaggtcaagccctttaaggtggcatcgccctaagtcgcaggagcgggtctctccgcccctccctcgggccggggggcggggcctcctaatccggaactgaaggtcttgcgtagccggcaccgcccatctgcgtcccggaaggagcgagcttgcggagcgtgaaccagtgagtgaaagcggcgccgcccgccggccgcaggtgcggcaaagccagtgtcatctgccggttctcttagggctcccggaaagaaggagggctagccgcgtgcgttcgcgccgcgcctccttgcgtttctgttccccaaatagggcctctccttctcccgccgcccaggcccctgcgtgggctggacgcgtcagccccacacattagcctcgctgcggcgcccagactctgctttgcctccccgtcccggtccctggcccctgccctgtcgcccgccgccggagcggtgaccgcccggcccgccgttcttctgctgccaccgctgtcggcaccatgggcagtgagcagagctccgaggccgagagccgacccaacgatctgaactcctcaggtcggtgtcctaacctcccaccctcctccagcccgccctgtccccttgcagagcgggctgcctcccagactagggtcagggactgcggacgggaacgcacagaaaaagccttcaccgtgctagtaggaaaaaaaaaaagtcaccatctgtcctggcctcgattcccctgatggaagtgcgtgtgactgcaagctaagccagcgtgggcgccagtgcccttatttattttcaaaacagccgtttctcccagctacagcctcctgtttaaaagacgagctaattaatttttggctctagtgctcatggctgatgtagtgagatttggctcacacagtggatggattataggacctctaagaacagtctgtttcttaaaaacgggtgttagaggttccttttctgaagggatatgtgataggtgtccacttgctttgaaccctttagtgcaaaggtctccagaaacagctttttcttctcagaaggtgtcttggtccgttttctaatcttgtagaggttggccagacagcaggcactggtgttttccattgttgttctctgtccatgatttttagacttctctaagcgtttgagacaagaatgggaggattattgtgtttgcaatacagtgagtgttcaataaatagataaagcagctgatgtttaattgaggaccatttgctgctttttttgttacccacacgctaggacagctgggagtgctttggttaagctccggggttgctaacgcaaattggttaaatctggggcctaaaaagagtcgccgattttagaagttctctgttcttgataggagctgtaattcagaaataggcaagctaatagatctaagggtgtttcactttaaggtgtgactttcaagactagttcagacctacattctggggactggattggggcagctttgaatggtgagcagcatctactagctttgctacgtttttctatttccttggaagggccagagtgtcatatctgttataagaaatataataattgccacctttgacattcttgcctctatggcagggcagaaacatattttagggggaagcggtgtggcatctttttaatttgttttcttgcccatgaaccaacagcattcgagcatttccgatgttagaatttgcctattcccctgtgcccggtactttacatacatttacatataatttttgcagtaatcccattttacagataaagtagtagaggttagctagagtgttttgaagtcccctttcctctggtatctggggaaggaggaatcacaatttatagcaggaaagatttctggcatggcttttgtaaaatgttaggtaaattaccaaaacaggtaaataaatatttcttgaaaagaaataaaagcagcagagatttttctagaagagtgaatgccaagcctccggagacgagcttctaggaggcagaacagttctatg

SEQ ID NO: 57541 - DNA, 1140 bp, Homo sapiens
tgggattacaggcgtgagccactgcacctggcctgctcttcaatcttttttaattgagggcttttctctaacttaaagaatcagtatctttttatttcagtaaatcttatgttatgtcaaaattaatttttctcagccataggagaaggaaaaaataaatccaacagagagttaacagttacataggccaaaggcaaattaataataaatgccataggtctttctcatattttgccatttttaaaataagatggccttcctttagtgtagtaattaaatttatagcagtcctgtgtttaacaacacttttaccactagatgtcactagactaaaacaattggtaagcttgttgaaactgctgcaacctggtgcagtcttttcaaaggcctttggttaataaggcttcctctgtagcacctgcatttctcataaaactaagtcacagcttgcttcaagcacaagctgattgggaaatatacatgttctgtgacacgttagtaatctagaattacttattttagtgtttatcaggacagaaaaggacaaatcttactaccggaggaaactttttagtgaccttaattttttggagagaaaacgattttcagtctatctctgtactcagagaagcatttatcgtcacacctcaggtttctcaagagttgagattttgtccttttttttttttttttctcgagacggagtcttgctctgttgcccaggctggagtgcagtggtgtgatcttggctcactgcaagccccgccccgccaggctcaagcaattcttctgcctcggcctcccgagtagttgggactacaggcgcgcaccaccatgcctggctaattttgtgtatttttagtagagatggttttcaccatgttggccaggctggtctcaaactcctgacctcaggtggtctgtctgcctcagcctcccaaagtcctgagattacaggcatgagctaccatgcccagccaagagttgggattttgtcttagacatcgtggatttcttagggcccagcacaaagcttggcacttggtaggtactcagtaaatgcaattaagcattagggtagtatactagatgtcatgggggaaaagatagctcacaggtcctctgctctcaagaagtctc

SEQ ID NO: 57542 - DNA, 4682 bp, Homo sapiens
aaaataatgtttttaaatgagcatatgaaatctgtgttgaacagctgcggtctttccggaacactaacttaaaaaatgctcagcatactttttgaaaatcaaaagcatgtgggtgggatgaagtcacctgagcaattttctataattacaactttcaaggccttttcctttgtctttttccagctaacctaaaatacacatgcacgcatgtgcaccctcacacagacagcagcacaaacctgtgattttcttctttctctctatggactttttggccttgtttttgttaaatagttgcagttccctaggaggatatgtgttgtcttgttccttctctagtttatttgaaaccttatatctttgagaactttggaactccccagaacaggctagatgtccacctagactcccaagctttgaatgccctgtcctaaagtatttctaggtgcgttggatctaaactgattcccctagggtgacagtggaaaccccaaaatgccgacatcctagagaatgaccaggaacatgctcaagttgttacacagttttttgtacgtgctgaggttcctcagtgccatcctggtcagccagtactggaatgtgacagaactggcatttgtgcccaggaacagcctacgctgggaattcgcttctgcattctgataattaagtctgctgtgctgctaatattgttccctgaaggaaggagagctagggaataatatcattcccacttgtaccttttaattaacagaggagtggaatggaaagagttttaaagaagactttgatgagagaagatcggtacctgacatagtctggtaattccatcattgtcgaacacattttaagaataccaccgccagttttttcagtgagctaactgaaaataattctaaactttggcttattttatgtgtagaataaaattattgattttccaagagcattcattaagaagtgccttgctaagaagtgttaagcgtgaagtagtgtaatatgtctgtcctactattttaggggtcactccttcttcatcttcctcttctctttcctctaagtaaccaaagctcttcacctagaatggaatttggggcttacattttccttactatcatatagctgtttcttgttaccgaaagcagagagagctttttcagggaggttaaaattatcgttatcttgttatagtgttattttttccttcttagtaagttaggagcaatgctttgtcttcctgaagctgtctgaaaagatgcttgtatacatgtgtatagcgctttgggtcatagaaattaggtgttatgtcatctgtttcagaagatgcactaatgcatcaaaaacaagtgacagggaaaacaatgcagtgagtaatcttgttgcctcaaaactgagcaaacgttttgggagagcaagttcttgcgggacatcactaaataagaatgagttgatgtcacacttggcaagaagcaactctttaaaattttttttttccatacaaatagtacaacatgactgggaggagggattgtgggcaaagggtaaagaattatggagggaaaatgagcaggagaaggaatgtgagaatgagctgcttgctacaaaaataattaatatgtaatcaaagccatgtttgttttgtcaggaaaaatctgagtcagaacatgagctgatgaaggggagagatgtttaccatgtcctcccccacaccctcagagggccgttgtgtgcagatccctgcggagggttgtgtaaccatcttgactcattttcagggaagaatggcccctgtagctcttttggctcaatataatgctgcatcaaggatgagtgaagaagtctctggaatacagtgctatcaaactcaaaatatggtcattttaatgagaatttccaaacactaggaggcaatactgtgcagaccttgtgccaccacctgcctcccccttcccagatatctgtgcgatattgggaattcaggcagcccaatcgatagctgattttaccttttcctacaaggcagaaaatgtcaagattagccaactatttattgaaattagttggagttatctggctacatgagtgtctgtggtccagtgtatcataataagagtgggagagacggttggggtgctactggcatcttgggtgggccagcctttattgtgtgtcactgccgtgtattggcaatttttgtccctgcccactgaattgccagtggtgccccagtctctgcgatggccaggagaggccttccttcttccagattacctctgtgtgtttcaggggggctaaaacagtatgtgttttacagtattactaagcagcacagttttctttgttgttccttagcataaagatcttggaaagttttaagaagttgtgtgtttatactgtagcataggtttcattcaacctatcactcctattcactcctcagagtgaatttcagggaaaaacaacagtattgggggaaaaagtttggaaaaattggatggagggaaggaaaaaaaaaggtgaattgcaaaagggtttcttacgtagcccactattgttccccaaatcaacactcactctccagctctttgggtggttgctctgcattttcaagaggcagcctggggtggaggtcagggttgcaggtaaggtagaggggaaataagagaggacagggaagaggcaggcatgaataaaagatttggattggaatataaagatggaatacaatggagataatgaaagaccataacaaagaaacaggagattttacatggcattgttaagcttacaatgttggcattttggggacaattctgagtaccacagatctagaacttctaaaagaaaaaccctctgagataattacagcagttaaagaccttcacatacatgttgaattaatagtatttaatgtccctttgtaggtttcaatcttttaagcctgtcctgccaaagactgtgtccttctaggtgcttagccagtaatttaggtgtactgtcaccagttgtttccgtcatgacttctaagtctcagcagccattttcccttaggttttattaactgagtcagtaactcaaagtgtcattgttttccactcatctggactttctgaaaataacacagtgctttattggaaaagctaagcatagacattagccaaatgtttgctaaaaattaaccaaattaaatgttattaaataagatgtgcaaatagaggaaaattttgagaagtatgaacaaatcccactaatctttgttgtcagtcactacttagaaccttggcttcgcaccaaggctgaattaagttgaagaatgttttccgtaatgcttcccctaccttttaagttggtttgaaaacattcagttgcatgtgtaccactggatttttagctttttcactagttgttaccctggcagccttgattcagtgaaaatcttgtttttatcacaggctatttctctgagcagccaatgtttcacgctctctccctgtctaattgtctggccttggtaactcttagcaagagttgaaattacctcggtcaaccacatgacaaaagagtgggcatgggttttcctgaatgtctcctgaggtgaccaagggtggagtggtggtagcataataaaccccatgggaagtggagccatagattccatcagctttgcagaggggccttagacccagcagggtttaagaaactgctgtggataggatgccttgtcctccatagagattatcagctgctacctagaatttctttttcatttgcagtatgtcagcatacagaaaaaaaaaaaaaaatagcaaacacctgtgtattcatcaaatttgtcatattttaatattttgccatgtttgcttcagatctctttccctgcaggaagaaaaatacacgtttcaaataaacaacgccccctccccatcctttatatccttccctgatattccctcctcctcccactccacagggaattattgatctgattttggcattcatcatgcccatgtgttttcttcgtggcttgtctttttcctacatgtttttgtatatctaagcggtgtagaatattctttcacttgttttgactttatataagttgtgttctatatgtatccttcagctacttgtgtaactttcttttttcttttccttataattttgagatttatccatgttgatatatgtctcacttattttcactgctgcgtagtattccatcaaatgaatatttcacagtgtatccattgacttattagtgaatatttgagttgtttccagttgttttactattaaacagttttgcagtggacatctttgtacatgtctccttttgcacatgtatgagagttttctctagggtatgtaactaggaacaaattgctgtctagtagggcacatgtattttcagctttactagatacagtcaatttactcttcaaagtagttatgctcttttatcgccttactagctatatattagagttcctgttgttccacatcctcagtaaaaccggatattgtcccagctgttccttgcttattgattaatttaaagacaacatcgtgcttagcaaccatctcaaacatagggtcagatgcaaacttaattttcttataccatgcttcttccttttaaaagaattgttttgatttctgagttacaaatccaagataactat

SEQ ID NO: 57543 - DNA, 5498 bp, Homo sapiens
ggagtacaaaatcttggtgcataaatttcatctgagtttgtttctttgggatagatttctagaagccagtaactattcatggaattagattggatagctgataaaagcagggcatcaagggagaaaaaagagttgagagagcaaaacaacatgcttaaggatcatgagattcgtgaattcagcttctgtcatatttgaattgagtggcaaatttgtctcttacctgaatttggagacccttctctaattagggatgattattagagggaaattctgccctactgtggacaccagagagttggttgtgtgttgtagtgttcaagagttttatccaatattctgcttcctgcagagttcctgaattgagggtcttttgtggaatatctcattgaagtagacttttaaccttgacttgctcaacatctgatcagaagcagctcgttgtcatataaggaaatctgctctgttatggaacatctttgagtagttgagttcccctttttcccataagtccaaatttgattccctgtcaccttcaattgttctttaacttgtttttaaacaaaagtctccctaaaaataattccagaagtatttgaactttatttctctattagcttctactgtaattaacatgaaaacaaacatgttttaaagtctttgtttccttctaaggtataatttagctttatcacgtcttcatagtgaaagttgtatacgtgaacgttggtaggatagaaaaactttccacatagttttatacttggtgcccagaaaacttccaaagtgtttaggtactactcattattatttcttagaaattgaatagaagcagtggcttgagtatacacagtcccactttttcgttaataataaccacatttccctttttttttttgcacaaaagtgttacatgtattttctcgtttaatccttgtacaacctattagggtaggtattttcctcatttggcagatgagggtgctgaggctcagagagatgaaagacctttcctgtcacacagctattaagggcagagctaggatttaaactcagatctaattctaaaacctgtatatttaactagtttgcacatctgtctccctgacttaattgcatcataaaatcaaagatatttctcttcaaaatatgttcatgttggattatttggctgtttcactgttagaggtctgttgcttctgctggcttttctgtggcaatcccagctgctcttccccgtggcttgggcacaccaaggatttcctttctgtgattgccccatatctccctagtccgctgtggggggcaccttcctgcttctgaggaaactgaagcaggagatgaggaaagggtaacaattaattacatacttttttttcccgagtattatcaactaacatgttccataaaggagcatgttttcacagctgtgtgctttagaaacagggagaaaggtttgagtttttatgactgaggtatcttcaacaaaggctgtgatgtacacgcttgatggacttggaacgtggaaacccattccctccctcagccctgggattggaatctttgtgtttatggtcacatgagtattcagatatgttatctctgaatgtgatgccctggtcagagaaccaaggagtggacttgctagattatatgatttaattaccctagatcaatcaagctttgacttactgatggcaggatatattgtgtattttttcctagttgctagaggaaaggaacaaagtttaatccttggctttgttgacctttggtatcacttttatcttgtagttccgtataactgcctttgtagactcttcaaaaggctgaaggcaagtgatttatagataagggctcattcagtacttgcacaagaagagcccatatcttcaaatatgggtgacgtaaatttacttcagaaacagaaatgagctcatttatttggagagatgtgaacagaatgtgcgtcttttgctccgggtgagaaataaatttaaattcagaactttgcttgggggaaatgaaatggaggaactaggcacttgagcctcttggaaattagagatctttagccaaggcccaagggagcactgtcttggtccatttataacaaaatactggagactgggtaatttataaagaacagaaatttatttctcactgttctggaggctgggaagttcaagattaaggtttgttgagtgctgcgtcttctagagtggatgaacactctgccctcaactggcagaaggagaatgggcaaaaaacaggagtaactcccctgctgagcccttttgtaagggcagctaatcccatttacccagagaggagccctcatggcctaaccacctcttaaaagccccacctcctattactgtcattggcaacacctgcattttggaagggacccattcaaaccatagcaagcaccaatagtatgtttcagaactcatccacataggagcactcctcagcatgtccaacagcagtctgtggagaactacttttttgttttggtttggttttttgttttcttttttgtgacacagtctctgttgcccaggctggaatgcagtggcatcatctcagcccactgaaatctctgcctcctgggttcaagtgattctcctgcctcagcctcccaagtagctgggattacaggtgcccgccaccacacctggctaatttttttgtatttttattacagatgggctttcaccatgttggccaggctggtctcaaactcctggcctcaagtgatccacccacctcggcctcctaaagtgctggcattacaggcatgagccaccgcgcccggccagagaactactttgtgtaagtctacgaggcaccatacacactttttcccttaaggaccttactgagtaactgggaagagagagcaggaatgtcaacaataatacagaagaagggttctatggtaaatgccgaaagtgaaccttcaacgaagtgagttccagagagacaacccataaaggtaaagatttagtcataaatgagctgtgttgctactgaaaacatcttgattctaaagtataaccacatctcaaccaagcaaaaactgtcttaagcctgaattaagaggaaaatgatattttaaatgaactcctcaagtaagttgccaaatcattgacactagaattttaagaattggtgactctagagctttcatggtttggctactgtattatctccctcaaggtgcagtaatatttctgtcaccaaaaatcattaattgataacattattctttctgttagttctagcacttatttccatcactgtgatttttttattatgatgattatttttactttacttacttagtataggggattacctgccttttaatgtcatcctgacaattaagacaaaatacagaacatgcttagcacagtgcttggctgagagagtgccatcattaatattaggcattatttttcttattcttgaaatacagtgttttatatagtgcctggcatgtagttaaattttagtaaattataataatgttgtttattgttttccaaaggatttttaacatgtattatcaattaatactctgagctacattcaaggtatatagtgctattcctcttttactaatacagaaactgaagttaagtacattggtcagatttttctggctgatttaagcagataaagaaattattaaaaggaatgtggatagctcacagaatcagcagaagagctctagaatcgtgttttgggctacctagccaagtaaaatggccaagatcatgccacagaactgagccactgccaagtacctgccgtgccttgcacggcaaacaatgctggctggcattggtgaccggactttgccacagggattgcttctactgctcccttggaaactgttttacagaaactgctgtcaccaaggaatgtacttcatggaaggccctattttgcaacatttgccccctatttacagtctggagtgggtggcaatttgctttattgccaactcattgtgtcttaactctctgtgaaagaaatacttcgtttatattttcttttaattggatataaactgagtagaagttgagattattttccttattagtagacttcgtgtgtggaaaagttagttttttctgaaattgatcttgttcttagcaattatctgctataagtattgcctcaactttttaggctactactaaatgagaactttccatctgatcagggcgtcttctccagtgtaaacaatcctgtttcccattacccattggagctaaggaacccatgatgagttaacacgtgcaagaagggttacccctttgagcaagaaaagtcctggcattagtatttcagatttttttcttgcatccttttctgatattttatttattttcatttaaagtggacctatggtttatcttgctgaaaatctcaaaaaaccaaaaaacaaacaaacaaaaaaaaaacgtgtcaggtccctaatgtgattgctgttaaccatataaaaataacctcccctcttttataatcagtcttggtgcgccttgcaaagcctacatttctaacctgtgtatacttcaaactactgtgagcatgtgttaaacacctttttttttttaaataaaaagaacactttcagctccttaaagcaagctcttttgggaaggaaagaatccctgagtgctgcagccatccatcctgctttgtctggaaagctaaggtttttgggttattgatgtttcaacaagtggagagcacctaggtctggtgagcaccagctgctgaagtgtggggggcacccaagtggcctgttcttccaggatggcattcattcttccaggcaagtgggacaaagtgggctttctgccttcactcagtgagagctgttgaaagattttctcatctgaattgtgaatgtttgtaatgtttattttcacagtaagagtgagggccttctcactttgaatatattcctttttgcaaataattttgaagtagtcctgatcctgtgttaaaagaaacatggtatgtcattatagaagaatccttcatcccccttcccttacaaacataaaattttcagagtttacatttggaagaaaacctggttcaattctctccattttcagggaaggaaatggaatttattctttcctttgtttatccttttatagttttcattttgttccctgttggtcacatttttttttttggccttcttattagaggggtattgtggaatatttttgcttagcaaaaattaaaatcaacatacctgactttgtaattgtaaaatatgtataacatacaatttatcattttaatcctttttgagtgtacaattcagtggcattaagtatattcacattgttgtgcagtatcatgaccttccatctccggaacttctccgttatcccaaattgaagtctattaaatagtaatttcccaatctctaccctcagccctgacaaacattattattctac

SEQ ID NO: 57544 - DNA, 505 bp, Homo sapiens
agagcagctgggattacaggcaggcgccaccatgcctggctactttttgtattttttttttttttagtagaggtggtgtttcaccatgttggccaggctggtcttgaacacttgacctcaagtgatccacccgccttggcctcccaaagtgctgggattacaggtgtgagtcatcctgcccagcctaatgtaaacattgataaatttcccccttagcattgctttcactgcatttcataagttttggtatattgtgtttttgttttaattcacctttaggtttttttcagtgtcctttgtgttttcttcattgatctgttggttgttttagtatgttctttaccgtccacaaattgtggattttccagtttttcttctgttgtagatttctaacttcattctattgtggtggaagaagattctttgtataatatctatcttttgaaatcttttgagacttaatctgtgacctaacatatggcctatcctgaaaaatgtcccatgt

SEQ ID NO: 57545 - DNA, 9365 bp, Homo sapiens
attgagtcatgggggcaggtctttcccatgctgttcgcatgatagtgaataagtctcatgagacctgatagttttgtaaaggggagttcccctacacaagctctcttgcctgccgccatgtaagatgtgactttgctcctcattcacttttagctgtgattgtgatgcctccccagccatgtggaactgtgagtcaactaaacctctttcctttataaattacccagtcttggatatgtctttattagcaatgtgagaacagactaatacataagtttaccaaatgatacaatgccaccctctattacccaggatttgggaaccagtggtcttaagcactatttctaaaataagttctacaaaactagtcccatataaagaggtcaaacgatttgcatattccctcaccaccccttggaaagtcacaaagcgtattatctcacttaaagttcttaggagtctcacaataaagaaagccagacttttgaaacttagttgacctcagaacacttatcttaggtaacatttattaatgtcccataaagtagtgattttagaacattctttgggaaatgctattgtagacataagactttacctttttaatttttttagaaacagagtcttatgctgtcaccgaggctggagtttagtgataacattcatagctcgttgcaacctctaactgctgggcagaagcgattctccaacctcagcttcctgagtagcttaggactacaggtgtatgccatcacgcctggctatgttgcctaggatgttttcaaactcctcagctcaagcgatcctcccgcctctgcctcccaaagcactgggattacaggtgtgagccactgcccctagccagactctaccattttttacagttgtgctagaagttaattaactatgacattaactctcagagaggagatcttagaattataataaattggctttttgatgcttattctttttaaaaagtcctttaagttcaagaccagcctggccaacatggtgaaactccatctctactaaaaatacaaaaattagccaggtgtgatggtgcatgcctgtagtcccagctcctcgggaggctgaggcacaagaatcgcttgaacctgggaggtggaggttacagtgagcccagatcatgtcactgcactccaaccagggcgacagagccagatttcatctcaaaaaaaaaaaaaaaaaaaacgaaaaacaacaacaaaaacctctaatccatatctgttgttttgcagtttagtaaagtgtggtacggagagattaactgactagctctatatcagagagctggggaaagtgttttgtagctggaagtaccagacagagcttctcattatagcacattttcaagacttcagagcagtgtttgtcagccctggttacatgttaaaattactcggaagttttttcctccaatatatatgatgggaaattttacacatatactgaagaagacagggtaaaagaaggcggagtaacacagtgaaccttaatgtactcattaccagccactacaatcatcagcttgcaaatactcctgttttatccatatccccactccctgccaccctcaactgtatattttatagtaaatccccagacattatttcattcataaatatttaagtatatatctttaaaagtgaaggattcttttaaaaaataacttttaaatttgaattaattttagacttggaggaaagtcacagaaataatttgagagtacctatataccctgccccatgcagcttcccctaaagttaacactttacataaccttcgtacaatgatcaaaaccaggaaattagcttggtacaatactagcaattaaatggaggccttattttgaattttaccagtaattccacgaatgaatgactgagtcgttttgaaagatgtagttataatgctgttatacctaaaatatttaacaatgataccttaattcattcagcatagctgaggtgctgttaagaaaattctgatgtctgggtctcactccgaaccgattagatcaaaatctttgaagggtgatagggttagggcggtgggatgttgggtattggtatttatgaaggtgctctaggtgattctagtatgtaaccaggggagaaccagtgttttggagcattcatttaaaaataaactgactttggcgggcgacatggctcatgcctgtaatcccagcactttcggaggccaaggcaggtggattgtttgagcccaggagttcaagaccagcctgggcaacatggtgaaaccccatctctacaaaaaagaccaagaaaaaaaacaaacaggcatggtggtgcgtgcctgtagtcccagctacttgggaggtgagaagatggtttgagctcaggaggcagaggttgcggtgagccgagatctccactccagtctgggctacagagcaagaccctgtctcaaaaaataaaataaacagtttaaaattctgtttgaagaactttgggattcactttgaatagtcagtaattacccaggattattgcaaaacagagaccagcactcacagtactgagcaatacctcagcagcgtgctcgggcagaggaggtgagtgcagttttggggctttcattggtggcgtaatgtgtccgtcttatctctgttggtgagtgttagcaaactcctgaatcatatccgtccgtctatgttcacctcagacctaagggttgaaattagtcacttccaaatgagtaaagcagaggatgtcattttgatcaaacaccaactctctgatattattccagatgtttcctggaaatttggttggaaagatgaggaagtaacataatgctatgtgttgacaagtgagggaacttaataaccatggagaatatgtgttagtggaagtatataaccgggatcaactagaggtccctaagattacagtacctgtgatcacttaagtctggatcaaagggaaacatggctataactatttctgattcagataaaggaaaatcagagagttagctcagctttccttatgttaaatttggatgatgctcttgaatgaaaagcttatgtttatagatttgtgtatgtgagggagaagaacggaggtaatttactttgcaatcagggagtctagtgacataccttaactactagtttctttaatggcgataggctgacccctcagccagcactgttgagcagctattgcagacccacctagtggggaggtcctttgggggttccagagacatgtaacatggtccttgctctttgagagtttagcctcgctgagggaatgaagatatacagaacagaaatatgaaaaaggcactgttgaaggggaatgctcatttgttatttataactaaagttctgtaagagttaaagattgggatatcctggagcagacggggtttaagctaggtctttgaaaaaaaaaaaaaaaccaggatttgggaaatgagaggaagaggggggcattgctgcaggggaacagcttgacagtcttagaagaaaattaactttggggcttcagggacactgaagaaactggcctgagtttcagtgagcttgctcagagaaatctctgcattaagaaccacagaatgttggaattggaaggaccttagagaccctctggtccagtgctctcattattcagatgcagaaattaaaggcttttacagaaagtaagcacttcgcccaggtcacacagtgaggtagtggccaaaattaagttaaaagtggatgaagatcaaaggggattttttgttatgcaggtggtgcacttgaacatgtttacaggatgagggggaagaggcagatgagacaagatcaaagatgaaggagaaagggggattcttagagcaagatccctgaggaggcaagagttggagccttgtgggacatctgttctgagagaacagggaggacgcaggcaagtttatgacaggagggtccctggcacagatcggtcacacccagcagcttgtatcctctgtggagaagagggaggtcatttgttgagtggtcatggtgactgggtacagtaatgagtgccattaggcattgagggctcagctgaggcagggcaacttgtatttgctctttgtatttgcagacaatttggcagaatggttctgagcgtaaactccagagccacactgccaaggttcaatcctggctccatctctgactacctgtgtgacctcaggcaagtcccttaattcttctgagcctcagtttccttttctgttcagtgagaacagaatgacatccacctcaggttttcgtgagggttcaatgagttattcttggtacagttctagggaccacgcctgccatgtagtagacactgtagtgttagctctttgttattgctttaaatataaatgatgactaaggagaaaggcctatcctaattgccatgaattggcccatttgaaattacttgataccagcagctgtctaaatattgccccattttaagttctgctcttaacaacccaagtataagcactaaatagaggcaaggcaaaaaaaaaatttttttttttttaagcccactgtggtttccttcaaaccctgcaggatttctttcatgccatgaatatgtagtttttggaatttctgtagtgaatttaactgtttattctgctttgtggatagcatactcgtgcctggggaacatgggtcttgagaaatgtgaagctggatggtggcaaaccattagtccttggcttctaggctgtggatacatggctgcctctgatttgggggatttcctgtatattgcctcatttctagttaaggattcaagttgacagacacttagttttaggttacatctatcattgaaatgtggggtaactgaaaagccaaccagaaaggagtgtgcttcctccccaggtgtggtttccctgggggcgagggatgaggctggtggcaaatacgcagccccaggaagatgcagcacagacttttggagcttctcttgtcacttccctgggtcttacttctgcctcattctagttgctgtcagtgggtaaatgtgttcatagattagaacaagttgcagcacagacttttggagcttctcttgtcactgccctgggtcttatttctgcctcattctagttgctgtcagtgggtaaatgtgtcatagattagaacgcctttgtaactaagataaagccacaagctttattttgttacagttcctgtgtgcttgcttgaaggccttgagagtacattcatgatatgattctagtaactcctgttttaattcttagatgtgttgataagcatagtgtattgacataaaccagtatgaagcatggagggggttcagatgaactggtaagaaaaacttgcaatccttggaaagccatatgattacacaggattatgaagaggccctaaggtttctctaatttagccctttcattgtgcaaataaagaaaccaaggatcttcgagtgtatatgggatttgctgggtatctttccattagataatgactaagatggtattagaaggtgagtcatcttttccactgcaccatactacttatgttctgcctctttggagtccttcatttcatttttggttattcctttttttacatggtaggtcctcaactggtgtttgaaggaatgcacgagagttgccattcatgggcctgcacacagggctgggcagggatttctttctgtcatcggtaccgtaatgtttaagacccagctggagtcattttccaagtatttgacctgacttcctgtactgtgtgtcctcccagggagagagactgatccagattaaatgagtagttccgagtgttgcacagagcatcactgtctgaactggcattagcattcactttgagctcctttggttaaaagcctggttagcgtgagctgttggccaggtgaaactgttgctatcgccctgacactgtgaaccgaatctcctttaaatgacaacattgttagagtcctgtggccgcttttaaatatattttggcttcagttgcttctttcttgacctgaaattataaaatgagttgggagtacctattgcaaagctgcaaattttgacaagaacattgagatgtcggcttctttttgctgaaatcctgaggcaagacatttcaagaaaattttatgttcccatagaatgtcacaagttactctggcatcaattccaggttgaaaccttacagtgtaattatagtttccccccttcttgtcctttgggcaacctttcttttctgtaagaaatacaactggtcccctgggtggcaggaaatccaggtgggggagtgggctgcttctggttcggcggactgtaaggtatgctgcacagggcttccttgggcctggccccacacttcctttgcaccagcactgtcctgccaaaagccagaaatcctggaagagggccgaatctagtttattacttgcctgttggaaatgtaggcttgtgttttttggcaaggcatgagcagagcccggttatttgactgctctgagatttaactccattccgcttttggacaatgacatatgagcatgtgtgaacagcagccccatttccccccagtttgcctgccctagacatgccctcagacagctggctctgccagctttcccagtgccaggttctagagcccctgttcttctccctcccctgctcatttccagtccaccagagcgggcagtgtcagaggtcccatgcagcctcctctcttgtgaggaaccccagagcacctgtagtctctaagccaactagccagtattgagggctcctgggttatggaaatgaaaccagggctgggaaaagatattccctgtcctgtatcacttccaatgaagagaaacaagaattttagcaaattgaacattgctgcagtgcctagaacaatgcctggcatgtagtagatgttgaataaatacttgtttaatgaacaactttatattcttcaattatctcatcctagggactgataagttttctcattctatcagagaaaataaaggttatgagggttgcattaggtagagtaagctaggctacagctgtaagtagactcaaagatgtgtaatggatcaaatgcaacagaagtttatttgttgctcttgttcaaggtgggtgtttctggttagcaggtgactctcctccattgagttcagggactcagtttccttctatcttgtggctctgccgtccccaaagaccaccttgctgatagtgtccagtggcaaaagggaaaaaagagtggactagcacagttaggaggttcttacgggccaaacctatgagtgttgcctatgacttcggctagaactcaattacatggccacagctaactccaaagaggctgggaaatacagtctattgtgtgcccaggggtacactaaattttgaacatctgtgtcatcttcgaacttagattcctaaaatgcatctgcagcccagctttgagattcagaaggcctgatgcaaggttccatggtaaattttgcttggtttaagtcctcctgccaatgaaaaccaagtgacattaggaacagatctaacaataagttaaaaaaaaatcaagctataatagtttatattcaatatgatttcaactgtgttaaatattctgtttgtttattttagagcagggttgtccaatattttggcttcccagccacattggaagaattgtcttgggccacacataaacatattaatgctgaggatagctaatgagcttaaaaacaacaacaacaaaaaaaactcataatattttaagaaagcttacaaatttatattaggccacactcaaagctgtcctggactgcatgcagcccacggccgaacaatcttgttttagagacagggtctccctggtctccttctgttgcccaggctggagtgcaataccacaatcatagcttccggtagcctcaaactcctgggctcaagtgatcctcccacttcagcctctcaagtaaccaggactacaggtgtgccacctacctggctaatttttaaatttttttgtagagacagtgtcttgccatattgcccaggctggtcttgaactcctggcctcaagcaatcctcctacccacctccccaaagtgctgggattacaggtgcgagtcatcgtgcctgcctatgttaaatattcttaataaatgattagacagaaggtaacatgacagtgacttaattgtggttgccctttagagatgagattatcagtggtattttgttttagcctgcttctgtttttctgtattttacaagatttctatcttgaacatgcattgctttttttttttttttttttcaatttgaaatacctttttttttttttttttttttttttaaactgatgggtaggctccatcttcagagattctgagccagtgggtctggagtagggcctggtacttgctcttttattttttaatttaatttttttacagagagtgtcttgttctgtcacttaggccagagtgcagtggcacaatcatagctcactccagcctcaaactcctaggctcaagtgatcctcctgccccagcctccccagtagctaggattacaggtgcgtgacactatgcccagctgactttaattttttttttttttttttgtagagacagggtctcgctaggtttcccagactgaccttgaactcctggcctcaagcagtcctcccacaatggcctcccaaatgccaggattacaggcatgagccaccatacctagcttctgttttgttttgttttgttttgttttctcacagtatgtgaatctcataagagttccatctccctgcctgcagctttttgactcaccaggataggaatatgcctctgagaactttttacgcacatgcctttacatgtctgcttcatttatgaactagtcagctctgtgtcaggccctgttgtaggtgtcgaggaaatatcactacaaaacagacaagaatccctccttcagagaccttacattccattgtggacacagacaataaacacggtaaaaaaataagatagatggcatgtaagatggtaaatacaagaataaaaaaaaaaagtaaggggatataaaatgtcagtagggtagaaattttacatggggtgacacagaaggccttcccagaaaggaacttttaatataaagacctgctggtcagtacagagctagccaggagactcttctttataactctgtctagatctgaaatttatcaggttatttgaccaatggcaaccccaaatcccaagattctgttctttactatcaccctgctcactgtcgtgtttatctgaatgttctgaactagagtcttattt

SEQ ID NO: 57546 - DNA, 3566 bp, Homo sapiens
tttttgacagattttcgctctttcgcccatgctggaatgcagtggcgatctcggctaactgcagcctttgccttctggtttcaagcgattctcctgcctcagcctcccgagtagctgggattataggcgcctgccatcatgcctggctaatttttgtatttttagtagagacagagtttcaccatgttggccaggctggtctcaaactcctgacctagtgatcctcccgcctcagactcccaaagtgctgggattacaggcgtgagccactgtgcctggccgtgtcttcaattctttaaggtcttattctttcatcctgtctcctgctcatgcccaatgttcaagcatgttcccttaccctgtattcctttataatactcgctgcatagtgtcacagtatacttagcatctcaaaagcagtctttataggatgcaaccacactttaaaatagccctgaagaccccacatttacgttcttgaagtggcaactccgcctaccttgcaggtaacttctttatacttccaaccgtgctttggagaatggggctttttaacagtgtctcagaggactgtggtggtacagaaggtagacagagagtggactcatgcctaggagcttcatccttccccactgccactctggaggggttgcagagagggagcctcgaattagtcagaaagggctggggtgcttggttacagacggggccttttccaggaggcaaaagatctcagatgtctacgtgccctacaccgctgtctttcatgggacccgaggaaagctctcccaaggaacgggaggagtgggacttctgtccctcaggcttttatttttacttgtgatgtttttcttttcctggtttgctgccatcaatgccatttgcaaggccttttgtggggaggaggtataatctgcctgtttagttttggaagctgcttaaaggttttaggatttctgtcccactttcccacctagacgtgatgccaagggtaagaaggcatcggggaaactgggcaagtcgtaaagtaattattggaacagtcatacaattcaaattcctgccgttctgatatcgcttaattcttttgaagacctgaataaaatgtgttctttttctgagacatttagatacattgtttgaacaaaggaaacagggtgacttcaaaatgtccagtatgtggaaatcgatgccgttcagcctgtggtgtaattaatgaaaacattggcgacagtcggcctcattgtttgtcattgtgcaacaggaggtggtacactaataaggagccggggaaggtttacgtaattcagaaggaagcagacgtgtgcagttttgactgatgcccttctcactgcagatccaggctcaccgagcaggttcctattcctgatggacgtggagatgtctgattggattttgtcatttgatttttgacactgattaatgatagatttttatttcccttatggtcagaaataattgtcttgaaaagcttcactttagatcatagttttcacacacagttataattcattgggtaaagcatagtagaacaaactatggaaaaggaaatgtcattggtagactttggtcgcttaggacaggtgtggtggcccttggaatcaggagatctggagttctgtcctggccccatcagtcccagctgtgtgagcttagggatagtgcttgcccactctgggagcagccttcatctgtaaaaggagggggttgctcaggacccttgcacctccttccttttacagatgaagattgctttgtctaagcccccttggtgaggtcaagaattgtgaaatgtttgtacaagtgagatgtcaagagtacaaaatgtacagacgaactgccagtgaaaatgtcatttaagtttatctgctaacagtttattccctttggtctcctctcagtttttgttttgtaattgtccatgttttgtctggtaatttattattttttttattagaaaagtaaacaccaaagtgtttttccattccgcttgacagcataacaaattgccatttaaattcatctcttaaggatttcaaaaaggcattaaacacactgctcaacatggtatgtatttaattgaaatgagctgacttttgaattaattagctctttagaaaaaataggcaaaaatggagccgaaaagcatgggtttgaattctggcttcactgctagtacgagctgtgtgaccctgggcaccttttctcatctctgaatctctaatttctcatctctaataggagagggacactttccctatgagagtgtggtgaggtataaagataatgtatgtaaactgcacagtacagtatctgacagttagtagatacttaatggatagcagctgtaactgttatacattattttattacaataattaaaataactagagaatttgtgtatattatatactgggttctatctaccaaatcattctaatatgatgtgcattgattaccaaaagaaatagtcctccagtatggatgccagttttgtttctgttagagtgtgtggagtgagatttaccagagagggatttctcttttctggttgacagatcaaaggtacgcctatgagaatacatggcaagaatttattcttttttttttttttaacagtgataaaatatactttactttgttgagtcagagggttgtaaaaaaaattattgctaaagtaggtatcaggcaaacagaaaggtgctttagaagtccagttaccttggagtttatttaaactaagagaaaaacgtcataatgttttcatgcgatacatatctggttctttaacaattgtgtgacaaacagcagaaggaattaaggaatgccgcacttgtgatccatacaaaacaccaacactttaggttgtacataattaaagaaatatctcaaacactttttaaaacactgtagtagccaatacatagaggcatgccgtaggtaggcacaggaatgcagtttagaaaaataaataaatcacataggaactactcaatttccttaaaatcactgagcaagaaaagcaacattgaactggctgggcgcagtggctcacgcctctaatcccagcactttgggaggccgaggcgggcggatcacgaggtcaagagatcaagaccattctggccaacatggtgaaaccccgtctaatttttgtactaaaaatactaaaagtactttttttgtactaaaagtacaaaaattagctgggcgtggtggcgctcgcctgtagtcccagctactcaggaggctgaggcaggagaatggcgtgaacccaggaggcggagcttgcagtgagccgagatcgcaccactgcactccagcctggcgacagagcgagactctttctcaaaaaaaaaaattaaaaaaaaaaaaaaaaggaaagcagcattgaactttcatattgattttacacagcttttatacagtaccttgacttaaatccaagagcaaaacttgactgtcctcctctatttttggtaaacttacgtgactttcccccctggattttacctgggagtagcctttttaaatttttatttaaa

SEQ ID NO: 57547 - DNA, 2812 bp, Homo sapiens
ggtgcaatcttggctcactgcaagctctgcctcccgggttcatgccattctcctgcctcagcctcccgagcagctgggactacaggttcctgtcacctcgcccagctaattttttgtatttttagtagagatgggttttcactgtgttagccaggatggtctcaatctcctgacctcatgatccacccgcctaggcctcccaaagtgctgggattacaggcgtgacccaccgcgcctggccaattccacttttttgaaagaactagttcttttatttttaattatggtaatggtaaccaattcagagtaattatggattagggtgctccaacttatgtaactgggggaaaaaaaattccttacatggaacatcaagagtcactgtggtatgttgctcaggagctagcagtgtttctcctctgctcagccactgtccactaaagccacattccaaatacacatcaccaagttaccacccagcagatctgatcctgtggcaccaaaatgcctcagcagtaagtacccaggggccagagaagctccagaattgaacaagcccaggaagcacaacaaagtatggcacagatgagatcccgtcaagaccattgccaggaaaataaccaaatgagagtgtgtgtgtgtgtgtgtgtgtgtgtgtgtgtgtgtgaaaattctgttagatcaaacactacctgaaattattggcatgtggaccccggctcagaaacactgacataaagacttaaatgtaatgggatttgttttcaaaagatttgacttttctctgtaaaaaacacagcaacaaggcaacagggaatattaccaaagtttcccaaaggcttgtataggatttgaaaaagttgggggaagaatttaaccctaaaagcttaactgattttcaaacacctgcaaatacataattacagatcctgtgaagcttaaccttggtggtgttaaatgttagctagaatgtcacaaggccagtccttagggacagtgtgacacacacgtcaccttgaccaccagatgagtaagctgcaccacgtgctgttttcagacttttgaaatctctgaaataggctccttttctctaaagaaaaaatggggggctgagggggttcacctacacatgagacgatcacccacaggacctgcaatattatttgagctacttaccaatgaaatctactgatttgtccaaccacggcaaaattttctcacaaaagctgtcattcacaggcacacgcaggaaatgagactcggggataaagtcaggctttggacaggtattgctggcatttaacacataaccaatcccattctgctgcatcagctcctatggagagaaagagtagcagttaaagtgactaataatatagtaaacatgatcattctgaaagagtgaagtttaatgtgatgataaaaatgcccagtttccttgaaatataattcattcagatcagtgaagtccaaaaacctagcaaaatgacatctagagacaagtttaaagaaaaaaaaaaatttaaggacaacaaacgctatttaaaatagtatgcttgaagcccacacatcattcatatagtcaagtctctattatcttcattactagagagagaagtggaacaaagaatacaaaagaaaacaacagtttatatgattttagaatatatggacacacaacattttcttcccacacggaacacgctggttctctaagatacaattctagtcattcttctcactctaaatactctctttgaaggctgcacttacttctgtagtcttaattaccagttctacatgctgatggcgtgtgtgtgtgtgtcctcttaaatttccaacccgtatctccaactacctactgactatcaggatgttccacaggcccttcacattcaaaatgtcagaaactaaacatattctctttttcccttttctgcccccaactcctgcctcctctctgtaatccccaaattggtttagggtaataacatcgacccagccaactaagctcgagaataaaatggggctcctttctcttccccatgaccctcatccaaatggctgccaaatccttttggaataacctcttccattgatcctctctcctctctatacccattcactgctcagtagccaagataaccaaaaaagccaccaggagctcttgaagtttgcagtggttttctctccaaaccatgttctgaacaactagaggaatctttgttatgattaaccccaagctgggtgctttatccacattcttttcatttccttgagtctcatttcctgctcctgtcccatatagcacccccaacgtcaaatgtatacccaccctctgttcacacgattcctgtgcttagaaggccctgtccttcttccagaagacactcttcccacttttcctactttaacctcatctgtgaactctttcccactcatgcataattaaccattcagttctctgtccttccaaagtactttgttcacaccattaattaagcacctaccatagtgtgttaccattaacagataattctcatctcccctgttatgtaatgaagtaatgagtaagatcttggaccgcgtcttgtttttgcaccttcagcccagctatagaattgcactcaaaacaatctgttcaactgacatccatccaccatttagcaggcaagcccacacaaacccgcttcatttagtcatccccctgctgcctctcaggagacgttccaagcctggaataattatcttagtctaagcaatcttggtcatttcttccttctcttggaatactaccttttctacaaatctt

SEQ ID NO: 57548 - DNA, 1363 bp, Homo sapiens
ataaatatactttattttacataaaaggtgaacagcagccgggcgcagtgactcatgcctgtaatcccagcactttgggatggccgaggcaggaggatcacctgaggtcgggagtttgaaaccagcctgaccaacatggagaaaccccaactctactaaaactacaaaattatccaggtgtggtggcacatgtctgtaatcccagctactcgggaaagttgaggcagaagaatcgcttgaactcaggaggcagaggttgtggtgagctgagatcgcgccattgcactccagcctgggcaacaagagcaaaactccatctcaaacaaacacacaaacaaaaaagtggacagcataaatccagattgtgtatgcaaccatctcttatctctgagatgacaatgtcaataaacagcttttggaactaggtggatttcttagattggccaacacccttcagctatgccagagcccaagtcttctgatggtctcatgcttctgttaggttaacaatcaggctacgtagatcttaatggtatttactacaacctttaaacttttgtacatgtagcaaaggttacatttgtttttctatgtgtgaacccaaggtgagtttatctagtactatctgatcaacaacagggtgcagaaactgattcaggatcactcatgtaagaacagaagtgggtcactggagttaaatcagcctttgaggactttctcaccaatagtcctttccaccaacggtactacatttttctcctttccaccaatggtactacagatatgttaaattaaaagtaaaggaattagtaatatccctatccactcaattcaataatgaagaaattacagaagtttctgagaaatgaggtgactctaatagtgttacacactgtacacaatcaaaagacaacaggaaattctaagagaaaacatgttgcaagtcaataaggactgtcaaaattgattttccatagaaaaaatacgatgtacacttctgacaagtaaacttaatagcctacattttaaagaaatgacaacctatattaagtcaaaaaatatttattgagcacctttgttagagaccttttaattagacaatgacacacggtactgattaagaaaatcatatctaacatttaatgaatgcctacaatgtgccaggtactgtattaagcatttaaatggactgtctcatttaattctcacaaccaccctttgatgtgggttcaattattgacctcctggggtcaagtgatccacctgcctcagactcctgagtagctggaactacaggcatgtgccactgctcccctcaaatttttaaacattttttttgtagagacagggtctcgctgtattg

SEQ ID NO: 57549 - DNA, 1582 bp, Homo sapiens
aaactgatggaagagccttgtttccccaaagctatatcgctcaaaggcttcaatgagggagaaggaagaagatccgacaagaacagagaaaggagaatctctttaaaggcaatttcacatgacaccaataacaaagtttacagatgaactggttgaaatgtaaatatggtcactggtttgttcatgaccaccatttacaagttggtagtagaccttggctgtcaggtcaccccccacagaacaactttcagaggagatgcaattctgcaataatcataaactgagccatcagccaggctgttcgaggtccagttctatcgttaattggtacagtgatcctagatcactttgatttcagtggacctcaaaagtaagtgtggctctagaaagttctaagacagagaacagaaaggagagaaagaaaccattgttcagcttcaaaacaaaagagccaaacaaaacaacactacactgtaaaacacattataaaacaaaaagaagcctctttttcacaaatctttctcaactgatatctagaacaaactcaaacaaatatttaaaaatatttaacagatttagctgcaatcagaacattcatttagtgctcagtttggcttgaaatgtcccagactggctcccagtcacttccagaaaaccctacctcagccagagcacattttcactgatctttatctatgacaatgttccactctgctgacatcctccttcattgacagttttttccattcactgacctttcattcactgctgcactctagtgactccagtttcgtttcattaattaacaacagatgagacactgcctgatttcccttggacctctaaaaactaactgtggcctcaccagcaactcagttttgaaacatgcttaaaatgtccctcttcctttcgtaagttctcttacaaacaagatccacttcagaagaaaagttcatttatgcaaacgttctgctccaaatggctaacggagacaaagaatcaagcgtcctcttatctgcccttatcataactttgttgtcccagggactccaagctagattccattacaagacataacatcagtccgttatccgctatttactgtgaaaagcagtaccgaaaaactgataagcttcttgaaaaaatttgcgcctattttttaaagttgtctgaagacttggctcactgtccaatcttgccaagtttctcctattcctaattttatgctgtttatcatctgggaatgcagaaaacaaagtcatagtaacccacatgtgtttccctaacatggacctgaacctaagaatgactgtgccccctactctggaagtatctgtgctaagaggaaggaagacaaatacacagctatttccagcctgctgagaaacagggatgggcagtccctgcaggcagagaagcgtcttggcctctacagctgtggatgcacaggcagccagaccgcaatgctaaaacccatgtttctgttagtcttccataaatccaaccaaaagaatgcatgtttacaaataaaaacatagatactacttccgacacagaaaacatctggtacagcttctaaggc

SEQ ID NO: 57550 - DNA, 6760 bp, Homo sapiens
gaatattaaaaagttataacatgaagactgttcattagactatcataggcaaagcaagtgattcacagaataagtgcaatttatcgaccctgatcattacctttactaccgaccactatttaacatcacttttttaatgtactgtttacttgtttactgtctttgtttattgtcctgtcttctcccactagaatataagttacgtaagggcaaaaactttctcttattttccactgtatggccagggtctagcacttggtagaggatcagcataaatttgctgaatgagatgggtgaataccttccgcctttcgcctcccccacttccctctctccatacacatgttaaccaatctttaaggccagggtcaaattctattatctctatgaagattacctccctgagccctctttctcttttgtacctgaatttggcacttgccagctgtctggtaattatctttgcatatgtatgtatctcccttaaaattcttataatcctgttctccataacatgggccagtgtccccaacttttggaatccatctcagcacatgtaaacagcatactgctaacaaatgttttgcttgattcctatcagtagttaatccagaaattcagttaataatttcagtttataatgtatccctccctttcaaataactcaaaataggccatgatattacagcgaatccctctttttatttctgacaattttaaattttacattctcatataagtaatgctcataatttaccctatcaatcactatccctcaagattatatgtttttttttttttgatacactgtcttgctctgttgcccaagctggagcgcagcagtgccatcatagctcactgcagccttgacctcccaggctcaagagatcctcccacttcagcctccaaagtagccggcaccacagctgcgtactactaccatacctagctaattttttgattttctgtggaaacaaggtctttgttgccagggctgttctcaacacctgagctcaagtgatcctcctgccttagcctcttaaagtgctgggattataggaatgagccaccacgcctggcctacattttttaatgtaataaaaaaatcttgtgactttgtggcaatacctataatgatgtttctaaccccagtcaagaagggcgtgaagtttcattcctctctcttgttgctgaggtatcagagggcatttttccacttattcctctttcctttcatggcaagatgtattctgttcccttccttactgatcatactcctggcaagcttttattatttctttgtacctgtccaaggtaatctgtcttacatccttcttttgagccactgtttcctccagttatttatttgattaaaattctaactccctgtctcaatccatttgtgtagaagaaccagctcttcttaaagcctgagcctgcttctttaaattcggccaacctttatgaacctctcttcacacagccaacccttgatcatcaaggataatgaaatgcatacaaataacagattgtctacaacacaagaaaatcagaaaaaaaaaattgacatctggctttggaatttatcatatgtagctttgggcaagacttattttcctaattatgtttttgtttaagccaacattcggattttcttttatgatggtgaatatctccgttttaaatgatcagtaaatttcttttaaagccaatcaagcaccaactatggtttttcctgtgaaatctttttaactagtttctttcatctgttgaaatctgtcataaaatctgttttatttcctctaagttatctccttattttcttgggattctgatccaaatcagttcaccctatattaatttacttcttcaaattaaagtaccttttgcttgagaacttaatgcattttaaaaacactgaatgtccagtgaaatttttagttcaggtaacacgaagtagaaaattatttttgtctaggaaaacttgggagttctaggataaattattacactggtaattctagcaaattatatttagtaggatttttaggattagctgaaaattgaaaaaatttaatactggacagctatataagtctgcttcatcaatatattaatcccatatgctaaacactgtatgaaattaaattcccagtccagggatttacagaaaatagcatcaaaacacactaacacataaatcctgcctcttattctgatccctacctaaactctgcaaccttctcacacctactcttcccccctcccatctcagcctcacttccactctcaactgtcccacaaataatttttaaacgtgtaggaaaaaggaaaagaaccggggtaacagtgtctcctcttttactgccttctcagttactgccattaagcttttggcccaaagactccaatccccaattttacatgtctatttttattttataggtacacacttacaatcaccaaactgaacgaaaggatagggcattctaaattgaaaaaggagcaaaactggataattctgcagttctgttcctagccccctccataatcatgcactatgatcatttggcactataatcaagccaaatgagatattgtactttgagttgctgatatagcagaggttaatactaaaaaagaaaaaaaaaattaattaccacagtttacattttttatctgaatgtacatttatagtacttgaaccgagttattttcaaaacactattcacactaacaaaattcaaaataaattcatttctaatttttcccccatgtagaattttgataagtgcaaaaattattttacctaaaatccaactcttgggctggtgttatttagcctatatttttacataagactgtaaatgttagccaaattaaaaaaaattttaatgcaactttccacattgtcttcaaactcagtaaattccacaattttaaaaaacaaaaacctttcaccgtgcctactcacatttttactaaaatccctacacagagccatacattctgcttttcattttacttctccaagctgctgccttcaccaaatagactccacgagcctcccaagtggtatccaccaatatatgtgatactcaaggaaaagtaggtattaaagagtaattaattcaattggtacgaaatcttttcttttaaaattttaccttaactttaaaaagcccttttcttgatggaggtgaaacagcataaatcctttgaggaaacggttatcctttacgtggactctccatcagccccataaggtgagtggcataaagaggcatttttctgacagtctcagttccccaaacactagtcctaaacttttgcatggatggtaaatttcacacacacacacacacacagaggcggaaaagaaagaagagaaagaaacatacctggtttattttctaaacaggtttgataggtttggttcacttgaaagagcagagtatttacttataatcttttaaaacagaagtgggagccagagcgctgggtaaataaaaacttcagagagttttaaaaccctgcatcttaactcacttccctttggttcaaggggatggcacagcaaaccccacggcaaatgagattatgcaacaggtttttttcctccccagcttattcatcacaggctggttagaggtgtgctttctccaatctgagacacccacgacttcaaaacgccaagaatccttgcagttgatgtttcctaaacttctttaggattttgcagtatccattcattttcagatctacttgccttttctctggttcattattggtattctttaggaaataaacccagcatctgaaaatatttccctctgtggtgtttcattacatgaaactacacgtgatacacagaccctgggcttttttatttctcacgttttgcagctagtgtaaataaagaagtcactaggcgtcgggccccccaacgccaagacccgagcccctgtccgaaaattgagggctttttcggttggttggttgaagaaagcagcaccgtcaccacccaggtggcctcgctgcttacaccaaaggcgaactggggataatgggaacagtcaggccagggccccacttggcaggcgtgttgtgtaacagtcgcgcctggaagtgagcagcttcgcccgcaaaggtgccgcgtcccgcggcggccgctcctctcggcggggcccggtccaagcgccgcgcagcggccgggagcgcacccactgcgaccccgcgcccggccgcacgcccccttcccgctccggccagcctccggccaggcctacacccccgcttcaaacgctcctgcggcccccggccgcggtcgcccccacgccgcctcccgaaagggtggccggtacgcccgggaaggcagagacggcggggctggagcgcggcgcccggcaccgggagtcggggcgcgctgcggagcgtccatgcggccgggcgggagggcgccccgggccccgcaccctcccgcccgcacaccccgcgcggcccgccaaggccacttacttttggggccgccgacctcccaattccctcagagggaaacgaaagttgtcacggcgtctcccctcgggcccccctcgcctcccggacttgcgaggcgccgccgcggagccgagagggcggctgcgctcccgctcgcgtcccgtcccgtcgctctcctcctcctcttcttttcagtatattatcttctccttctctgaggggtgggttggggcgggaggcttaggaagagaggagacgctcgcaacttttcttcactctttctcttccaccctcccccccatcagccttcaaaaaaaatgtcgaaagagatgaagaacttagggaggtaaaggtggggggccgcgttgtgaaagtgggggttgggggggagagagaggtggtaataatcgtttaaaaactgattaaagccccccaaacactgatacatagaaagagggggaaaggcgggggggtggggtggggggttgggggaaagagaaagagtcgctggtcaggaaacttcaagcgcggatgaggtcattggtttaaaaataaagagatggcgtcacttgaaaccaatcccagtgaatgaactcagcggagccccggggaaaggaggagacaggcgagggcagggcggtgggcgccgggcggggccgcgcgctcgcccatcccgcggccgcccgagcccggagcgcggctccgcgcctcgttccggccgctcggggaggggtcaggtcatgttcccttccagagtccggcgactctgaggcaggttccgcgggcgccgctgggaggagccggagctgccggaggaggcggccccgcggcctcctcccccacctctccctcctcctcctcctcctcccgcgcccgcgcgcccgccccctacccccgggctcgcggccccgacccccgggccggggtgtccgcctccagtgctgcgccccaacaggtatcggagggttttctccctcacccagacgcagaacctttccctcctccttgagctgtttccagctgcctcaccaacgtcaaaaaacgcaaacactgatttgagagaattacactcgctctgtaaaaagtctggcgaatgcaaaaggcaaggctctgccatctctcaggagagaagttacaggtacttcaagaaaaatcacactactgttgtcaggcattcagctatctatatgtttatggttgaaagcccccacataaatgttcctacattactttactttgcttatatttacaaatacaaggataagcagcctacattttctttaaaaatgttttctacaggaggcagcgcagaaacatctttaaataagaccaggggttaaccgcctcttgagaggtacaaaacccttgttgatttaactccacatacctcgtgcattttattatttgaattcattaaaatgtctgttttgagatgacattatgcactttggaaaacgagagacctgaggtggtgacaaaccaggacttggaatcactgaataggacaatcggagctttattccaatgttctttgagcatttgagcatgaagctgcttctactgagaagtactcacgtggatatcacataacaaagatgtgattaatgacggaaaagcaccctgcgagtggactgctccatgagccagaatttatgtgtaggaataatctaactcttcaaatattccatttacaatgtgccggattgggacactagaccctaaaggcactgtttgctgtgggatatccatgtgcaccctgcctaaagcacgtttttccactagcaaaagaactgataagcaggtttgggtgggttcgaaagataatacacccctgttactacttttctgcctttaagtcctgcaactaaaggcattccttatgattggtaatcattgaaggttagtgttgcggggtatggccctgggaacttctggcccatcttttataggagggaaaaaaaaagcccatttgaagatgggaggcaccctagcacctctggcagtagtaggtaaagcctgaaggccacagatggagaagcaactttgagcctgtgcctctggcctcttgaagactttgctaggggaagcaaatctctcccactgctccctgtcctctggtggccaggaggtgttactgcagcttccttgggattatttgtgctctaccaggaaacccctaaaaatctaactgtagacctttgttggaggtgttgggatttttaggaaggaagaagaagatagtccttttactagtggtacagag

SEQ ID NO: 57551 - DNA, 1187 bp, Homo sapiens
tctatatgaatagggaagaacttcagggttttgaatagacatgatttgattaatgaaggtagtctaggtctggcctcagtctttcacaggtaattgaatcagggaaagggtagacatgaacagtagatgatattagaggaagtaaggacctagaaatgggcataggagagagggaatgacagaaacaagatcaatatttgaaggaaaacctgattgttctaggggctgaacagctgagagtgatgaaagaggagatcaaatcaaagaggaatttgcttctctatatctaaataacttcatggactattgacagggactgacagtttatatgagcagctgatttgtggcaaaaaaaaaaaaaaaaaaagaagaaggttgtttttggacatgttgcaatctgcttggcagaacaatgacctgcacattccagaggaaatggccagtaggcagtcagggaaatgggattggagctcaggtagagagcagaagctgtcaatagtatctgacaaataagctctgcaaggaccactgaaggggcagacaagtcacatcccaagaaaaatagggtttttttttaataatcagaatgcgccaggagtcagcagagaaccaaaatgcactataatgaaagagatcaggcccaagggcaagccacaggtcaagataagtggttagggacaatgcagagataaaaattaaagggatgcagcagcaaatctgatctcatcagtatcaaggataaatgaccacagaataatttcctgtcctgtttctggtattttggggtattcccctattgcaggagccaaatccacttaactggatgacgccctcagaatgaccctgcagaacaaccaggaatcttcctagcagggagtacacagtctacatcagcacagggagagaatgaaagttatcaaaaagggcctctccactgaattgtacatgtaaaaatggctaaaatggtaaatgacatttatgtagattttaccaaaatttaaaagggagtctatctcttgaaaagataaacatctacggattcccccaaaatctccaaaagttcacctaattaccatctcctggacttcccctgtttgttaaagatcttgatttccttgcttaagttggtggctatggtgctaaagggatgaagatacttaagaaaccatggaggctgcagctacctg

SEQ ID NO: 57552 - DNA, 422 bp, Homo sapiens
gagtgcagatcgcaccactgcactccagccagggcaatagactgaggctctgtctcaaaagaaaagaaaagaaatcctatagaggtgatctcctgctttgaaccttcagatcttgggtggggacagaagtggggaaggtgaggatgaggaaggacagagcttgtcaacaagccattggtcatgtccttctgcttgtaatgtctgaactttctagcttttcatttctaaattccctgcctatgactcacagatgtttcaaggggccttcagaatgcctgtggactttagtaggtgagagccatgggcagaggaaagatgtagtagatgacaaatcacgtgagggttagaatttggccacggtgactgcagttgctaagattctaaatgtttccttagtgctttttggtaaatctctcttctcc

SEQ ID NO: 57553 - DNA, 1876 bp, Homo sapiens
ttctttcattcttcttcttcttttttttttttttaaatacagtgtctggctctgtcgcccaggctggagtgcagtggtacaatcttggcttattgcagcctctgcctcccaggcccaagtgatcctctcatgtcagcctccccagtaactgggattacaggcatgtgccaccacactcgactaatttttgtatttttttgtagagacaggttttgctatgttgcccaggctggtctcgaactcttgggctaaagcaatcctcccgcctcggcctcccaacgtgctgggattacaggcgtgacccaccacccctggccagtatttcttaatttgtatagtccacactggtttatccattcatccagtaaaggacatttgcgttgtttccactttttgactattatgaataatgctgctaggaaagaacatttatatacaagtttttgtgtagtcactcgttttaatttctcttgggtatgggagtggccaatattctgaagaactgccaaatttcttcccaaagtagctgcactattttacatacttagtttttgtttttcgtttttttttaaataaagaacctttagggtttcctcagcgtcccagaggagggcctgcttccggcaccccgccttcagggctgcctccgcagagcaccaaactcccgtccccgccattccaggccctggcacttaggagccaaaacctcaggtcaggcgcactttgggcctccagcccagccccgcctcctcagcgctagctagtaggcaaaaggaaaacagctgccccttaatgaggctatgtggacatcgtagttttttttccagtcagtagcgcagagactgtgataagaaaaatcacaattcccagaatgccgcggtgctacggcagccgaaggggccattccgtgtgcagcgctcccgcccaccctccggtctcggcggctctccagagcgtctgtaaacacccagagactgtcatggagggggaggaggaggcggcggcggcgaagggaggcgtttggggccgcctccagggtccgctctgccattcctgaactggtccctcgtccccgtgactctggcatcagggaagcgaactgttaggcgagaggaggaggcagccagaaccatatccccttcttcctcggggcgggggccgggccaggccggctgagccgggggagggctccgggagggagtgcctggccaggccggcctgtctgccgcgatggatgacagtaaggtaagtcttgtggtttgcacgcgccgccgccttcttgtcgctcaatgctagtcccgcggctgaacctccgctatgtagtccacgccaacacccaagagacacctgcctaaaacatccctgcgcctctccagtccactgcccgatggtacccagccaggaaatcagggaacaccggggctgcgtttttccaggaagggccctctctggaaatttttcactcccagggcgtttgctagctttccaggtagtgcaacccctagtccttaacttgcctgtcgagataagaaactactgtactttttcttcttgcacttttttgctgcctcctctctccagtttggagactttagtgcacgctgaaccagccttattccccttgacgattccccttctctcaggctcccttactcaatgccccattcatataatcagttcactccccctctgagctatttcctgtggttggttggaacaccgctaagctcctgttgctatttggccagtgtggagtttaacctccactagaaagccttctctaaaaaaatactgattttcctcttgttaactttaatagcccatcaccatccaatttccctgtccaaatcacttactttatgattataaaataata

SEQ ID NO: 57554 - DNA, 2187 bp, Homo sapiens
ttactacttcagtcgctgaaacctcccctcacagagttcacggccaatataaaaacggaaagaagggatgaccatacgagcttgtggacttttgcctgcaaaatctcatagaatgtggtgttgtgtacgtgaatccatcagatcaacgcgacggacactccccaagggccaaatcggaccgcctctcactaggcggaaagttttgaaacttttgcgcgctaaaaatgatgagccagacgcatgcgcaaacgtgcactcccggggtggcgcttctcctcaggcagatctcgcgtggtttggtgatggccggctagtatgaaggttttccgtggcgttgagatcccacccgcccttttttttttttttttttttttttttttttttttttgctgccccagtggattaggattagtgctgcagtcaaatgaaaaagatcaagacaaaaaattaggctaatataactagccgacaggctagcggcatttctctggggccgaggaattccacgaagaagatctctgcgaggcccagaaggccgcacaactacttcttcagaaacaaaattttttaaaaaagtaaaaatagaggaagtcagccagtttatcaccttggaaccagcgttttgtttggcttttccgcttttcactctacgaaaaagcccattggcggctacccaggttaccgtcctgttgccattgcgcctgcgcggcggtttgtttaccagtccaggcgaagcgctgtgtcgcggttctcgccgccccgagcgccttggtttgctcccttgacgtgtaattcgtaatgaaagtcatgttttcatttgggaacacggatcggaggtttaaaactggacagtttaagtgtcaacttcagaccaaagaaaataatggtagggaaaacactggacactcagaaatcggtgccgcgtcagagctgtcacggaagatgtttctaatgaacctgaggaaaacaatagcaccaccctaaccagaactaaaaagtggcaagcagccacagttaatgaaactcataggtggcatttagttacttatttagaatgtaggcctagttatggtaaaaatgcaaataagaccaaacctaaggtcctcttgctcgagcaaacctcaagcaaaacctacatgatttaagactgactcttgaagcgaagtaaaaaaaaaaaaaaaaaaaaaaaagcagccatgcaaaatttgaaacttggagacgactctagaagcattaacccaagaaagcacaagccaacaaacaaatttttgaaatggtttgaagagctcttcaaagtcagtttcaggtggcttagaagaggatgttgcttataaaatgagatctgatggaaacttgttttacagatatgactggattcgtttgaaaacaaaaaaaaaggcaggcaaagtgactttttaaaaagtatttttatggaaggatttctaatgatacattttaatgtgctcaaaaaacaaccttaaataactggtagattcagccaaacctggatcattgttatcttagagctggataagagcataaatgttaacaatttggcaattttattggactctgttatgtttttgaatggtgaatttgaagacttcaacttgtaacaagaaattttctaaaaggaaagtgggattttcaagacatatgaaattaagcagagaatatgtatggacatgtgaacagatggaaccaaattttgaaagctttgcatgtgtccagcatcggtcacagaaaatccttttatctcaagaaactagcctctggattttctcacgttcaatatgataaaactcagtaaatccagcagcttgaataccttttaacacaaatttgtaccaaaatgagaagtaactttaaaattccgctccattatctagaggtactctgacttggttaaggtaaggtgaaaatcggttttccaagccagtattgaactggcattttcatcatgaagaaaaaaaaaatgcagataaagtgaatgggtatcttgttcactttaatgattaagactaactcagaaagctggcttactttgtcaaggcaaacaaccagtattaaacaaactgaatactctcattgcacataatgagaaggcttgaatgaaaattaagtatgggagtggaagagctgataaagaacagtgacttctttgagactcctagttcatttacatgt

SEQ ID NO: 57555 - DNA, 757 bp, Homo sapiens
gctagctgggtgtggtagtacaggtctgtaatcccagctactcaggaggctgaggcagtagaatcgcttgaacccaagaggcagaggttacagtgagccgagatcgtgccactgcactccagcctgggcaacagagcgagactctgtctcagaaaaataaaaacaaaaaatactatcataaaataattgttaaattcagattattgtgtgagtagtgtatgaaaatgatataaaaatgttgaataggtagaatctatgcaaatttagagttcaattaaatttggtggggattaaaactcttgtgtatgcatttagaaaagcagattataaatacagttgtggtttggaatagttgcaggattagggctgacagttctggccttgtgctgccctcctgtgctgtttaaacagcacagcaggtcaattacattcctgcttcatgaatgttccgaattgggggagggtagtctatctcattactaatcctcttctgtcctcctgtggccacagagcgcctaactattttggatgtttctgtttcttcagtaaaggaagggaaggaaaactacttggaaacattctaggtcaaacaatcttatcctgagttatggaaaaaggcaactaattgcaaattgcatttgacattggagatataattgatacaccaatatagaagatccgagcagattatcgaggtttggagaaaaacaccatcattacagcattgggaaaggctttttgtcaagaataaatagaa

SEQ ID NO: 57556 - DNA, 3790 bp, Homo sapiens
cacagggtcccgagggtcccttccagctgtcacattctggagcgtatgagatgaggtaggcacacaaagtggacaagatgtggctaagaaaacaagctacacatcaagctcatctgtagcataggtgcttaagaaaactttgctgctgtgtaatattagaacggaaggttggtttccagtaaaatgcattaactttggctcaaaccaagatgatgggtaccgggcatgggggtggggaggcagttgaagatccactgagctttgtctcagggcagccctgctcatcgtcctactttaccttccaccacggtgctcaagcccacactgagagagaaatttccagctgcaaaagggagaagagaaacgctggaatactagtatcggacgttaggacatggttgtggtgttttaaaaatcatttcatcatctggagtttgaccccgaggggagtattttcacccttcagccctctgaaagcattcactagcatctgaatattgttctgagtttgttggagcagtgaaatctggtgagagagaagggtggaggaaggaaggagctgttgtatttggcggctggactcaggtagaggaaactgctacaatcccgggaaagaacagaaaagtagaaagggacgagttcccacacgcagccaatgtccatggccttaactgtgcttgggaaggaagatcctgggccaggggtgtaccctcgtttttcaaaactaaacgtgtctgagacagctacaaagtttattaagggacttgagagactagagttttttgttttttttttttaatcttgagttcctttcttattttcattgagggagagcttgagttcatgataagtgccgcgtctactcctggctaatttctaaaagaaagacgttcgctttggcttcttccctaggcccccagcctccccagggatggcagaaacttctgggttaaggctgagcgaaccattgcccactgcctccaccagcccccagcaaaggcacgccggcgggggggcgcccagcccccccagcaaacgctccgcggcctcccccgcagaccacgaggtgggggccgctggggagggccgagctgggggcagctcgccaccccggctcctagcgagctgccggcgaccttcgcggtcctctggtccaggtcccggcttcccgggcgaggagcgggagggaggtcggggcttaggcgccgcggcgaacccgccaacgcagcgccgggccccgaacctcaggccccgccccaggttcccggccgtttggctagtttgtttgtcttaattttaatttctccgaggccagccagagcaggtttgttggcagcagtacccctccagcagtcacgcgaccagccaatctcccggcggcgctcggggaggcggcgcgctcgggaacgaggggaggtggcggaaccgcgccggggccaccttaaggccgcgctcgccagcctcggcggggcggctcccgccgccgcaaccaatggatctcctcctctgtttaaatagactcgccgtgtcaatcattttcttcttcgtcagcctcccttccaccgccatattgggccactaaaaaaagggggctcgtcttttcggggtgtttttctccccctcccctgtccccgcttgctcacggctctgcgactccgacgccggcaaggtttggagagcggctgggttcgcgggacccgcgggcttgcacccgcccagactcggacgggctttgccaccctctccgcttgcctggtcccctctcctctccgccctcccgctcgccagtccatttgatcagcggagactcggcggccgggccggggcttccccgcagcccctgcgcgctcctagagctcgggccgtggctcgtcggggtctgtgtcttttggctccgagggcagtcgctgggcttccgagaggggttcgggctgcgtaggggcgctttgttttgttcggttttgtttttttgagagtgcgagagaggcggtcgtgcagacccgggagaaagatgtcaaacgtgcgagtgtctaacgggagccctagcctggagcggatggacgccaggcaggcggagcaccccaagccctcggcctgcaggaacctcttcggcccggtggaccacgaagagttaacccgggacttggagaagcactgcagagacatggaagaggcgagccagcgcaagtggaatttcgattttcagaatcacaaacccctagagggcaagtacgagtggcaagaggtggagaagggcagcttgcccgagttctactacagacccccgcggccccccaaaggtgcctgcaaggtgccggcgcaggagagccaggatgtcagcgggagccgcccggcggcgcctttaattggggctccggctaactctgaggacacgcatttggtggacccaaagactgatccgtcggacagccagacggggttagcggagcaatgcgcaggaataaggaagcgacctgcaaccgacggtaatgaccctttcccaaccatagaatgtgtttggggccccgctttgcctgctggagggtgttaaccttagcttgcttttcggcgtattctgatttagctttgggagagctaactttattggtcttaggtgttcagtgctacctggcccactgcttgtctgtttgtgacttttaagtcagaaactggagatggtaagatccgataatttccctaacttaatacatcgcggtccctctcactagcaactcctaggtatgtgacaaagttgggatgtttatcaacggtccgcctcctggctagggaaagagctctggggcggagaatgcactttctgttttttgaaaacaacctcattttgtgcccttaaaagccactggggatgacggatccaggattgtgggtggaggtagtgggtttttcatcccctgactatggggccaacttctgccagccattgttttttctaataaagattgtgtgttctttttaaaaatttcccctgcgcttagattcttctactcaaaacaaaagagccaacagaacagaagaaaatgtttcagacggttccccaaatgccggttctgtggagcagacgcccaagaagcctggcctcagaagacgtcaaacgtaaacagctcggtgggttgatcactaaaggagcacgcactggaacccggggccttcagacctcacgatacctgatcttactggttgctggcaaattaaaagcttatggggttttgttttgtttatacttcgtgaggtcaaaaaagtagcaatggggaaggctggggatacggtaattcctcagagtttctatgcccagagatactttctcttcaaactgttgaccagagcagctacttgtaacccaggccccatcgggtaggaaggtcgtttccctgtgagtcccactaaaacgtgttgggagcaataggttctttgcccatccgaacaagaactagggtactccctcagtccgaattaatgagaattaatttcctagaggttcagcttgagtcggtaacagattttgagccatacatggaaaaatggcaaatacatgattaagtttcaattttgagggggaatgtttggtagaaattgctcatctttggttatgcaagggattagagatgtgaataggatggtatgttgtgttctttgacattttaataaactgtcactttccctgttgtctcctaagtttggagagagaaggaaccagtatttgcaaaaaccaaatggaaagataaaaaagttactaaagtttctacagaatttctggtaacactgaagttgc

SEQ ID NO: 57557 - DNA, 2866 bp, Homo sapiens
agcaagaaaaacaattcgaaataggaaggagaggagggtcagaaaataatgaaattaaagttcctctgagtaaaaaaagataattcagaaagtgtctctaacagaataaaaaatatcgcctggattgctgcaggcaccccagtctcctttcctaaagaggtctctttaaacagaattttgagagattgcgttttagttatgcgggccagggagaagtggatgctcgccgcgccaggcacgtccacaggaacgcagccccgagtcaccgtgtccttcgtcctttacccgcctgtgtcaagcctcccaaaatgacccgcagttcagctcgtccttcgccgtgaacgtccctttgcggggttgcggccgccgtcgcccgccaccccttgccccactacccaagccactgcgccgtcgtctccccaaactgccccgcagttccgcgcccgcccgccgcggcagttgcggggtcgggctggctggtgcctcgggacgagaaggccatcaagtgttgctccctcatctgtaacgtgcagccccccgcactgtcgccgtcgtcgcgcgcagttcccgcgcccgggcggccgcgcctccgccgcgcagccgggctgggcggtttctcagaaactttcctccctcctcctctcctctgcgctgagaaagcagcgaaagctcccactcctctccgcaaacggactctccacctgagtaaccggccgcctccccggccgtggggatatcggagctaaggggagagccttcccgagttcgccgaccctccggcgctgcagcccgctcccacccctaccctgggctccaatgatccgcagccccgcgcatttcgaaagcccgcccggctcgccggcgcctggggagggccacggcggcgcgcagcccgggccccgcaccacggccgcccgcgtgggtcccctctgccctcacccccgctcggcaacgtgcccccatcgcaaccccggccgcccggcgcgggggcctgggacggggaagaactggggaaatgtgggtttgggggcgtgtttgggggactccgggagcgtgggcttcacaggcgaggagcggggcgagaggcctctcaggccggggtgcgcccaccgccccggcctcagggagcgactttcccggaggccgggggacgctgccttcgccatttcatcttcatcatcacagcgcccacacttgctcttctctcaagctctttgcacagaaaaagtgattctaaatctcctctaggatctcctgtctggtgttcagagtatgaatttctttttaaaacttgctgtgtctttcacctgggccacaccctacgcccacccaccccctctcagccaaaagggaggtaaaaaatcctgcgggcccagctgggggtggggaaggggcccacagtcccgctggaaaacctcagcggccacctcccggatccgggctggcctggggactggggtgggatggggtggggtccgcctcaggccgaccccgcagaaccgaaagtgccgagttgacacgtaaggcccagcccctctgcggccgcccgcgcgcccggcctgtcacgcgtggggacactgagcagcaggcatcggagcgagcagtacaaaaagaaatcaaggcgttgggcgcgaaacctcgacgcgcctctaaaggaacgttgagaaaaggcagggagcagggcgcgcggccgggggattgcatcattgcggctccccctccagaaaacgggccccgaaccgcggcgaccatcatggcgctcgcgccgggctgcgctccccgcgcgcctgccccgcgctccggccgcggccccggagcctcggacgcgcatttcacaaacattctcgccctctcccgagcgcccgcccccaccccctccttctttctgtgtgtgtgtgcgtacgtgtgtgcgtgtgtgcgcgcgcgtatttgtgtgtagggagaacttgcagatgattttttttttccctcccgtgctgctggttgtaaacttgattggcattggctgcgcccactgaccccgacgctgagtccgctgaagatttaaggtggatccgagaagctgcagcttcaggcggagtctcgcgctctagtcggttttgggaagagaaaaaaaaaaaaaaaagccccgaaccgggcgcccgccgcgtttgccgaatctcccgcggccccagcccccgcgcccgcccggggcccctccccgcctcgcgcgccgcgcgcggcctccgcccacctcccacttcttccccattggccggcgcgtgcagtttgaatttttttttttttttgatgcttgttttcttgtaaaaaatacagtcccccagatcgtgtgacgaaacctgcttcggcggcccgaggtgggggttttgagtcggttagtggaggcagtgggagcaggatgggcggagcttctgttccaaaaatttcccctaagtgcggttgacagtgtgcaggcaggcgggggtgcgcggggcggtcagcgatctgcagcttcgcggggacagagatgtaacccaactcgttcacggatgttccgcgcgccgtgtcaccggctgcgggccaggggtactcggaaggcgcgggcaggagcctggcgaggatgcaccttcccctgccttggaaaggtagaactggggagtgcgggagggtggaggtggcccggaaaagaacacctcttcgcaaccaaaaaaaaaaaaaaaaaaaaaaaagaggaaatagaggaaaaatgtgttatttcaaccgccactcagaacccatcataattcagccagtcggtgtcatttttattgaattaaattttaaaaaagttttctttgatttccagagcgtttttgcgggaggaatatgttaaaacaaactcaagata

SEQ ID NO: 57558 - DNA, 594 bp, Homo sapiens
ctgcctctattcttacaaaagctggtggcattataaatgggttcttctggaaagcaatatagcactatataacaaaaacgatgaagatggtcattctccttgacttggtattttcccgtttgtgaatactcctcaaagaaataatccaaaggaaaaaaaatgtacacagatgtcctggcaactctagttataacagtgaaaaacctggaagcaatccaagtgtctaacagggaaatgactaagcaaacaatgggattattacatagctattaaaaaatgacagaggtgaggactatgtcaacatagacaagtgtgtatctatctgcaggaacgttaagtagaaaaaagaacacaggctagtgtttaaacactagtgattaaggatgtgtgtgtacattaacaaagattggaggctaatttggaggaatgaaaatggctggagtgcagtacttgttgagtctttattttcctgtgcagttccatgaatttttgacaataatacttgagattccatgcaatatagatatcctagaggtcttctgcagaataagtattctaagttataccaagctgtatagtccaagagaaaatttt

SEQ ID NO: 57559 - DNA, 1995 bp, Homo sapiens
accattactcatttttaaaagaaaactttcataacaaagagacataatggtattaatttaatgtgacttagtttaaatcaagcacccagcaaagactgatgtttctgaagatccaaggagccctagttagaataaacagtgcaaatctcattttaggcttgattctaagaaaagagcctggaagaatcacaagcagaagagttgcttcaggcaagcatctaacttagatgtttcttctgcttggtagaaaatacgatttttgaggttttggtgaagtctttttcattcattagagagagagaaaagtgtgttgcaaaactcctaggatccaattttcacatgatgaaagggctttgtaaactgtacaacccaccacttacaaagtgttatcttaagtagagcaaaggcctcagtactggagaagccttctaataccacgcccctcccagtttaaatcttatttaacacatagctgatgaagcccatcgttaacgttccctgggagagaagcagaagatagcattattcctatttccatatgcagagataaggtcctgagaacttgtgtggctccccccggattccagaacaggtctttgagaactcgtctcatgatccactggaaacagacccgttcccctagcgtggcagtggctgctccgctgaactcgtgccaagttcccgctggcgtccgggcagcagggcgggagcggcggctggcacggagactccaggctgaccgcgtgtctatgtccccgcagggaatggagaggccggcggcccgggagccgcatgggcccgacgcgctgcggcgcttccagggactgctgctggaccgccgaggccggctgcacggccaggtgctgcgcctgcgcgaggtggcccggcgcctggagcgcctgcgcaggcgctccctcgtagccaacgtggccggcagctcgctgagcgcaacgggcgccctcgccgccatcgtggggctctcgctcagcccggtcaccctggggacctcgctgctggtgtcggccgtggggctgggggtggccacagccggaggggccgtcaccatcacgtccgatctctcgctgatcttctgcaactcccgggagctgcggagggtgcaggagatcgcggccacctgccaggaccagatgcgagagatcctgagctgcctcgagtttttctgccgctggcagggctgcggggaccgccagctgctgcagtgcgggaggaacgcctccatcgccctgtacaattctgtctacttcatcgtcttctttggctcacgtggcttcctcatccccaggcgggcggagggggacaccaaggttagccaggccgtgctgaaggccaagattcagaaactggccgagagcctggagtcctgcaccggggctctggacgaactcagcgagcagctggagtctcgggttcagctctgcaccaagtccagtcgtggccacgacctcaagatctctgctgaccagcgtgcagggctgtttttctgagaacatcctttccccctaatgaccgaggccagcaaatcatcctcatgggatgctccagaatttgtagctcccttaggaaaacaccaagctgggttaggagccgaaggcaaaggatgagaaaaactgtttttgaagtgggcaggtccccaaagcccttcttttcccatcactgtgacatctgcctgggcttgagtgctacggacttttcagtcttcctagtggaaaaatgtgacccaaaaactctttttcctttatcaaaaactttctgtctaaacacagctgggcaggcactcctgttttaaagttatttcggggtccctgaccctgccctggtggcttggcctgagactggagagagtgccatcctctgggtcctctccaagtcctactagtctttgaagtcctcaaaatgtgcgtgaggaaggcgtttgcctctattccagaatttctgatacaaagaactccagaatccagagcaaatcagcccttc

SEQ ID NO: 57560 - DNA, 980 bp, Homo sapiens
ttgcgaggctgaggcaggcaaatcacttgaggccaggagtttgagaccagcctggccaacgtggagaaaccctgtctctactaaaaatacaaaaaaaattagtgcgcgcctgtaattccagctactcaggaggctgaggcacgagaatctcttgagcccgggaggtggaggttgcagtgagctgagatcgcaccactgcactccagcctgggtgacaaagtgagactgtctcaaaaaaaaattgtgtatacattaaaaaaaacctcacttgtatgaagggaatacaaggaaaccaggaaatgactcaaagctgccctttcctttactacctggcccatagcatgaactgaccttgaaaccctagcctccgtggctttctacgtaagattgtaacatagcatttgaatttcctgcttattgttgactgtaggttaaactcgttccttataaattttatttgcattatggaacatcatttgtcctcttcagtttagttctcagtctgagacaccagatttttttgggagcactagacataaaaatctgttattcctagtgggtctaggagctcaaggggtcaaacggcaggtttggtaggaaagttggcttttctgccaccctccaaccccagcccctctgtgctgctcctaaccactgcctacgggctggtgtccaccgtggaagtggccacagctttattaaattaccacactcctaggtcggtttctctctctctctttttttttttttttccccagattcagaaactccctatgacccctatgattagtaaataaataggctctggggatttattcatgctaagcacactcacaggtgactaatctacaaaccagtctcactcacccactgggcaagtattttctgaattcctattctatgctaggcaatgggaagtgcattagtgcacagcacagacgtgttctagtcactgttctggtaacccttgctgtcgggtg

SEQ ID NO: 57561 - DNA, 1160 bp, Homo sapiens
cgctgtcctattcaccagccatctagcatagccttagcaaatggtaggttctcaacattattgaataaagtaatgacataataaaaaaatagtattgtaatatcaatccgttccaaactctatggttagaaaagcggggaacataactggcgacacacgtagggaaggctctttaaaagggacctaaaggtcaactggagtccctggtgatcagccccttctgcactcggatctattccgcaagcctacgcgcccatattcactgggccccacctgcctagcggacgggtgcaatccccggcaagcccgcagggggcgcgcagagcacgtcgtccggggagaactaaaactacatttcccagcatcccgcgcgccgcagacccacttccggagacctcacacaagatggcggcacccgaggaacacgattctccgaccgaagcgtcccagccgattgtggaagaggaggaaactaaaacatttaaagacctggtgagaatggatgacgctggcttcttttatgtactctggtgctaggctcagggagaccccaggtaccttagatcccgctctgatagtgtacaaaagcatcttggggcctagcttgggttttccccagaatttcagagggctgggtttcggacgtgctctgagtttgggtggtgggagggctgctgggccctgagaccccctatttgccctattcgccactttagtgtggcaacgtttgtatgtgcatccaggaggttgtacatatggggaatggaattggtctctttataactggagctttggagtcagatgaaccaaccagatttgaattttgacacagtctcttactgaggacaagttgttacctctctgtgtttctctttccacatctgtaaattggggatagtaataagtacttacctcgcagaattgttgtgacgattaaatgagatgatacatgtaaagcacctggccttggccttggtgagcagaaagtgttcgttaagtcttgagctactgtctcatggtatagttaaagagtaggctctgagatgcacagtaaataccttttaaatcaaatacaatggttgtacatgatgggtctgacagtcagttaagtaggagggaggtaggggtgtgctgttcttggctaaggtatatttttctga

SEQ ID NO: 57562 - DNA, 705 bp, Homo sapiens
cgattattctgaagcatctgcccctgaggaagtaccagtggtaggatactcatggctcccatgtctgttctaacccccacttttttcctgagctccaaacaagtatgtccagctggtttttagacatacctccaaataattatgcccaactggtttttagacatatctctaaacaagtatgtccaactggtttttagacatatctctttgagtttactataggaatcttaagttccaagttccctgtgtggaaaccaaagtccttattttcctcaccaggactaatttttctgttgcctatattgcagtttttggcttttgagtgtcccgtactaaaaatgtgtgagtcacccacatttccttttgttagtttctgaatctcattcctgtgctcattcctggcctcagttcaggccaccatcatatctcccctgaattacatccaatgtcccagttaagcctttgttttccctgttctggtcatttaagtcatttctgattgtaagtcatgttcaggttatgtcagggaaaagagatttgtttattgtaggattatcttctaggtaaagaaaacttctcagcagttacacagtcagaacaggggcagcaactgtaggggtcatgatttaatagggagcattctcactggccactgtggtagtgcatagctacctcatgggctacagccagctcggagatagtgat

SEQ ID NO: 57563 - DNA, 789 bp, Homo sapiens
tatcatgagaaccgcaatggggaaaaccacctctgtgatccaataacctcccaccaggtccctcccgtgacatgtggggattacaattcaacatgagatttgggtgaggacacagagccaaaccatgtcataaataaagagtgtttaggcatcagtgtgctattctggatcttcttccttcaggttcaaaaacttcagcgagcagctctgaagaatcctgtgaaatgtgccgtttcctctaaataccagacagttgaaaaattacagcaatattatatttttattccctctaaattcaaggtaaaatgtttactttgatcattcctgcctctccctcttcttttcaccaaagcatctgaaaatgtgtcaactcttgattaggtaagagctgtaatgcagattggcatcctgtctgtttgctttagagtgcatatcgtgcttatattatcaccgataagccagacatgccaggaattcacaacacattaaatcacaatactgaggtcatgatgtaatcatataattccttcccatccccatccttgaggtaatttttcctttgtctgcttattatgtggcttttatttaggatgaagcccctggttttgtgctttgatataaggacttctcctgtttgctgagtacagatctcctgcctgccttaaggctaagtggggaatatgtggttcacagagatgataatgctggttaaggaatgcaaagctggcagctggaggtctggataattgaaaagcgactataggcttagtctttaccttatgtatatgc

SEQ ID NO: 57564 - DNA, 1979 bp, Homo sapiens
acccctgggagtcttaggtgtgaaatgggtggactcacagacccctgggctgcatacctcaaagtgttccaacactcaaggcactgcctgtggttttttgggagtgaaataaaaacctaacaatggtggggtcacagtctccagtaggtcacattttaaaagcactttaggctctggagacttggggtgtggggagaagtgaagagaaagctggggagccctgggccttcccccatttcttcatatgcagaataatccagattagtttaccaagcgcgctgataaccactttaaaaacagagtccctcctgcctccccgtggcatggggtagaacctggcttgagccccgacacaggcgggcagccactccaggatcgttccacacgtaaacaaagacgagtttcggtccgattggcttgatcctggaagaggagtgggcagtggagggaggggaaaccaggcaccaaagcaaattccttcatttcataatttcatctggcgcccccgttcaatcagcctgcattgtcgaggctttaggagaggcagttaggaaaggagagatactgatctctcagccccagggcagcactaatggtgcctgtctagactctgacaggtggagctgctgagctaactacggacctggtgggggaagttttccttggctttcacgtggctttggctggggagccctgagaaggtggctgcctcctttttctgaagcctggcttcccatacggcagtggctgggggagagtgatggagagaaaggctaagctaaggtcaaagaaagtggaggaaggctggcttgtcccgctggacttgacggcggagctgctgcaatctcgcgggctgggcccttgccccgggtggacccgagtgcctgcggggaggcgggtgtggctcccccgggaggtgacagctggcggggcccgtaaggagctggtctgctccggctcccctctcgtagccggcgccctgggaccagcgcgtgagcacgtctcggaggagtccgatgcgctgggcagggccgggtggtcacccccgcccagcttccaggggtgactgtgcctctgacgtcagacggtttttgggtcattccctggcacggggactttattttcataacagcatgaagtgccgtggaactggaataggcgtgtcctctccctcgaccctccccctccttgtccctctgctcacccctcgctcgttccctccctccggcgagggccgcctttataacaactgctcagagtgcgagggcgggatagctgtccaaggtctcccccagcactgaggagctcgcctgctgccctcttgcgcgcgggaagcagcaccaagttcacggccaacgccttggcactagggtaagtgaggcgccaggagcccagagcgctggggcctccggatttaaatcgtctggggagagcggggcgttgggaggggtgggatagaagaggagagaaatcctggtaatggaatacagttggctatgagaaaaaaattccctaggaaacagttcctctagtttaacaactcagatttttttttttttttttcccctttgcgggtttcctaggctaagatagaggcagagagcaaagagataatcagggtaatagtttctgctcggacacattctacaaactttgagtagatggaatccggccaggcaggaggtgagcagctctgggatcactctgcaggaaaagaatagagggagaaagatctcagaggacccgaaggtactgggagtggagggggagtgggaaacaaggggcaggggcaggagggaggacacggtgacagctactattttacccagatgctgcaaaaagcccttctgagttttgggaattagatctagaagcccatcccttttctcttgatgtgtgggcggtcagttccactctggtgtgccttgagttgctcagaaacctgggacagatgaaagttgaatgtgcgctgagagtgc

SEQ ID NO: 57565 - DNA, 3011 bp, Homo sapiens
acttataaagagctattctttctgaccatgtgacactggacatgtaccttcctcactctgttaggtttctcacctataaaatgggctgtaggaatgttaaatgaggtaatggatgtaaaagcatgtaaatgagagaatatgtgtaaaaatacataactactcagcatagtgcctgactcataataggactcaggaggtgacagtagctgtcattattcttactcataattacatcatgactgttattactactgactgaatgtagcaattcgagaatagagaaaaaatgaaaatgctagaaagtcacacattttcagggctgggctggcgcgaagacacattttgacagaatgagagaaatctcataggaaggaagacaaagtcagtttgtctttgcaaggttctgggccccagatgattcattctcagatgctctgggaaggactgcgtagaataagcatgggcaaacttccaggcctagtcacaagcaactctacacactttccccatctctctggttgcgaagaggagtctcaggttagaaacccaaagcgggagactcatcacatgttcacgtttttccctgcacagtggtcagtgctgtgtgtcagtcaaggccatgtctagggtcagcgctgctccaggagcctctggctttgtccttcaggtgggcagtcccttgctgtgtctcttcttcagacccttcaaccttacctctagccctggcttttagtttgggtaggagtttgtggcacatactcttttaatgacaggagatggggcaagaatgaggatgagggggagaaagaaagacatctggaagttttgtacatgaagctccccaggtgggtgaacggtggagctgaacatgagttcagaccacgtagttcagcagcgtgtcctgcattttatagatgagaggaggctttgagaggtcaagtgacttacttgttcacacagcctggcagctgaaaccccttctccctaaaggggaggaggaacagagggcttggagttgacccaagaaatgacttcgccctcctcttcctttcctccctcttcctcttgttcttattcttcccttccctctccctcttccccactggtttttctaaacctttcttttggggccgggcacagtggctcacgcctgtaatcccagcactttgggaggccgaggcgggcctgaggtcgggaggtcgagaccagcctgaccaacatggagaaaccccatctctactaaaaatacaaaattagccgggtgtggtggcacatgcctgtaatcccagccactcgggaggctgaggcaggagaatcacttgaacctgggagatggtggttgcagtgagctgagatcatgccattgcactccagcctgggcaacaagagtaaaaactccgtctcaaaaaaaaaaaaaaaaaaaaaacaaaaaaaaaacaacccagaaaaacccaaaaaacaaacaaacaaaagaaccaaaaacccctttctttcatgcctagattcattccaaaaaggtttaagacagcaacaagtgattccaggatctcagctgtgggcatccttgtgttactggatggctgtgtgttaattgttagcagctggaataagtgaagagggtctcgtcctcatactcaaagtcctttgctcatgcccaaggccagaggctactcatgctgaaacattaccatctccctccaaagtgcagggtttagtcactgagtactgggtggagcacatgactggatcccagttaatccctcccagcttaccagtaaaacctcaggattcatgctttcctgggagccacctgcggccactaagataggagcggggttcagacatggccaggcgctcctaatctcagacccaaagtgcaatttttggcagcctgcatgagaaggagggtgggaggaaaggtggctagaaccaagggtagcagcctgggggcttgagaggaaaccaggcacagcccatcctaccctgtctcacgagcagcccgtcctcctcctgactccccttaccccacacaccgagcgccattctcttgctgcctcatctattctggttaggtacttactgagcatcaggtgctaggcaagtggctggggagagacaacgtttaatgactcagtctccgcctgcacagagcctttgagtctagagggagacacagacttactgacaggctgggttgtgtaataagtgctacgggaggaaaagctgagagtgtctgagaatttatgagatgtgtgtctcatcagacttgggcatcaaaaaaaaaaaaaaaaaaaaaccatcctggaggaaaggacctctacgtcaagtgaagggtggggtccatttggtttttataggagcaagttctttgttggctggactctagatctcccgtcctttgactttggttacaaataatatccaaaccaccgctagtctcattctcttttctctttcctgctctagccctttgctcctctcccaggctgtttctctagctccagacagttcatattcctaaatgctgatcacttctcttttccctctcaaatgctgctttctagaaatcattttcagtttttcagaaccctgtccatctcttccaatcccctggtgtctttcccttacctgggtcattctctgggcaacatggcaccctttcagtgcagacttgtttattaataactccagtgagttttattttcctcttactaaattcaaagtactcagaacattttagacttgttgagcaatccctatcagcttagggatggggtgggggaggctaacagaggtgaattaagaatgataattccaaactaattagtcatccagattaaaaaaaatagactaagatggttttttttttttaaagacatttgtgagagaattgggaaatatgaatcctaactagatagttgataataaaggattcttgttagttattaaagtgtggttaagaaggagtttttatcttttagagagacgttctagactggacatgggggctc

SEQ ID NO: 57566 - DNA, 2722 bp, Homo sapiens
tgatatagtttaactttatcaattaggcacagtaagagatgaacaacaataataaaataacagcaattataacaatatgccagcattgctaagcttgcactttggggccattactaagtaaaataagggttacttcaataccgccacggtcgatccgatcaccaagctagctactaagtgactaagggcggctactagagataggaggctgaccttggacaaaggggcattccggtcccaggaatcaagatttcatcctgctacgcagaatggccggaaacttaaaacttaggacttctgtatttctggaattttccatttaatagttatggacaagagctgaccacaggtaactgaaatcgcggataaagggggctactatccgcagttctctagtacttgggagtttcttgcgacactcatttctgcaaccgagtgtctctcaacaaatcaaactgttcggaatgtttggaatattttaaacgaaagaatgcattcaacaggcagtgcccaactccccaagttgggattctctccttggatcagtctctcctgtttacccccctcctctcaccaccggctgcagggggacctctcactcctttccttcccagtccaaatgctgggcggtggagagccgcactcgcgacagacaccagaacgcaccttcgatagcacattcctgccccacctgcccctcagcacccgctgcagccccgacgagggtgggggtgggaggcagcaatccttcaggtcctcggcagccctgcgggcctaccttgtcccctttgcttaggacctgccaaggccacgtctctacgcttccgaacagcgagttcttgatcatgcccaacatgttgtagccgagacgctcccgacgcacgggaggacgtgaggtggcgggggcgacggagcaccacgggcagcgaccaccggcggcagggcggcagggcggcagggcggcagggcggcagggtggcagggcggcaaggcggcgggacggcgaggcggcgaggcgagaggcggggctagaggcaggggccagagggcgtggctagagggcggggcggcaattcagcccggcggtgaggcaagggggcgggacggcgaggtgaaggggcggagagagagggcggggcggcgaggcgagggggcggagagagggcgggtcagtgatgcgaagggcgggcagcagggcagcagtgcagcagtgcagcagtgcggtgaggcgagggtgcgaggcggctaagcaagggatgggcccgccgtggcgagccgctgggccgtgttccgcctcctttcgggctttccgcgggtgtctggggagggaacccggccgcgggcctcaggccgtccccctccgcagaccccttctcttattctgagtctaacctatccgctggggccctggaaagcgattctcgcctggagtggctttaggcagcggtggtggggaacgtcctctctcaggtgcctgggctccaacctccgagccccgggttgctcacgcttctccggtcctctacccgaaggctcgatcccgctggtacagcggcggccaggctccctgtcttggtagctgtccctctacccccgccccatgacctcttctagaccattgaaagagcatccaaaccactttcctgctgccactctttcctaccatccctctaaatcacagtttccaggtgacttttctaagcatggcttttctcgttcactcctgttcaaaaatcttctcaccaattttgtcaccatttactcagctgagtgcctgctttctgtcaagtattttaccaataaatctctactccacaccaccgacaagaaatattttggagccatttaaaaaggaggaaacggaagcttctgccgctgcctgatcctccattgctccgagccgcgcgggtgcagcgggctgtggagccgcgggccgagccccgccggagcgcccgagagcccgcgcgtcccgggcgtccgtcggggtccgaggtccctccctcagggagtccccgctcggcagcgctctcgcgtttcacgcagcggccggggatctgggacaggcggggccccgaggccgagcctggcgctgcccagcggccggtgcaggcctcaagctgggccgggcggaggggaaccggcgagttgaagccccggggccgaaagccggagcctgtggcggccgcgggggtggggaggggggtggggcggcttcttgggcagcgccacacggcggcgcagtgatggatgttaacagcagcggccacccggacctctacgggcgcctctgctctttcctcctgccggaggtggggggcaggctgcccgacctgagccccgacggtggcgccgaaccggtcgcggtctccgggacgccgcatctgctgagcgggggcccccgaggtgacggccagcccggcgcccacctgggacgcaaccccgggcaatgcctccggccgcggggagcaaatcaagaaagggccgagaaagttgtgatcggctctgtcctgacgctcatctctctgcgatcgcgggcaactgcctggtggtatctccgtgtgcttcgtcaagaagctccgccagccctccaactacctgatcgtgtccatggcgctggccaacctctcggtggccatggcggtcatgcccttcatcagtgtcaccgacctcatcgggggcaagtggatctttggacactttttctgtaacgtcttctccatga

SEQ ID NO: 57567 - DNA, 851 bp, Homo sapiens
cactgcaagcttacggggtattttctccccatttcactgacgaggcaagtgagactcagagtggtgaggtgacctgcataggtagggtgggagaaaagcctgcggagcgtgtactctggcttggcctccctcagctctgtccccagcaagcgggtcccacctttcccggtcccagccccacgcaccgccgctcggaactacacttcccggcagaacgcgggcgcgcgcacgcgcaccggggcctcagccatggcgaccgtgctgtccagggcgctcaagctgccgggtaaggagtcgcatgcttgcgaccacccagtccccgccggtgttggaataaggggaggcgaggctctgggggcgaggccggtcgggccctggcctcaacccagactcagctgcaggcgcccggtgccgaggagggtgcagtcccttggggctggggtctctgtgccaccagagggcgagaggggcgcccagcggggcaggggtctcgggcgcggggcgaacccggagacgcgcggggagagggcgccgagcaggtgttacggcggggaatgtcagaacgccggtcgccgctgtcccgaggggaggctggcgagaggagcatccttcccgagcgccgcggacccagcaccgcagggactccggcgccttctgtcttggctggacctgggcgggggcggcgggacggcgagtggccctctgtggatcatcccctccacctaacggcagcaacgacgcatccatgaggcaggtgggacaggtatttacgtcccttcctagtttacagaagagaaaatgagagttatttggctaagtgaattgtccaaggtctcacaagtattgggaaa

SEQ ID NO: 57568 - DNA, 2057 bp, Homo sapiens
cttctcacaacactttctgtattccattataactactgcatttgtctgaaatgtaacttcctcaaaggtctcactttcattttagagcagtcgttctcagttctgatgaactgagttcagaacaatctttggaagtttggaaaatatgccgattcctggacccaccctgagatttcatagtagttctgggtgaggcccaggaattggtaattttagaaagttcttaatatatacccagggaattcatgtaaaatggcacctgttcaactcattttgggcttacatttaataaaaccctctgtatccgcccccggccgttcctccccctcttccagactagccatgaggtcatgtttttcccattctatatttgtgcagttcgtttagggaatcaaaggcaggttcttctgaacttaattgtttgaattagtccacgttctagccaaatgagttgcttcggatcctgcttttgtcacctgtaatgtctgctctcctcagactgatgttaacaagcaaatttgataaacatgtgccatgtgcaggtacattttctgcatcgcccaaacaaccctttatttgttgtgacagaactcactctcctttggaaggagaagcaggaattttgtgttctttgttttttttttttttacggttgcattggcggttggtttcctggctagtagtttcatcacaacgctgggtggcgctatctcctcgtcgtttccgcttccgtcacgtgcttcccccaccagtcggcaaaatgtgggtggaagtggctgctcctccccataggatccttttatttatttatttttaatttggcatcctccctgcctgctaatctacagaatgccgtgtgtcagctctatggaattcagggctcaggctgaactttggggcatccagccactccctataggagtcttgtaggattgtttcatgtagcccattttttttttttttttttttttttttttttttttttgggcggccagttccagcttcagtgactcagtagatcctcaaatacttcccatgggaaatacaactccacggtatcagaaaatacagttagccaatgtttcctgatgagttttgtgcacatttttcttgattgtatcttcagtccctttccaccccagaacagtgaacaattattttcccctctctgtgcttacacccttcaaatacttgcagacacttctcatagcccgcttgagtcactgtttggcatggcctgatgtctttggtttttattgcctctgctcataaactgcaccccctgtgccttaatagcctgaagttcgccttctccagggaaatggggatgggagtggcagactcttaagtgtgttatatgaggaggctcaggggtggatttagagtgaagctaatgaaacttcagcttccatgtcccctactcactccacctcttctaaaaccttgttacctaatttacacttgtaattgtgtactctttttcttaaagagggcctccgaaattatattattttaggcctccacaaagcctgggtccaccccttaggaggctgtgcattttgtgtgtgtacttggctgcctggctgctgaatgtgaccagtcttgattccccctccccaaggaccctgggccacaacgtctaatttcctctttttgacaaaacatgagtttctctgcctggccacaaacatcagagcccagcatcccactcacttcctttcattgtaatttgggcatgttaatatttttttcttccttttcctctcttagaacagaagaagtaattgctagtcaatgtgacataaatataattaggttcggctcagaagctcatgactcagcacagacacgaagattccacacctaaaaacagtatttagctctggcatgttggactgtgactattccaagatgacctccgcaggaatatatatgcacttcaccatttatgacaccacaaggccaacagtggggactaacccatatttgctgaggtcctcagtcactgtttcctgtactggacagaaccacatttactaggctgtgcatcaagagaa

SEQ ID NO: 57569 - DNA, 1665 bp, Homo sapiens
ctggtattaggcccattttatagatgaggaaatgaaggcttagggaggatttgcacctaggcagtccgattccagctcattctctcaaccaccgcagcacagggcaagcactcaagctagagaacagagcttgagcaacacctcagaggtgtaaaggtgcctagctcactcaaggtgcagggtggatgcaaggagggaggagggcataggcctgaaaggggggtggggccagtgtgccatgggccttgcgtgagtttatcttcccagcaaagttagatagcagtcatgtgatccgatctgattgggtctgtgtttcatctagatactctggtgccacaaactcagtgcctacagggggccaggcccataaggcaaatgaggcaagcaggccaagcgagaaggaggggatgtttggcaaagcaaaattttatttgaaatgtcctgattttaaaatataggagactaattcagattccttttttagaacactttcaggaccaaacaaactatgtgtgtgggctgcaagtttgctactgctgacatggaggatggattggaatagagagagctcagaggcaaggggctcagtgtcaggagcccattgtaacagtctagacagaggaagaagactggagcataggccacagcatagggaggaagtggaggggtcaggcctgagatagattttaagtagattaaataatattagttgactttgaatgtggagagtgggagagggaggagtaaaggttgacctggtagatgatggagccattcattcatttaatttttggacaattatttattgagtacctactatatccaagatatggcctgaggagcagagctaccacaaggaataagacacgataccttgctgtgaagaagctctgaatctactgagaaggtctgttgaaagataaggtctgttgagagatttgggggcatgtaggaagagcacccaccctagtctgaagcagcagggtgttagggaaggctctgctgatgcaggagaagtgcaggtgtgagagagaggggcacacattggattttggatttgttgagttgggttttagctacagcccaggttgttctgtgatctgataccactgctctgtgatgcttttagtttcatgacacgttaagagtccagacagcttgctcactcatatgacacattcctttcttgaggtcatgcattccccgtatcctcttttaagatacttggcatacatgtgtatactgctgagagtgtagcagatgctggcgttactgtcaacgtccatttctttcctgggtccctgcccacttgtcatccatcttaggtgttgcaatatttgcaaggtgaacctgggcttgtttgtttagattactcattgctgttgtggagaatgatctgctttctttcaggtattatgattatcatatggtggattaattaggaggaagacaccctgtgcagttcatcactccacctcctgtctgagagtgccacacattctttattcaaacctgggcaaggttttgcttcattcattgaacacacatttgttgggcacccatcatgtgccaggcactgttctaggtgtttgggttgcattcgtgaacaaagaagggctcttaccctcatgcagccttgctttcctgcagcctaaatgatttgtt

SEQ ID NO: 57570 - DNA, 2057 bp, Homo sapiens
tcgaatttgatcaacattttggtgaatagccaccagtctgttttctatctttttagggaatataagttccaagaggcagggatgtcattcacttctgtgactcagtgctctgaatcaggcccagtgaagactgacgtgcagcctgtattggcagaatgaatgaataaatactacacacgcatattttgaattgaaataagttgtcagggtgcagcagagaataacagaaatagaattgcttggatgtgctgacctagatccaagctgctactggtaacgtactgtatctccttgaataagtcacttcacctctctgggcctgagctgcttcttcagtaaaataatccttgtagctaagatttgttgagcgctcactatgcacactgccatgagcccctatatgtgtatttctcatcatagctctatgagttacatacctgccatctccattttatgcatgagaaaataggcatggagaagttaagtggtttgcctaaagtcacacagcaaatttgtggagagctgggcttgaactcaggcatctgggcttttactctctccagtggaatgcctgggctgtgggatgagatgacttcacaggcctctcccagctccagagttgagagagagagaggagtggtgcagggaggtagtagggatgattatgctactggccaagttcaagaaagtcaattgtagaacaaggtccagctgattattacagagagcaaagttcttaactagaggacttcctcctggaatgtggagagtccacacgggcactagcagagcataatgaaagaccaggaattctctgctgttcaatcagtgctccatcactcagaggcagggctgcaagagctcctagtgtgtccccttcgccttcagggcctccctgtacagccacccacaggacagtgcaccagggtcaggcagggaagtaaataaaaaaaggaatctgataattcctgacagtgagcagcagctgatgcttttaatgggggaggaagactgggaatctcgcttgatgatgacctaggacttcagtcagcaggacactggcccctttcctccccctcccaggctgaaaccttgtgttttgccttatgtccatggtaaccaagtctcctttttggtgaggaggaatgggcttcagtaaacagatctatttgtgtgatcctgttactcatttgaagcaatgtccctccttttttccactgtggtctgtgtgtctgagtcagagagagcctacaacagggttctttgaattgatggctcactcccagccactcttgactgactgccagcttagcagggcgtagcttaccaacaaatcttttttttttttttaaagccagactgattcatagaaactcctttaaaacacggtgaaaagaaaccgcccattacacaccccagtacaccagcagaggaaacttataacctcgggaggcaggtccttcccctcagtgcggtcacatacttccagaagagcggaccagggctgctgccagcacctgccactcagagcgcctctgtcgctgggacccttcaggtaggacagctcccaacgctgtggggactctcagcaaaacttctccttcctttccacggctctgcttcttctgacctcatcttagttttgctttttcttttcttccttcgctatttttctatgatcctctaagaaccaagtccttgaaacttttggctcaaagtggatacagagacaactttttctagaaagttcagaaaagtgtattttgaggacggagtctggggaaatcaatgggatggggctaaaatcgtgcctggcagtgaccgggttcttgttctaggatgtggagggagcagggactttgaaacaaactgggataggatcctgtttatggaggaaacaccacacaccttggaaatgacatcgggaactggccagatgtttttcacctcctccgttttgattccgattgcttcaggacttgaactgttactctgctcgctggttgttggttgggattttttgggtggtggtggatagataactggttttcagttta

SEQ ID NO: 57571 - DNA, 1700 bp, Homo sapiens
gttggagcaaagccaggaaagcacaggcctagagaaggcctcccgcctgatctaagggtgcaaggctcaggcctctcttcccactccctcacctcgggcctccctggagccaatcagcttctgccctcagcactccaaagtgatagctctgctgaggatcaagattcactttatattctccaatccaatgggcactcttagcctgtacctttttgttttttttttttttgcctgctgcttattgtatctttgtattttgcatgggatttaattaaaattcctataatgaatgatcacctatattggaatgaatccaaaaactgcatctagactcagatcagctttctgaagccagggccgtaagaactacaaattcaactgaacccctgaagttctcctccctttctttgacttccccatctcaggaaatagccacctatcacttagaattacaggccagatatccaagcgtcactcaccattcctccttctcccccattcttcacatttaattaataactgtatcttggtgattctaattcccaaatatttctagattctttccctttctttccattcccttcagtgtgatcttagtttagacctttaattgcatttatttaaagtagctgaataggctcataagaattcactgctccaactaattttccactctgttgcaaaaactgattttcttgcagtgcaaatatgagcgtgccattctcctgcttttaatccttcattttctccttcaggttgtgcaggataaaattcagaacttgtctattgctgccttttcccccatggccactctatcccagggctaaaacacacacttataccatgttgtgggggttttccccacatgtcatttgtttttctgaaggtccttcccctggtatccggctaactcatcctgatttcacaggatcagagcacattcctcatctccaaaagggtggcctgatgccccaggccctactgaaatgagctttgtcaatgtttacataatatcatatgtgtatttcatcagagcatttgtcacagaatatttgaatagtgggttaaactgcatgcttctctcactggaccatgagctacaagagggcagggaactcatatttcatttcctttccttcagcatttagcaggatgcctggcaattagcagatgttcaatataattgtgtgagaagggctggggaaggtgctgggacacatcatcacgggtgacagaaccggtcccctgtggcactcactgtttcggggaattggacaggtggttccaatgcaggcggagtgccattgatgctgagagagaagggaggaaatgtgcctctgggggttgtctgttactatttttagggtcattaaaagtgattaaagccctctctgtaaaagtgtacacatatatatttttttcataaaattctcctaaaacatccatgggtttcctaagtagtacagcccttaggcctgggcagaatgacctctgctttagagcattgcatttatttaaagtagctgaataggctctggtcctcatccagctgtgcatacatttaagatgaactttaagggtgaataaaatgttggaagttgtaaagaagttggaagttgaaagatcagccaacgaaatcatagcgatggaaaagctggctggagcaagtgacccatttggaaaggtagactgggggcttt

SEQ ID NO: 57572 - DNA, 871 bp, Homo sapiens
cttctccactttcttcagctagaggcaattttactcccctctaagtaactctatttatcagattgtgtctctcttaaattacttaatcacggaaaatgtcacaccccataaatctgttttcttatcttactttattttttcttcttaggtcttgtcacttgacaattatattagtcaggattctccagagagacagaacaaatgagatatttctatatttatatgtggatgtggatatagatgtagatagatgagaggcgatttatgaggggaattggctcacatgattttggaggctgagaagtcccatgaccagacatctataaaccagagacctgaaacaccagtagcatgactcagtccaagtccaaaggtctcagaactaggaaagcctgggtgtaactctcagtctgagactgtaggtttgagaacctgggtgattgctggtttaagtcctggagtcccaaggctggagagcctggagttctcacgtctaagggcaggagaaagggtgtgtcccagctccaggagggagagtgaggaagtccttttctctctgtttattttttttcttgttctatcctcaccccagctgactggatggtgcctgtccacattgacagcagatctttcccacttagtccacaggctcatacaccaatctcatctgggaaacaccctcacagacacacccagaagtaatgccttactggttctctaggcattccctaattcagtcaagttgacacctaaaattagccaatattaagtctaccccttgccaacttggcactcatatacatctccttaagccatacctgacctccaaataaggacactaacaaggtattagttccacttaatgtggtat

SEQ ID NO: 57573 - DNA, 854 bp, Homo sapiens
ttaaaagaaaaaaaagatgaaaaaagaagtgtaaacgtgcagtcatcactgctaacacttcacatttctaaggcaaaaaactgtctaagattgaatttattttccctaatttataggtcttgtttatcttcggcccttcactcttctcttacaatgttcgccttgttgttttttttttttttgaatataaaatataaaccactgcagaactgcggcagaattacccagcaagtgcagtgttaccagtgggggaggagccatctatcctaggccagctcctggcacccccttgcctcgccgggaggaggaaggtgcagctgagcctgcgtccagcagatggcgctgcctgcaaaacctggaagggtaggggaagtcagggcagggaagcagggagctgagtcacgggacaaagggagaggaggcggcagggaggagaaggggagggaggacccgaacggtggcagtggtcggagttctgatggttgcaaaagtgtgaaatgttaattttgaagtgaacataatttcattctaattgtaattaaggtgggaggagacacccgctttctgtcttaagtgcattcagacttgtttgggaacgtcaaaaaactcgaggagccagagctcccagtagctatttgcataagaatggaggatcctccagggaggaattcatcccatgggaagatggagctgctaccgagctagaccaggagcagctggggcctggatcactgagtgctcattgtgcgaatagccaggaagtggctcatgaccccctggaacacagctctgcatcttgcaggggagagaggggaatctgtataaaaactgtaagcgatgttttactaaaaatc

SEQ ID NO: 57574 - DNA, 532 bp, Homo sapiens
ttattttgtgtaagcatcatattaaacatattccattccaactataaacagattttcacatttccaccttccccctcccattaccctgcatcagcccccaccatccccaacagattgttcccttccttcctgtttatattataagaaagcaaaattggcttccccttcattctccacctcccaccctgcaccatctgggggtgcatagctcttaccccgttttttgttgtttttttttaatactccctcgacttcgtgtccagcggcccattcgattttgaagctccgcagagagtgcctccagcggccgccaggggtcgcagtcgagcagctggcgccgcctctgtgcaggggagcaggggccgctggccgggaatcgcaagccggtctcctgtacatattagcgcgcagcattaatcaggccgcagcctctgcagtgctttccgaggggagtcagagactagggctgggaatgagaccgggccttttcgggccactagagccgggccacctcaactctcccgccctaggc

SEQ ID NO: 57575 - DNA, 641 bp, Homo sapiens
ttctacttgcctgccccaaattcgggaggtggaaggaagattcccactttcagtaaactcagatgatcccacacttagtgatcctaaggagaggcccagtgctccatttggcctctttccctgcccaggtcctggatttagtatttccaggcataggcgggagtttctgctgctgactcagtcctgggagctgttggagcgctggccctcctggatccctcccagagatccccttgtcagcaaagccctgcacgaaagccccaccagcaagagcagagggagcaggtgcctggccctctgcaccgcccatgctggcaagctggaagtctggctggcatcacgcccagctcatttccaagagcttgctagctagatatttgcagggagggagccttggcaaggaggtggcagctcggcagaaatgctgcccaggccctttcacccactgcgctgtggcaacagagggtgattgctctgatagagtttggtttatgacactacattagtaagcttatgcctcaggctattcctagccgaatggaatggccagggaaaaggcgatgcaactcctccatcatcagaggcagcatgaaacacttattgtatcgccctaactctgtagcaggggaaatttgatttat

SEQ ID NO: 57576 - DNA, 1056 bp, Homo sapiens
tgttcagttctgggcctttcccttttggaaatataatgtataaaaatgacacacctgcttattctccagcctggcagttgtcagggctccactgcatgcttggagatgtgccaagagattatctcagcaacctcatctcccttgattacttgaagttctcagtgttagtggcgatccttaatgaggggacacagtttaggtaggataagataatgggccatttatcttgcaggttcagagggatttatttctgagattcgactcttccaggagggagaggagtcctggggaataaatagacccagggtactggaacaaggagcacatagccgtggaatgccattgcagaggaagccggacagagccggagccaaggtccccgagagccaggatcaaggcttggttatcttggacttggtggcactaagcacagaactgctgcaggggagttagcctgatctagcccccagcctaccctgacttttaggagaggttgttggcagagtaagtggacaaagctgcatgtgtgcatttctgagtcatgtctttcagaatccaccttgtaagttgaactctgcctgcctcgtggatgctgtcggcatatctctgacttcggctaaagtaaatttcaattactttatcttttggctcttgctgctttttaatcccttcccccctgataaggcacaaccacatccatggcttttctcctgtgttggaggatctggtctctttgtgtcagagtgatgtggatcacagattggggctaacagcacatggtatttcacctccttgcccagagttccatggccacatgtgccatatgactgactcacactttccccgaattacgtaactgctgcctggagccttgtgataacccccctgggacctgctgacagtgctgggactattcctcctgtgaatggctacacacacccttgatgcttgggttcttccgatctcaaagactgaatagaacgtttaaggttctgaaatctcccacttccaaggattcaacttgccaacatttactgagtgcccatcagatgccag

SEQ ID NO: 57577 - DNA, 1752 bp, Homo sapiens
attagctagggacaaggggtggcattctaggtagaggaaacctggaatgtgcatttgttacagggagaagtacaaactggaaagaggtgagaggagaggcctctagtcatctgtgtgcacatgccctccttaaggggagaatcctgggttcagacctcagaacaaacagtggggcctagtaaatgctgttaatattgaaatccaaagtcagaggtgcttgtcttttgttttttgtcattgtgaaaatgtactctgtttatttaaccaatcctctaaaattggacatttggtccttttcatatttttaataatataaacactgctttgctgttccagcctttactgatgcctgccatgtgccagggaccaagctaggaatgcttgttatcctcccagcccactttttgctttgcaattattatgctccttaatagtcctgccactcaaatagggaaagtgttgttgtcattgctacttgacagataagcaaaatgaagcctgaggactttgtccagtttacccatctagaaagatgccaatgccagcattctagtcctaaatccttactggttcttcaacaaaggccagatgccatcgaggacaggaaagaggaccacacaccgaagcccacagatctttctgctggggagttgttggcaaaagcattccacttccctgtttgtaaagtgggcaaatataatactgtgaaatgccacaatgtccttgaatttttctcatactaccaggcacacagagaggctcaatgacatgtaactgtaattaatgctgataaggaagctcatgtctttttcccagggcaagtgggagccaatgaagggtttggagcagcacagtggtcaggcagaccaagctgactcccagctgtttccccttcacagtggcctgggaggggctgctggctctgcagagtttgatatttcctcaggagtacattcaggctgggaattcttggcagaaatatcatttggcaggctcataatgtcagtttgtcccaatattggtgatgttaactttgcttatttgagtaaggtagcatctgccagttttcacttctgttaagtcacattttcttcctttgcaattaataagtaatgtatgaaaaaacagtttcaggataagagatatcctgtctttcaagagactttctcttactagttttaacacccgttgatgactttccaagtccttcattgcttccctatttacttgttgggctctttaaatacatttaatctatttatttatatctgtaagaacttataatttttaaaattttattgtgataacactcaacatgagatctaccctcttaaatttttaagtgtgcaatgcattattgttaactatagatataatgtgttaagcaaacctctaaaatttatttatcttgcttaactgaaactttatttccattgagtagtaacttcccatatccctctccctgcaaccactattccactctgtgattttatgagtttggctgttttagatatctcatataagtggaattatgcaatatttgtcttcctgtgactggtttcgcttagcataatgcccacaaagttcattcatattgtcacatattgcagaatagccttccctttttaaggtctggtattattccgaccccccaccttttttttttttttttttttttttggagtgcaatggcgtgatctcggctcactgcagcctctgcctcctgggttcaagtgattcttctgcctcagc

SEQ ID NO: 57578 - DNA, 807 bp, Homo sapiens
gatttcaaagccaggtgaggaacgggattgggtgtgaccttttgtttctgagtctgaggtgtaaaattctgtggggtaggatggaggatataaactgtggggagcatgacttgatagtctagagaagttggggacaggacagccacctcagtggctgaggtagatcggcataaactgcccttaaactggacccacagggaagtggtggccgaggcatgcagcattcacagcatcaaacccaggggaccatcactgcagatttccagtctgttagcgtcctaaggacaaatgaaaagtgtcacttctagatctacgtgtgtgcaaaccatggtagccgaaggctgaaaacaactaaacataagattgaaagctgatcaggtgagaatgaaaatgaggcccaactgtgactaattctatgctggctcccgcagcgcagtgtctgctaaggacaactggaaaagcttaaatgttagcatgttactgccctctcctgggcaaaaggtcaaagtcggtacaaatgtttgagtcacaacttgttcaagtttgtgtgccccatagcagttaatctttaatccactcttttacaagcctttgaaaaaaggtctgcttttaccgtcttccacgtgcaaacctctctccatgaccaccaccatgttactttttccattggaaccaagggcttctgagatcacagacttcatcgggggtcataagtaattgtgggaaagggattagcatcatttgccagaagagctgatatgacaggggtggggaggacagcccagaacttcagagctgatctactct

SEQ ID NO: 57579 - DNA, 1179 bp, Homo sapiens
gggaccacacactagaagttacaaaagaggttataaagtattcttccttgttggaaatcatttaaacagagtagatgaatcaacccaagagtgtttactgagaccccagcccaggctcagccccaaaggactgtagcattggggttgtaagtgggagctctgtagtcagatttacatgccttcaaatcccagtttggtcacttatgggctacacaacctaaggcaagttatttcatctctttaagtttattccttatttggaaaataaggatgataagagtacttatctcattaaattattatgaggattaagtgagaacatacatggaaaagcatttagcttgctaggatgtgctcaataaattcttgctattattgtttcttatatttgactccttgcctatctaaaaattactggcctaggtttctcatttgccagatcacaatgaacaatgaagaaataaacaaaaggagtgctgagatgcctcagattcctgcacgacagtaaatgccctttgctctctgagcctactctcatgcctctgactcatgctttgggcacaattccttaaaaagagtttccacttcaagcttatggagaaaaataagttttaggtaaaatattactttggtaaagcagttcaaccaagggccagaattttaatacctccagaatccctatcagaaataaattcaacatggaatgacaggcctagccacctacaacatagaaaaaagctaagtttgaccagggaagagaaaaatgaaggacaaaatctccaatccagaagtggtgcttctagagataaaaatttcttacacctcccactcccttgtgaacattccaagaagagcaaggccaagagagagtagtgatatggcctgccagataaaatacaggacacccaattgaatttgaacttcaatgataaatatcaaatacttttagtataagtatgcaaatattacaatatttgaaacatacttctactaaaaaattattgtttatttgaaattcaaatttaattgagtgttctaattcactaaatctgacaaccctagatatagtacagggaacctcctgtatgcagactgactgaggccagaaatgaaatagaaacactgaaaaaacccagagtgatccctgagcagtctctgcctggtagacaagctagagag

SEQ ID NO: 57580 - DNA, 1010 bp, Homo sapiens
aatagattctggctaggatttaccaatggagatactgccaagagatggtgggggtgctggagagaggagaagctacaatatatctccccctttctctctgctttggtcagcatcttcccaggagctgtatctcctccctgactgacattctctgccaggcagccaccacttgttccattctcagtggacaagttctaccttgttccctgtgacccaaaggttcacactggcttcctgctttgctgatctggggttgcacatggggttggccatgccccatttagctttcagctcttcttatccctttgtccctgattcccagcattaaattctcccttttgaattacctagtatgggctgttttcttcactgaataataatatacacagactagggataaaaacccccaaatgttttactcatcaaaatgtgggatttgaaaagcatgtagactattgacatagtttcaaaaccttggaatgggagtcaggctgcctgagttctggccctggaccaggcatagctacgtactttggtatttgcttagcccatcggccttagtgtcctcagccacacaatgagttgtcctctttggtgctaacattctgtgattctatctttcagatataatctgcctactaggtctgggcctaacccacaatggcattgattctgaacgtctcacctcagcactaaaaaatatctcagcacaaacaaacgtaatttgctacatgattcaacaaagggtgctggccaggttagagatactagagccatctccactgcaacaactggcccctgacatttcacctgaggttgaaatgggacagatggagccagcacatccggttaatgtgggagctcagagcacttctacctcctcagctttagataaaagcaagacagcattggtcatcaggctcttacaagtaaatctggccatctgcagactgagtcacatccaagttcaggggaaccactgggtgacattcatatgaaagtactgtaat

SEQ ID NO: 57581 - DNA, 633 bp, Homo sapiens
ccagaatagaatccatgaagctgcaaatggttctacaaatggagccccaagtgaccaccactagcacctactatcaagcacccctagacccacccaccaacctgttctcacaccacgacaccaaagactcccctcctgaggaaacctcaactgcagtgccccttctaccccccagttcagcaggaagtagctagaacaatcgtcatccaacttcccaacagcacttgggctttcctgttgaaaggggggactgagggactaagtggctaaattggctggacttcctgggtcaatagggacttccctaaagtgactttcccctaagccaaaatgagtcatagctgcaagctaagagattaaaacttcaaccaatcaaaggggattttcccctaagccaaaattagtcatagctgcaagctaaagggattgaaacttcaaccaatcaaaggggactttcccctaagccaaaatgagtcacagctacaaactaagggattgaaacttcaaccaatcatatagggagttcaagctctagctgcagcctgatgtttttaaccaatcaggtctgccaacccacaagtggatagaaaattagccaatcctataggacagaaaaagaaaaggggaggagtc

SEQ ID NO: 57582 - DNA, 1148 bp, Homo sapiens
gtcaatattctggcccaggtacttaactgggtacaggagacaaaatactaaaaaacaatctgaccttctaaaccctcagcctgagatggaaacagacaactccattgaattacaattcgatctgactctaatagcaaggtgccatctaaatgggagggccaacttgcctaactccaccttgacagacggggaaggcttcaccagggagggagcacggagcagagattttgagagatgagcctgcgtttgccaggataaccacagggagaaggccactgcctgcagaaagaggagcaggcgtaggggagggtagacatgaaacagcacaccctatcccaatggttaaccagaggcaatatcgctcccgggggagatttcgaaatgtctggtaacatttttgcttgtcaccactggaggagtgctactggcagctagtgggtaaaggtcagggatgcagctaaacgtcccacagtgcacagacagccaaccacgacaaatgaattatctgacctcaaatactgccactgttgaaaaactgctgtaaccgcaaatggcatctctttgaatggcaaggttacagaaaggaatagcaaaaatgcagcgatgatccaggaacgttttctaaaagggggcggggataaaattagggaaggtttattgacaccccccaaaaaaaagagaaaaaaagagagaaaagtttagattttattgtaaatgtgagagagagccagacacaatcagctttgcttactagaaagattgctgtggctgtgggaagagaatggactgagatggcgacgctgacaaacaaagaaaattggtattttaacaatttcacttctcttttctttatcaaggggaatatcttacaaatgaaaaaatagaagactggtaagaggaaattgaaactctagattgatgtctagattgtaagagggcaagtagctgctccagtgatttcaagatttgtgatgaagataaattaaactgccatgtctgcgcctcacttcctgaatccctccctcccgctggcctgcaccgctgcccctccctcctgtctggcgtggttccttaaagccctgcatttgactccctaccttggctcccattctttatttatcccacctgactggcaacccagatttgac

SEQ ID NO: 57583 - DNA, 2460 bp, Homo sapiens
tttccatatctactgttgtaattgttttttttccagggctttatgctctactgaaactaaacacttaaatgagcaatttcactctggttttaagcccaggggaaatgacaacggttttgtctctgttttgagacttaggggcaaattttaaatcgttaatatataattaatcctatgtaacatcatagaaacaaaacatctgattcttctttcagtatattgcacacgtaaaatgcacatgaaaccaggtttggagagtgattcttagtaacgtagccttgcatttgtgcttcgacataaaattgagacattctcaagaggccttgggacatggtgacatgttgcgcagtttggccagcagagggagaccagagagtcgtgaagcacgcaacgaagccacacccagattagggttattatctgtctcttctctgaattttcaaaaaacacaaaaagaaaatgagaaattcttaaaacaaagccccttttttattgaagcaaaatccacataacataaaactagcccttctaaagtgtgcaattaagtggcatctacctcattcacagtgttatggaaccgtcacctctatctagttccaaaacataagaaatgtttaaattttctataaagggaacttgcaaaaacccaggcgtgtcctatcctccttatttcgtcacattcccagttttgtgtccaccggtattctgtcaggaatggtccccacgtgttcccccaacagccttcgtcactgtacaattcatagaatcggattcagggttacaattacaggttcgaaaaccaaaaacatcccagttctttagttcttcctctaggaattgcacagttgcaatagacaagccagtataggtgactgttttaaaaattctacacatactatgtcatttatcagcaaagaaatgaataaattgttttaatttaaatatggttacaaaacggaaatgaacaatgtactgcaccaaagcccttcagtctttgatgggaaatttaaagttattcccatccagagtgaaaattaaagttatttctaggttaggatgcgagccaagattttaagggcaccatgtcaactggttagataacaactttgaggaaagcagaacttaatgtaataaaagcagaaggtttacaatctaaatccacttttttattaaagaatttaatctgctttatggggtcttggcccagggaagggtaaaaaaaaaatgccaaactggagaggccgggggaggggaatggctgtagatgactctgggaaaacaggagggagggaaactgaagcgcgaatgaggccggatccgccctaacaaagaggcagaaactgtgtctcaacagccaccaaatccagttcagggcggtttgagccagtttctgagctggattgagaacaacagcctcggcagagacttcactagggtgaaagagaaaatccagcatggacttcgcagaaagaactggatttggcctggactcgctggagcctaaagctgctgccagtagtggcaaagtcagatgaaatataaggcctggagcgtggacagtggcctcttccagaaagagaaatcacacagcactgtctctgtgccataatccagtccgcattttctgtcttgctgctcctaattgtggctggtaagggaaaaagggcctcagggtatcagttttcagagaaagctgtctgcaatgttgggggaggggaggattatgtgtctcctgtagtttcatgtgtgtgcctggtggtgggggggggaatgtgcgagagggtctgaaggagagggaacagcacttcacaccctgcagttcacaccacctttccaacagctttgctgtattgcacaacctcaaaatacactgaacataggcgttgtgggagcgccccacatacaagtggcacttgtacaagtcattatcggacctccttcagccctatgcatgaaatggcagtacccatacccaatactgtcaacattctcttttcatctgcgtccagaaatacatacaagccgtacatgcctttctcaactaagagacacagcagtattaggtaacaatggaatgataatcctgtcctccgctcccctcccccaagtgccagaacctcctaagatctgatcagtcccaccctgaaatggctcctctaacactgtctagtagactgaactgtggtctgcagctgtggaggctgtgcactgcctgtggccaagtttggctcagaaccttcccgaaccagtacagcccttccccaccaaaaattcctaggagttgtacacaaagtccaggtcggcctggtgggacactgtgtgtgtgtgtaaattccctctcccctaagtgtccaaagatgtttagaatcttccagaggcactaaatgcctccagacccagggcttctctgactgaagtcagccctggtgcgagctggggggcagggcatggagcttacga

SEQ ID NO: 57584 - DNA, 2734 bp, Homo sapiens
ccaagcaactgaaagaaagtatgtttttttcattccttcattattaatacaattcaaagtacattctgtgaatttaaaacataaatgatgaataaatcaacatactcctggcttttatgaaaatctttccctctgctctttaaactctcacctacctccttccttctttcttttctaagcctcatagagggcgctcacaaagtgctacttattgattgaggaagatccactcaaaaaacacacctcacactgcaactgagagacgcagcgccaccacctcgggcttccttctcttttccacgcaggaggcggggccaatgtccctcattcaaataaaaaaccagaatttgcatggggaatggctagtccttgagcttattggctgatagcacagtgggcggggtacatagcacgaccccccggagccccgcccatattaatttgcataacggccccggcgcgtgcaagggagaagcgggtttgtttttgaatctgcggaggcggcggcggtggcagcggcggcgcggcgactgaagcgcgcgaaaagctgaggcggcaacgtcggggacggctgcgcgggacggctctgtaggaaggaacttggttccccctccctcagcttccgccccaaaaggtatatgtgaatcccaggggctgttaaaaccacattttcttaaattactattgtatttctgaagagtcaagaccgcattatggcggctgcgggagttgtgtctgcgcctgcgcggttgcggagctgcgggcggcgctgcatgggagcacgtgatcttgcggggtcgggctctagctgcagttgtgcagctggcggggcggtggctgcgcaagcgcaatattcattttcaagatctaatgttcttgttggacgccatttgggttctagatttaattttcctcgttcttgaggggtttctttgtgttaaccttaaattctcacaattttcaagaaaaacattactctaatgttgtactcctgggccgacctcaagctcttctctgttttttcgattttttgaaaaattgtggacttaattttctgtaaaaatgattttcatttgtggttcttgattataatttcagttttaaagtattactggattcaggtttatatttacggtggtaaagatcagcacctagtggtgttctcacgggaagtgcatttatttgaactgcatatttgcaaatacatttttaaccctatttttacctgttctgttatggatgtgtggaatgtttacaaaacagaaacaattttagttttgggaatattgggggaacgggaatagtggaagaaattacagtataatcgaaaatgaaatctcaatctgaggattattttggttttaaatgtttgatcctaagtaaataaagttttaattttaatcagtttgtatgtttctgggcatttgaattttacatgttttaagtttcttaggtgacttgttcattactgcttcagctagattattgttacttttgaaattaatcaactcattttcttagcatttttgtttgctatgatatgtaagctataacatttatttggtaaatttttctgatgaagaattctagaaagaacatccattaccctgaggcctctttgaagaaagtggaccattaataaaaaaaatctgtttttttcttttaaacactgtactgtatgcatgtgtgtaagatacagttgtgtttgattttttaattgtaagtgtgctcctggttttattaatagttttttagggaaggtaattataaatatgctactgattagtttaaaatggtagtgtcaactatagttaaatcttatgtaacacaattgggggaagttatataagatttgatatgattctcccgttgtgcaaattctttcttactaagcaaagaaacttgcaaatgttttccatagacttcatttgtggttcatatatacaacaactggtttcttggttggttataactctttaagtttgaatcagtctactgtcaaatgaagacgtgcctcttgctttataatctcggttaatttagggaaatttttattgcctaaaacaaataccattagtaaatattacctagatgtaattgaaagtaatacttttggttggtggatttttaaatgacgtcacatatgagatagaatggaggtaggaaagattcttctttttttctcaagagaatatttgacctgatgtaattcttggatctctgaggtcttctacacagaagtatatttagagagcagttgtgtaattttctcccttttatgtttctggagtggttacctagcagcccctttctaccacatgctatttcaggcattttcgagttgaacatacacataaatatttcggttaacaaaagaactttgatctttgatcttagggcatggtacactttacatttccagaaaaatgaaatagtttggtgtatataagcgtatgttttcatttgaatatacagatgattgctttttaggttaatattgaaggtagtaagaggtatttgaaaatgctcttgaatatgaagaacatatttattgatgggacgattttgctgtcatgtttcttacaaggcagatataatcatgtaaacttaataagattaattaattgcctgaacaccaactatttgtttattagtactttgtcaataacaagtatattttaaaattttagtttggtggttatgatgccacaaaattttgacacatatccaacat

SEQ ID NO: 57585 - DNA, 1900 bp, Homo sapiens
ctccttttagctatatccctattactcccctatacccttaaaactttttagtaaatacctatatttagtgatagatagaacaagatacacaggttagctagattttaggaaggtagactgaggaagagagaaagaaaatgtggattctattgctgatgtgaacaggttctctctgtgcttttgtccttcccttctctttgattgatatgtttctgccaacccacatttgttggagctctttcaaatttgtcttgctaatatatctattagactgagttttactcttttttaaaattcccttctttccatcagggtgcctataattctttgtttttatttgcttttcactcacatcaaaaagttgggaggtctttgtcagggcatgaaatgtaatttgccctgggactaaacactcacctggggatgttaatgtttgtgaccatctgtactactgaagagaagaaattatttttatatctatggtaaattactcaataagctttttgccatcttctagagattctgttatcaaggttcaaaaatttaattgtaggctttaactgttctgctagatttgagcactttggggcttttagattctgtggagaaaatctttagccttctataaattgaaattaacttaatcaatcaagtcattttcaggatttaaacaattttctagaaattataaaattgaaattcttttcatgataaaactataaaaggtaaaaaaaaaaaaaaggccttgagcaaggtttaactttttttttttttttctggactgaaatggaggctttctttcaagcgaattccctgatgtttgctctgtgtgatttggctccatctctgtaactgctaatatgtggcatggatttcaagttgtttgggatctggatgtgcccaaagtctgtattgcaagacgggattcacaggcattatgttacaaaactggcttgctgccttctgttttctttttctgtgtcctgtgtagctgcattgtttgttgcagtatatgcattagctgttgtctatgttcagtttcctgcaggctgacaaagtgggaggggctttgtttgttacatagctgagttttcactgtgtgagttcttgagtgcacattgcagccatcttaattacacttttgtgcaactgagactgtgcagctgtctcaaaatggctgctaacctagtctttgtagctgcttaggcagcaagtatgtcagtgaggagacttgtcacatgcatcaggaccagaggtaagaaccaattactcttttatcttaaacattctcatttttttcttttttaaaaaggaatttaactgagtttacttagaggggtgaacttagagcttggtttttaaaaagttgaaatgtttggtagaacctttaagcctttattatggaaacagtacatagcatggtggggtcaaaggttaaattcctgtaatttctcaccattttatgttctgtcattgccagaacatttgatcaccatagtagtgcatttctggccctaattaatgtaatattccttttgtgtaggctattttagtgtgtttggtatttatttgtagaaattaaaacaatatattatctgaatagattttttttttaaaggatccataagtaagccttgttttgcacaaagactacaatttttctacggttttgtgaggtattgtgtggaagctttttggaaagaagggtaattatataaatcatgaaaaaaaatttttaatactgtccaaaatctttttttttggcattatgggttgcagttctttctcatcatgctgcctcctcccagtatccaactctttgacatttttaatgctgctttgcttctttgttcaaattactttttgcttaagttggcattcagattcagattttgaattt

SEQ ID NO: 57586 - DNA, 849 bp, Homo sapiens
tctaccttttaatcaaggagtttatttacatttaaagtagttactaataaggaaaaacttctgcaattttacttttcttctatatctgataccttttttgtttctactttctccattactgccttgttttgcaattgattttttcctggtatatcattttgattccttcttgtttctcttcctatatatatttttagttttttccttagtggttaccctggggattacacttaacatcttaactttataacagttaggtttcaattaatatctacttattttcagtagcatacaaaatcaaatatcattatgattgtgctctagagagggaaatatgtttttttggtgtagatactacccatgtggcaattgttggcaaccgttctacccacattttgctgcctgttttgcaatgtgtacatagttcagcctgattctgcccttcactctgggtatagtaacacttagccaatcgagtcctgttacaacaaatataaagcatagtgcaagatcatgagaggagtttgttgagatcagttgtgctcattttggctaaatttatgtggtgcagttggtttggaaataaaactttgaattcgttcttactgcgtatttcagaacaatttcctgttagctaatatgatattttgacttttggcttaatatgttttagtataattatccagggacaatttgttcagttgaatacatctgagacaaattgttctattggtctgataaatctttgacctagaaataaaataaatacaaataaactgcacaaggattagaaaaggagacaagatccagaagggattctttaagaacgtttttatgttaacaaccttg

SEQ ID NO: 57587 - DNA, 730 bp, Homo sapiens
ctgtggacacaggggttgatcccactgggactagcctcggaaatcttcatcccagggatggaggacccagctacctgctcccatactacaaaggtcaaacgttgccctaggaagggttaactccctcactccatgtctgcatgtgctccaggactaagtggctgtgatttcagagacgccctgaggtggaaattaagagatttctacagtgaggttgagatgaggcacctcagatcacctgcaggaagtggaaataaaaggcaagtgagaggatgtgaggtgggcctcagggtcaggaagtgcaggacacactagataagtagaaagggatacagctttaaaaactagcttcaaaacaacaatccacaaatgcagaaaaatgccggagatttgcttagatctggaatgatccctttccttcatcccgttgaaacataccgatttgtcactggcagctgaaatcagagttcttgccaaaagccctatcagctgaaagtcaactttgccccattctggttccatgctgttaggtcagtcctcatctagattactcattaattatgcatttgtgtctgcttggtcctaaaaatttgattacaagctccttgcagatgagaggtggagtctcacatttcattgtatccactcccttgggcctagcacaatgctttatggattacgtggccacctggatccccaactttcttttgttttgagacagagtttcgct

SEQ ID NO: 57588 - DNA, 1278 bp, Homo sapiens
tttaagccaaagtcaatgtaaatttttaaaacacaaaacaaatggcaagccggaaccatacctccctacaatctggataaatatatttagatgcccattggctggagtttttaagaccagcccaggctctgtgggccaagaatcggcgcaggagcgaaccgatttgttggccaagaattcgggccaaaacttgtaaagttggcagacgcactcgccatgcccttctcaagtgccctcgctgcgcagccgcagggctggagcgagaccgccggccggaggcgcgtttctctgagttcacccaggaaccagacgcccgctggacgtcaactcggccggacgcggggcacgggcgctaacaggctcctaggagcctccccgggcgccccccgcccagggcgcgctctgctcacctgcaggtttcggcggctccgcggtgactaacaacagcggcagcagcagcagcagcagcagaagcggtggcggctgtggcagccccgggcgcccgcccggaccgccgcgggtcatcgctccacggccgcgaccttcctctgcgggatcaggcggccgcggtggcccgcggtggcagaagttgcaagagaggctcctggcctactcaggggcgccgcctctccgaggtggggcgtcctcaactttcctctttcttgagcccggcctgctccgggctctgaggggcgaggacgcttcacgtggtggcctggggcccaccccgcctaggaaaggcggatcctttacgtctgaccctctagcaacccctgggccggtctgggaaagttccccagctgcacttctgggaaatgcagaggctgcctgccgctttctttcgcagttttgcggcccaaggcttgggcgaatcagttcacatcaacacccctactagcctctccctccggggtcgaccatttatctccagcagcggaccaggcgcccgggccagggtgacatgcgcgccctgcctacacgcagctcggatcctctgctgtttctggagaggcctccacaggtgcgttttcctcagcgattagcgtacccctcattcccaggctgtttaacctaaatccatgcgctgtagctcagattttttatcctttttgcttcctcttcgttggctggagccaccacaggagagtgattcagacggggctgacactagacacactcctacgtttctgtggagtccccatttctgtgtggggtcagttaaaagtgacattgtgaagtagtcaaaagttatgccttgggtgatattgtgaagttggc

SEQ ID NO: 57589 - DNA, 620 bp, Homo sapiens
cccctgctcaagatttctctaccacattccattacattagtccctcacgggcttgctttcccttctgcaatacagcaaatgaattctcaaagtgttaaatatagttaatggcttaatgtgtcactttttccttgtaccactgttgaatttcatagggattaatccaaagaaagagccctcagatgttagaataacaagcatgaaataacttttaaaagagatagtaacatatagggctatgtttttttcttggagggtagatttgagtttataccgcatagtatgaaagctaatattcttgctttttttcttagttcctctgtttgctttggacttgctcagtccaaatacctgacctcatctggcaactcccagatgatcctcagtccaagagtggagtaataatttggacagcagcagaaccaagaatgatgaccaagtcttctaatgcttatttggcgctatcataatgattatccatttctcttttaatacaaaagcaagtattcatggaaaataaaatgtatttggaggtaatcactcatttttccacttccattctctgtttactcccctccccaaatctattatctttttcctgaaattttttttgcttgttt

SEQ ID NO: 57590 - DNA, 2670 bp, Homo sapiens
gtaactcaatttttcacttgcattaaagaaaattgaacttctccgagtgtctcactgtcttagaaattaaactaacaccagtattgtgtactcacttgaagtctttatggagtaggagaaagtacttagaaatgacacgtcagcaaaaaggaacaggggagccttcctggcagaagaagaggcaaatgtcaagatctagcggtgcggaatccttcgccagctgggttccaatcttgactccagttctttaacccctggggctgggaaactcccttagagtgacttcagcccaccgcaccaaggaagctatatgacttcttcatgtttagaatagctagagcaagaccaagcgtggtggctcacgcctgaaatgccagcactttgggaggcggaggcgggtgaatcacttgaggccaggagttcaagaccagcctggccaacatggtgaaaccccgtatctaccaaaaaaaaaaaaaatacaaaaattagccaggcgtggtggcgcaggcctgtaatcccagctactccggaagctgaggcaggtgaatcgcttgaacccgggaggcggaggcgagatcgtgccactgcactccagcctcggtggcagagctagacttggtctcgaaaagaaaggaaaaaagaaaaggtagagaaggggcagattagttaacgcggcatggatcacaccgcatcctggggtgccaagcctaatgagaagttaggaaggacagagccaggagtagagcgaggctgttatacggagctttaccggaggccggggcgacccctacggcctggacgcaggctgatcaccaggtcttccgccccctaccctcgcctactggaaagtgcgcttaactggtagcaccagccccacctttctccaagaccctcactacaccccgggagtaccgggtaggaccacgcgcttggtaatcccacagctgtctctcttacattctcactgaacttattagaacctaacccgccacccgtttcccttctagacccccaggctgctctgaacagggcctttactcggaagccagggcttacctcccggctgcgatagggttatttgtgatgggcatgacactgctcggagcgggggattcccggcaacttggcgacctgcaggtgatctggcctttcatgccggcgtgacccccactgcctgcctgccaactccacgcccgccgccaggtggccgagcaggacgctacccgcttggcgtaggcaactttacgcagctggctaagagggaatcgcagggtgtcgcgagtttcgcccggccgccttaatctcagcatctgagcttggtcacctctcactcaacgtcagcgattaagtaaaatagtacccagtaagactacgcgccacactagagctgcattcagctttcgggcttgcaggtagcggcgtgctgcgacctcccatttcctgcgacttagcaagccctgcacacgcacgaaccgcccttgacgcgtgacgctcacccctgaaggccagcaggaagtcacctaagccctgatttacatggaagccatccgatacgtgcttatgggccaacgactcggccgcttagaagaccatgaccagttctaacactagggctttgtacaagcactcttctaaacaaaatccggtgtctggattttgggaggtcactactgcgttgcgcggcacctccagggtcgtacctaagcacaggcggaaccccctccttgaggtctagttctccccgtgcccgccaagtctaatcccgagcagatgctcgggccgcgaatatcccatttccggtatccggaaggcgacatcaaagggttgatatttacccgttatctaggaagtgttaacagctctttctgtgacagtttgggggccctgaaaagggccttttggagtctgtagagaagctgtggggacagctcaaccgccgaaaccataaagggtgcgaccctggcgtttcagcgcgtacaccacatccatggccgtgacggtcttgcgcttggcgtgctccgtgtaagtcaccgcgtcacggatcacgttctccaggaagactttgaggactccccgggtctcctcgtagatgagaccagaaatgcgcttgacgcccccacgtcgggcgagacggcgaatcgccggctttgtaatgccttggatattgtcccgcagcaccttccggtggcgcttggcgcctcccttacccagccccttgccacctttacctcgcccagacattctgaaatcacagcgcctactcagcagaaaatcgggctgcccactgtgattgccagtcgcagaccagggcttatagtctctcgatgcggacctgtttgaaaacatcaaaaaagtgggcggagctctaggccccacctctggagacatgctatagttgttaagtccaggaagcagtcagcgaaaccagcctgatttttttgttgtttgctcttttgggaaaattttttctgatgtttggagaaaggttcatggtgatacgttttaaagttaaaacagtatgagctaaaagaatttatattgccttttctcagcgcttaaataaaagtaggccagatcctatgcacgttccttgttctgtccctccctccttctgttttttcaaacggaattcctgacttactatgaaactctataaaaacctgaaaagct

SEQ ID NO: 57591 - DNA, 2294 bp, Homo sapiens
cggggagcaagccaaggccaagactttggcctctccaataaaacctagtggctctttgcaggcccatagcctcaaagacaaaagatattttggctaggcgagcttgttcctcccgtcagcacaggaagcattcacgtctggtcatcactctagcttcagactcaaaagtgaacgattggctggctgtgagccgcaggaccctgcggggagaccagggtggtctctacactgttgggtagctagctggaggcaaggcgcttgtataagaaacagtccacggaccctgtcctgggcaggcagaattccgcggacaggctgttgtttcgcctaagcagcacgggctgcggagacagaaacctacctgagtagtacggtgtattatatgagaacatccacttagcatagcaacgtctacggacaacccctgtagctcttcttctggattgttttctgtttccaaccatgttttcttatttcctacgagtttatgtgcttggaagcgagcgtggtcgtggaaaacccgtaaccgctaaattcatctgggtccccaaagactgagccggctggcctcgttatttatgtgagcggctatgtaaatgaggattcggagattgctctattgattggagagagctggaggaggcggtctctcttccagagcgctagttgggagcggagcctgcctgtcattggtcaccagagccaatggaaaggggctgccgcgcggccgtaaagagtttgtagaggcagttcgggtgcggtacgttgcattccggtaccggacgccgagagcggtttgtctccgtctctggagttgtaggcgagaggtgatcatgtccggtcgcgggaaacagggcggcaaagtgcgagcaaaggccaaatcccgctcctcccgcgcgggcctgcagttcccggtgggccgagtgcacagactgctgcgcaaagggaactacgcggagcgagtgggcgccggggcgccggtgtacctggcggcggtgttggagtaccttacggcggagatcctggagctggctggcaacgccgcgcgtgacaacaagaagaccaggataattccccgccacctgcagctcgccatccgcaacgacgaggagttaaacaagctgctgggcaaagtgaccatcgctcagggcggcgtcctgcccaacatccaggccgtgctgctgcccaagaagacggagagtcagaagacgaagagcaaatgaccctgacgccgccctcagggagctggctcccccagcaaaggcccttttcatggtcgtcccgcaatgcttttgaatgtgctggatgtcatggagggccggtgacatctagcggggaggtgggcggcgagggtcccggcgggagccaataaagttggtgaaaatcgtttggtcgagagagctgtgtagtcgcggggacatgtcggatggccccaggggaggggggcgaccgggaaacccctggagcaggcactggtgggtgggcttgagccactctggacggctttagtccgcaggtcaccctcgaggcgtcaggggagggtggcctggaggtgggcagggtggaagccacctcgctgtcagtagggcaaaggggaggcagagtcggtgcggtgaggcctccttcggaattatttttacttccctttcacagagccttcgctctcctgccagtttgtgagcactcaggaccaagttctgggaagataccgtcggatcgagctgagctcggggcaggaagtgtctgcggccatatttttcaaaaagtggagtaactttccgtcttggaagggtggctctgatggcacgatgtcaacttgagattcttcctagcctagtagctgctgtgctttcatgctttggatatcagatatctttatatagcacttttatgttcatattttttttttaatgaaggaaacgttcaataagtgagtcatgaggttggaaattcgttcccctgacagtcatattgcataacattgcagcgcctttagtcgtgggttacatatgcttgagcttttaaagtgatgttgtcaagtttctagcttcataatgatcctgtcttcatcatatcatattcactttgagaatcggtttgactttgctttcaaacaaaacaaaaacctcttgcttttaggggttcttacccaacaaataacctgtttgaactctcttatattctcccactagcctgaagcaatgacctcattccagtaatgtctttgggagttgcattgcctaatggcacaatattgctttaataaacatgtaaggaaagataggaccaaatat

SEQ ID NO: 57592 - DNA, 2129 bp, Homo sapiens
gactcactacttaactaaaatctttataatggatccatattcctggcctagctaccatacaccctgtcaagtggtttccttctaagaaaaactggggatgggggggttaggggggtgggagagcagcagggagtaggaggtagggaaggaggaaaacaagcaaaatcagtacatatacaagctctcccatctttgattgcctgcgttttttgtgctttcctttctcaagtttcctcaggctcatgttctgaatctcctcccccacaaatgaaacacaacggatacgaattacagagaattttacggaagacactggagcttaagtctgcagattagttttttgtctacaagcggaggcgactggaaaatcaagccaaataagcgttggataactctaaacagccaaagaagcttcaatgggatagggtccaggttcaccaaaggaggcaacaccagcaactgacgaaaccatagcgacggctgaccgaccatgactcgaggtacaagacgtcaaacctaaggctactaatcaacgtgcgtaagaagcggccccaaccgacccgggcgatgccaaccgcgcaaccactggtcgccgcgccaccccaggcccaggaatagcccagtccgcaacagggagacctcaaccagggagaggaggagcggggcaaaggggctgggtgtcccccaagccgctgcgcgggacgtggaagggacgaaagaggtgaggaagagtagtaaatcaattcaatacactcacacttctgctgtgctcccaggactacgagaagcgggtagggggcgactcccggcctctttcacttcgtaaaggccttcaactgggtctctcggtcaacccctcagctaccgccatcttgaaacctcgcgcccctccgcactcctcacgtcatttcccattcctctgtcccgccttctcttagcgccgcttgaccctggaaccatagagaatacccaagaattccaggaccagagtctcttccggttccatacaatactcaattggttggttgtcggctaagagcccgcctcattgcgctcatctagtacaataggaattagaagaagatagctgctaactgagtggctgacggtcctgtctctcgagttggaggcatcttgacttagttgctgggagcctggtacgttgagccgtccgagaacggtacattctgcagataaagaagcgttctgcgttttctgtcttttggaattaccttagtttttgcatttttctgtttcttatgacccaagcaggtgcgatcctttaggggtgtctccgtgtgtaaacgaatacccagataacatttgccactgagtttaatccgctttgtaagcatcaggttatcccatgtgagcgcctagtacgtgtggaaatttaatagacaggcagaacagaacgtttgtagaccacctgaacaaataaattagcacccgtattagagtcgcagattgcttatatgggcggtgatttattatttgttagtagtgttttgaagaagaaatacggggatacatatgcagtcggttttaagttatatgagtggcaaggttgatatatattggctatattcccgactggtcttttcaccagccaaaagtcctctatgatgtcactctacgtacgggattcttcacttaactctagccttcgccctttccctaccttctatcccctctttccgtgagtcagcccccacttatttcccttaaaggtaagtttaaacatttaaaaaactatcttagaggatacgcttggttatttctaatcttaacctgactatcccatgtaggaaggctattcttaccaccagttataaatatttcaaaatattgatggagatacatactaatttttagcagaatctttaaactgcccttgaaggtataagatcggtcctatacctaaacttacctttgtgttaggaaattcttgatttgattttagactgaatttgagtgtcagaaagcaatgacgagatattgtaggttaaagctgataaaccaggtagtacataaaaaagaaaataatcttgaactgcgaaggtgagctaagttgtaatgttttgcaactagttttttttctttcctaacacattagtgatcatagtttt

SEQ ID NO: 57593 - DNA, 11090 bp, Homo sapiens
actaacggtagtttctcagctatatttgttgaagaatggatgaatcccctgaaaccagtctatggagaatattgtcctggaattcttattagaaaacatggggaaggatcctatttttgtcatttgtaaactatgaataattttacgcaaatcccttaagctctctgaatctcagcattcacatcagtacagcggagtcaataacctgacttacagggtgattgtgaaaactaaacagataatgggtgtccaagcgttttgtaaactaaactgccaaacaaatatcattttatcagtgtattataacctgattttggtcatctctgccttagggtataaagtctggaagaaatacataatgattataacttttatttcatgaagtctgaatctgaattttatcagactgttcagaagtaaatagtccttaaacagaaaaaggtaaagctgacgtgcagtataccaagtctagtgtttgaggcaaatgctatctatagcctctttctgtcaaaatgcaaggagcaagagtgttaatattgtagaatattacctagcaaaaacttagcacccgaaaatgaaaagcgttattccttctgcctcttcctttgtttctcttcttactatcaatttcactgaagcacatgcttgtgccattaaaccattatcccacttccatgtgcaaagtactttcccagagtttctcagttgtgtttgaaaggaggcagagacaccaatgctatcacaacattcccacaagatgagtatcacttccattttataaatgaagaaacaggctcagaggttaagtcatttgcacaaggtcacctagctactaacatatacccaaatctttctggctccaaagtttattcactttccaccatgccgtgtggtctcccagatttattcaatgactcattctttcatccatttatctgagacagacactctacttcaaggtcattgtgatgccacaaatagggtaaactaattttagataattgaagcccagagtaaaagaaaacaggcaaaatagaaagctaataaaataaataataataatgataatagtatcttaaaagttttgagtacttaacatttgtcagatactattctaagagattttacatgcattcattcattttctccccactagaatcgtacaggtttttaaaaagtgaagtttacatgtaaaaccaggctgactacaaacaattgcctatatttctctagaaacatgttaagaattttgattatgtgaaacattttaacaaataaatccctgttctttgtgaatccaatgatatagaacagagcatgtatttgtgtgtctacagatttttggcataggttattttgctgaaagaagcaagatttaagggcaaataactaacattctgttaacatattttgagtcttccaatgggcatgaagacacctgtttctatggcaaccagtacaggtcatgtgaggggtgatggaataattagagaggaaagctgttagtttagaatgacaatttttccttttgcaaatttacttccttaaatagtataattctattaatttgatctcttgtctctctaaaagcaacagattcctggaaactctttaaacttgagttacatgctaacaggactgattttagcataaattgaaggactggagaagctatgctcttaaatatactgtctcttctttgggagaattacagtatgctgctgggtaattttaaaggtcttcaagtggtctttccagtatcacgtctgtcagattgagagggaacaggagagaaaacataattcacttggcttatagggacttctggggacacagaatagcttgtggctcctgctcatgaaacaaaacgaagctgaaagaatgagaaatagtgtccagagaagattacagtttcgtgaggagttagatatcagtgttccagaacaccatctgtgaattccctaggctggggttagtggagcagtgaagtgggaaatggtagctatctagaaagttgggtctggggagagtccactgatcttacttcctccctgttaaggatcccagataagaaagacacactacctccttcctcttattgttcatgtatggctcagtccaatactgctccagaatgttggggtaagtactacttatcagttaaaataaatcactttaaggacctttctgatgttccttcgcttactgattgagagaaaaacaaagaaacaaagaaacaaacaaacaacactgtagcgaataactgaaaacattctgaaggcaatcaaactttttttttttttttgacggagtctcattctgttgcccaggctggagtgcagtggcgcgatcttggctcactgccacctctgcctcctgggttcaagtgattctactgcctcagcctcctgagtagctgggattacaggctcgtgccaccactcctggctaatttttgtatttttagtagagacggctttcaccatgttggtcaggctggtctcgatctcctgaccttgtgatccacctgcctcgacctcccaaagtgctgagattataggtgtgagccactgcacctggctggcaatcaaacattttttaaatcataagagatagatattgtgtcctgtccaagactgtattcagtagtgtccctttatccttagtggatacattccaagacattcagtggattcctgaaactacaggtagtagtgaaccctatgttattttcatatgtgtatgtatgtatatacatatatatatatatcatcaatgataaagtttgaagtgtggcagcaaaactagcatgaatttctttttccttcttcacaattccacaggtagaagattcatttttacagtagatcttagcaacctcagcatacaattttttctttctttctattaagttgagaactttaaacttttcattcaaaggaggcgctttctcttgggcatatctgaatctccaagatcactattctttcactttggggccattatgaaataaaatgagggtcacttgaaaacaaacactgcagtaccgagacagcagatctgataaccgagagggctactaagtgactcacagtgtagactgtggatgattcacatcccaagagggaaggcacaagatttcatcacaccactcagaatggcataccatttaaaacttaggaattctttatctctggaattgtccatttaatatattctgcgggtaactgaaaccagagaaagcaaaaccataggtaagggggcattactgcaattttttgccctcaactaaatgactgtgatgctaactagccaatggcagatgaggcttaggtaggtcaggtagaaccagaggatggaccagccttctctgcaacccttagtcagagtctgggatcaaaggaagaaaggcatccctgcaatgtgagcttattcctctccttcttttaccttcccagatagtttcgtagctgtggagggtgagaaaatgctccaattccagctcttggctgattatatgatgcctctgacctatctcttccctcttcacttcaatttataaagaaaatattaagttgagaactttaaacttttcattcaaaggaggcactttctcttgggcatatctgaatcaccaagatcactattcttgcactttggggccattatgaaataaaatgagggtcacttgaaaacaaacactgcaataccgagacagcagatctgatcactgagagggctactaagtgactcacagtgtagactgtggatcccccaaacaacgggatgattcacatcatgaccagtggtatttttattctgccgtttacaagcttttctgcatggccacacaagcttctaattgataaatttctgggaaaaatttagttacggtaactcacattgcaagtgaccatgttgatcatttacattgtgacaacagcttacttttgactaggggttgaagcttctagaatatcttcccttcttcaaatattggaactgtttttaattaattgtgttagatggtcatgtagtctaaggctcagattgcttagaggtatattcaccatcattcattcactcattcaacaaaataggctgggcacttctatgtgccagaggactgaagttagtaatagctaacactaatttaccattattatatgctatagaatatataaataattttatttatttatttttcttttaagatggagtctcactctatcgcccaggctggagtgcagtggcatgatttcagcttactgaaacctccgcctcctggattcaagcgattctcctacctcagcctcctcagtagctgggactgcatgtatgtgccatgatacctggctactttttgtatctttttgtagagacgaggtttcaccatgttggccaggctggtctcaaactcctggcctcaattgatccacccacctcggcctcccaaaatgctgggattacgggtgtgagccaccgcacttggccaataattttacattttatttcattttcacaaaagtcttctgaggttctgttacgataattattaggtagatgaaaaaagagtttaagcaacttgaccaagaacacatagctattaagtggtacagtgggatataaattcaaacagagtgggtctgggctcaaactgcctgcctgcctagttctcaaatactagttcctcaaatactagtcgagttcctgcccccagggagcttatagagcgacacaagattattgattcccttaagtgtgattggtgattccaaatatttcattaagaccaaccgaactgtcagaatttagtgatctatgtggctaccccagctaaaccttaactcaaaactaagttaaagttgcatttgggtagtttcgccataggaaagcaaagatcattaatttgggtgggggtgtcctgaaatatttttctttgaggtttatagagtggcagaatgtgagtaatggtttatattatatactcctttccctcagtttcccactcaatgcttaatataaatcttctgtaatttttcattgaatatattttactgtgcttactatcctagtgaagaattatatgttccaaattcatgatgagaatgaagtaatcatatcctagtcaggtgtagttccaaagaatcctggaacctggctatgaatgttttcatttattatcaaaatctcactgttttcttcatattctactatagtttttcatcctctacaaacactaatctcctgtgtctgtggggcagatactcatttcactcgttttgctgccatgtttccaaggtgacatgtgaggagatgaaagtattgataggtctcctctccctggtctgtatttatggctaggacagagtgagcagattctagacctcagtgtggatgccagtttgaacacttttgcaacactactgccctgaaatgttgagaaatgctgagagcctgaattataaatcatagcaataatgataaagcgaagacaaatttggggatatattgaaggtagaccctgcaactgggttccagctgactgtgagtgtgaataaatttacatatgaacagtctttttttttttttttctgaatcaaaaagggcacaggatttgctacacaactacccctccatgaaatggctaggtggcaacataaaattcaatcagccatgtttttcttaaaaaaagtttaacttttttttgtattttgatatctctaaattttcctgcttcagttcatttttcacagtgtcatcagagccctttctaagatgttgaccaaattgatttctactccttaaaaacttctaattacttcttattacctacagcataaaattaaaaggtccttagcatgaaatacaagaccttttataatgaagccccatcagaattctcctacctggataaatcccctcctcccttcctactcctattcttttcccatatcctacacatcctacacaccagccatccagaatttcagagtccctgaagacaccaggctgtttgaaatccttgtgattaacatatgctgtgtcttagtctgttttctgttgcaataacagagtatcacagactgcgtaatctgtaaagaaaataaatttatttctcacaattctggaggatgggaagtccaagagcatggctccagcatctggtgagggcctttatgctataccatagcatggtggaagagaagttggtacacaagacagagagaggctccagtgatcagattctctttacaatgacacactctcacaataactaacctgctcacatgacaacaacattaatccatttatccaatcatctcttattaggaaaggtccaatcaactcttattagagcccatttcataccactgttgcattggagattaagcttccaacacaggaacttattggaagacacattcaaaccacagcaaggtattctttgcttaaaatgacttttctttcattgaaaacccccattctcacgacaagttccatatggctattatgaagccttcctcacttttcctggagagaatgagtagctccctgcactgagcagccacagctgtttgcttaaatatttggtatatcacttagtacttttgagtgtatacatttgttcatatttccatttctcgttagactaaaaatcctcctaggttataattttgctttattcattctgtatttccagggcccccatcacaatagaagatgattaatgaacagaaaattaatgaataaatatcttgcctcttgctttacttttagaactccttatccatgtaatgacaatgagaaaagcaatgagtttgagggagaaggtaaaagtgctatctttatgctccaccttccagtcaagctttactctgtctgtctgcaattttttacataataatttcactgcagaacttattgtcctggaggtaatggagtaggaagaaaagagaagtcaataaataaagtggattttctctaatctatcagttccatcattaccgaaggctagttttcatgtttttgatctttccccaaaaacccactgagaaaaaataacttttataaaagagcagtggtctgtgatcctgagtggcctcaatttagataaagaataccttttagcagctgacagttatatgtgctcaggttcccagttgacctcaactgcaaccagtctcctcttgggtggtagctcatatttataactttaaacagctcatagggagggatcaagacttccttcttgagggagaagtactgtacaggtgcacccaggcaggtgaatatggtaaatagtgtctggttcccaaactcctgtgcctcttctttcaggagggatgtggagaggaattggccaaatcgaatggtggcccctgtgtaggcattaaagtggacatccttcgtcctataatgcacctcatagcacagagtgccattctccatgatgctgtctttcctcagcagctggattgctgaggtgaggtagtagtgtaaatatttgaagtggaatgaacgttcatactgctgtggagtcctggcaacagaggccatggctctagtaaagtcagaatgaacattgctgttcaatgtataaaacaaaatagccacagcgtgtgtggtagtcatgttctggggtagaacttttccttggttaagccaggctaagtgggctttttgccacatcctaaaataattcttctgggcttctatgtcttttgtgaaataatccccttgagttagtttctccataacctgtttgctacagccttggtactgatcatcaaaagaacctggtgcgaagtcgaagtcgattttaattgcaacctgtaaaaaaagaaaaatcttgagtttaatttttcaaatcagatggtgaatgtggttgcagatttgctgtactctataagggtaagtcttctcctggaaaccaatatttactgaagtaagttacactgaaaatcattacactgttccaatccttactgcatcaatgacctgtgctagagattgaatttggtttgataaataaattactgaaagcttgaaaaactcatctccccagagaggaagtaactcttttaatatcactaaaatcacagcatgtttgcatagtaagtactttgaagaaaaaattcaaaatcttgtagtttaattacactttctgtttcctctactttcccccctctttctagtctctcactggtgttttcaaaaatatcacttttatgaatgcccaaaaccaaattaaatccttgaactttatccttaagctatgaatagtactaagggggctctcataagtaacaaccttcttgtctacctgggttctgaaaacattgataataaaaatagcaaaatatgaaagccaaaatatctgttttcttactgaaaaagggcacgctacagcagtcacattgttaggtctgatagcaagtggcttgttaagagcaaattccagaatgggaccgactcgtttgcaggcagtactgaactggggcctgcccaggtaagattcttgtcatggggaaacagagaactgatgccctttgccatcaggctaactcccaggaggatgaagagcagagccaaactcagcacacccagttgttttttcccatgttaccagtcaagtacatttgtccccctcagggacagcagagtgagtcaagggttggacagtggtcaggaatgtgcctaggaaagtccctcccctcctggaaaaggacattcctttctaatgggtagccaacagaatgttgtttattcacgtctagtgcatgctaaactgaaatgacagatttgaatagaagtccacaaaatatcatcagactatcatttagagccatatataaattatataaattctaaaacattcctttcttggcaaagaaatgatgttttcgtaataaacagtactcattgagggacatgttaaaggatcacattccatccagtcaatgttaaggatgttggaactggaacttaaagaacatcccatttggtatttttactatgttatttatgatgagacgtcagctagttgtttgtgaactagaacacatttttaagactgattaaatgattttaaccaataactcttcacatcaggtattaaaataggtctacggtatctatttaagccaagccgagccaaaccaaaccaataatacaatgttctgtcaactgtcatgatgaactctgaaactttgttaatatgttactagatctcaaatatgtactctgtcatctcttaacattaggttgttttttgttacacagatctttattaaaatattcacttaaaacttaagtcaatctgtatgctagagtttaaagccaaatagacttggtttattttgcattgtttgtactatggaagcaatattttacttaatttttacagtggatcaggaaaataactttatgccactagcatccataatgtcaagtgtactaacagtgaaggattctacaatttttcataactgttttcaacactctttactaacatgatttgttaaaatgtctgaatgaaactagattctgaatgcctaagttttcggccatttaaaggctgtggccgggtgaatgctctgttggagcactgatcataaagagatcaccccctcaattgtccccctacctcagaaccctctgtgggtctctgcaggccagagaggagcagcaggaatggcagcaggcctccaaggagccagattctcatcgttgcaggaggtacagtagttgggagaagaatcttcttgcatctgttgatcaatggacccatttgcttgtgtcacaagtacttctcctttgcccttgcagcttcatcctgagatgaattctcagagttctcctttgaggttttctttcagtctcatccgtaaccgttttttcccctgtctatgctgagcaacttctgttgcccaccaacaaccaatagcttgtctgagggaagaaatcaactccgacttctttgcaaaactgaaatctctgtgaaatagccagatgcgcacaccaaataagggtttctaaagagaacccaagttacttttcaattaaaaaaataaaatctctgatctagtctgtattcaggggaatgccgaagtcctgttaagtgtcagactcagcagttcagccttccctttcccagccaaacaggaaaaagcatgctctgtccagcgtttggggccaagtagcattatctggagccccaggcttccatcaaaactgataagattggcatgcgcagggcggctgggaacgcgccaccctgggtgtctataggctcatctggccctgctgataggccctgcccaggacgggcgttcacagagcaaagtgtgttttagagttattgtcaaaaagaaggctctttgtactgcttttccctggcacctttgaaactctccaatccagagattgtacctctgggttcaaagctcttcccccattttctcttctgaagacaggccctctgtccgcacagttccagtctccagtgaatcctaatgacgactgtcaggagactgcttatgtagagctgacataagttaaaatagggtccactgtgcaaacttaatccagcacagttctattaagcactctcttttaggtaggtactaccctttctagtctaaacatccttcttctcctcccaacccttgatataattatattttcttgcaaatattttgtatttatacttctggattcattatttaagaaactaaaagttagcaatccttgataattgtttttcttgcaaatatttacttctggattcaatttttaacttttaaggtaaactaagtgctgttcttaagtattctagaattttttggcaccctgaatttttttaatctaaattttctgatgatcacagcagttctgtctcattaacaaatattcagaatatttagaaagcacaaaggagaaaaaaatgacacataacccgtcacttggagacagccactaattaggtctggattttgatttatacacccttagacatacacacacacaggtttctagaactgaaataatatagtatgcagttttgcatactgtttattccccttaat

SEQ ID NO: 57594 - DNA, 2654 bp, Homo sapiens
aatcatgtgtctgtgtattttaaaatatgtgtgtatatatacataggtacattatgttcgttgtttgttttcactttcaagaaataagaacaatctaattaagttggcaagtgacaataacctggtcacttagggagctttttgtgaccaatgttctatgatttttcccccctagggaaagggttttagaaagtgtttggtgcccctgggaaataagggaaagtgtgaatagttagtgttatttcagtctaattttttttaatgcctcaagtatctaggaaatcttttgaagtaatcaaaaaaggggaaaaggggagggagggagggagggaggagtagggggtgctagagagagtaagagagaatactattgattgttacatttaagtatacattatgtgcatttcattagctaccttttaaaaaatcactacaacaaactgtcaaacagcatatgagtgcatctcaaaagaataaaaaataaaatgtatcaccacactaaaagatttggtttctcatctgctgacttagtcagtatatcaatcatcaccagtccacagcatagttttcttccaggaaggacaaaaaaacctccacctaacatgttcctgggcttttgctttccatttccaatgttctaacacacaacagcaaaccagaataactttacacctttctaaagtaacactctgattacaaaagattaaattcgaataaaaggactaccatttcaaaggaaatgggagaaatacaaagcaactaaagtttggcatcttaaaagcgataaaaggagaaccttttgggatcctgcgataaaacagcctgaatagcttctatgacacaaggcttcacagttattttgaataggcaacacacagacttccacaaaagggcttcactcttgccacttgctacgttgtaaaaacaggcatgttggcttttttcccctgttcatagctgctacttgatagatttctatgagtatttacttcctagttcctttcattttatttttaccagaagtttaggcagtaagcagagaatgtgggtagatgagtaggcatattttgagagaaatttggctatcaataaacacacactgaaatatgtgctactgtctggttctaaaagaacattaagccccaacattcattcagagaaaaactgttctgcaataaagttatcaagaaatatttgttttataaaaagaaatatatttatttaatgccaaactgtatttttgagatattttaaaaaggaacttacataagttgcaaatatattgtaagatttttaatattctaaggaaacaagtatgtgtgttaattttgggagagatgtttatattttatacaccaatgccacccttttacttatgaaaaacagacttcaacatgatgagtcacaattatcaggagagttctctatctttaaaagtatgcaaactatgcctctttcccactaggttattcttggtttctcagcgtgaacaaagaacagactgtcctaacccacacactgctccaaatggggactggaggccgatgaactttgatcctagctaggcctggataaagagtcccaccgtgtcaaagatgactgtgctgacgtctctacggagggaaatgctataaacttgtgggaagaataaagaagagaacagtcatttctaagaggaagttttctccttagggaactcaataaaaatatttatagaaatttctcatcttaaaactatgtctttagtgtatttgaaaaagaaaactctttttaaaaactccacataattttaaaaacttagtagcatattctattttattatggttctacacactcacgcacacagttgtttttgctgtacagaaagagctaatcacttttccaaaacttcatttttcctttagtttcctggcaagatagatatgacagtcatttaaattggacataccgtgggagaaaaattaatgagtaaaagtaggcttatgcttattgcatttaaccagaatttttagaattgttaaatagtaatagttttagtgtcttttttattttttattttatcaagaatgtccacaactgaacagatgtggcaataacttactgacgtgagaaaaacagtaggatgaaaatgggagtgaaagattcagccatttagttttgaacataaatagaaagcatccaatctcagctataaagttaatagttccatactggtatctggatgtcagagatgagttttaatacgatgactaatttgggaatcattcttttcccaacaatataaatagtattgaaagaaatggaaatagaatgaactacagtaaaagtatgtttatgtggaaaacgaaggcagaaccctaagagaggcccacattgagggaaagatagatatccatctctctctctctgtctctctatctctctctcactcacacacacacacacacacacatacacacacacacttcatatacttttgtcatattggggaaatatgaaatatcttcatagctctggttttccaagagtttttacacatcaagtataggtaaagccaagtaactttataatacgtttaaaacaccaaatttggagattaaattgacatgccatatactacaaggttaaacaaaatttatcttaaaactaccttc

SEQ ID NO: 57595 - DNA, 1895 bp, Homo sapiens
tgtttgtcactaactcaagtttgatatttaaaacatcataattataaaattgaatattttgaaagagttgtttcttaaaagcttccattaattgactatttaaacatttacaagttccattaatatacatgggctttaaaaaaaaaaactttaaatacacatattcaactgtattttaggtcccaagcaaaatgtttacacagaaatttggcagtgttaaatctgtggactcaaagccaagaacaacctaagaagtctaaacctggttaataagcaaattttcatagtacaactaacattgtgtaaacaatccaaagcagttaatatttataagataatcaatgttttgcatataaggttaagttcaaagtaattttttaaacatttcgtatattatgcccatggattcccaatctgtaatagtcaacagacctcttcttagctataatatgaggggaaaattattctcttaaataccatgacctaaaggaaagaaatcctttgaatctccacctctgtaagccagaagacaggaggcaagaccctgaggagactgggttaccactaatttcaccaagttcagaatccacttggaatactaaatgggaagttaaaaagcaatcaaagggcttacttggactaaaagtattgctacatgtttcaaggtctacaaataccctttataataattacgcctttgagagccctccttagcaaagaaaatattaacaaattcaaacttacctacccacacagttcaggaaatactcctctaagcaatcgtccaggcaatattgagaggccattccactcagtttacttatgtgccaagtgacctttggcacaacgtcagaaagggtgggactctaagcgtcagtttcggcattgtactgtaccaaacaaaatttctgatttggtttctctagggcgttaactaagatttcctcctcttgttaagtaagtaaacacagctaccactacacttccaactcttgcctaagatgattttttttttaagttttaaatggtgaaaataatactggctagcattgactgaaagcttactgtgtggtctaaattaacgctatatacacagacaccattattactcccattttagagaggtagaatctgagaaacggtagttaataagtaacttacgggaattccaggtacagaaatatggccaactgagctcatgaagacttcccactacagacactaagaaaagaagaaaataagtgtaacaaaattaaatacatagctttacttgcaataaagataattccctgatgctaaaccaaagccagaactgatggccaaaatagtaagcacaaaagcatacactgtcagctgtggccaacactggagctatggggataatcactggagtctcttcagcacttaagtatagattgaaattggtaacaagatgcctcttgaaggagaaagaacagaagaaagtgctccctcaagagagaaagcactctgctggatttccagccccattaaaccttcacaactctaaagcagtcctgatacttatgcagggacagaaggggaggccctgggcacacgaggtataaagttggtactgagattcttccagaaaaccagggctgtcttcaaaggtctatcctcatagttaaaaaatggtgtcggggaggagaaattcactcatagtcatattaagacttaagagagcttgtctctgagaatctgggtgaagaggacaggggaaatgctataaatgctataagaaattaaaatcctaaacctatgacacaacagttttgaaatgtgaatcttatttgtatgagaatctcctaggtaaaaaaattaagaatctccaatctaaggaattagatcctgggccagtgaaatctgtaaagtat

SEQ ID NO: 57596 - DNA, 427 bp, Homo sapiens
caactggtaaatgttccttaaaactatttttctttaaatagtcaattattttttggagaagtcaaataaatgacctactgtttactaagaaacaacatttcttaaagatgaaaaagaatatgatttgcaataaagagaacacaaaagtacttgccagattactcatagtttggaggttacagtggccacaggagaataaaactcttgagctagcgctgaagattaaaggacatgttgttaatcattgttaaggctttgaatacagccacctcggtcattatgcaaggaacagaataagtaagctatgtgaggaaaatataacgttttcttgtagactaagacacagaaatagcagctgcaacattagacaaaaatgaccacctaggtagtcatgactaccacactagaattgaacgatacctaaata

SEQ ID NO: 57597 - DNA, 1052 bp, Homo sapiens
cacagtttctttgcatcaagaattctgacagatctcagctggaacagctatctgctcctcatgcctactcaactggaaaactcaaaagccagcggttggaatcatctgaaggcctattcactgtcagcttgagaccttagctggagttgtgtaacatcttcacaccgcctaggcttcctcacagtgtgatgactaagtccccagtgccagcataccaggaaagagtgagccagtcttaagtcacatagcatgacttctaccttacttcattggtcacctgtcagtcacatgcccttgtccacatccaaggagagcaaagaccccacctctcagctgcaggaatgtcagtcacatttttaaaaaggatgtgagataggccaagtatcttagtgtagctagttttgaaagatacaatctgccacaacctgaatctaatcatgaagaaacaagacaaatctataacgtagaacattcaacaagacaactggcctgaactccaaaaaatcaatttcacaaagacaaaaagaggtggggtacattccagatctctccaatagaactttccatggtcgtgctgttcaacagagtatccattagccacatatgaccattgagcacttgaaatgttgctggtatgtaaggaactgaattaaagtttaatcaatttcaatttcacatgtggctagtggctaccatactgtacagcactggtacagattaaagaaggcctgtcagagacaagataactaaacgcaacacattggccttgattagatcctagcttaaacaaacaaaagagctatgaaggcaattttcatatgattgcagaaatttgaaaatagactgtatagctgataatattcaatgagtgctaaattttttcagtatgaaagtgatatagtggttatgtaggagaatgtccttgttcttaggagatatataatcagtgatgaagtgccttaatgtctgcggcctactaacaaatggttggaggcagggaaatatacatacatgtatacaagggggcagggaagaacacattcaaatactgt

SEQ ID NO: 57598 - DNA, 2819 bp, Homo sapiens
cgatcccaaacaaaaaatctatactaggtgagacaggatgacattgactttaattccaatagactcactaccacatgacgtccattactagtgctcactttccagaacccaaggagctgtggaagaatggagtcctttcaatgaaaataaactagaggcaatacacaacacagttactttgaggggctttttcaatataaagaagattgcccggaatcctaactctcctatttcccaaaaatgacaaagccaaaaagtcacactcttcacacatctgaaatcaagttttacctgaactcatcctaacatattagctcttttacctattccccttactatctaaggcaagaaaccttgaaaagagaagcagtaacacatttcactgaaacatattttgtaaaggaggattctaattcctaatccttcaccgctctagatgtctgcggatttcaaatcctaaccacggcgtcctgccccccgcgagattccaacagtactacgggccctatgggaggaggaggatttgagaaacactgccggagaacggtcggtgcaaagattttgcaaacaggtagtcctaggaaggaaagtaagagtgagaacatcggagagggcagggagtacatgggtggggaaacccctttcaaatgcatgaactgaccacaaccggagaaaggccgtctgtcttcccaaaagtaaaatggtgagtaaagtggagcaagctaagaaagtcaacagccattaggcattgacaacgattccgaaacaattagctatgttaattcgagggggtaaacgggggtgggaccctgccctaaagggtcattttgaaaagaacccctccccatttgaggcgggttggcagagcagcgcacaaatcccaagtctaacgtaataagccgagatcgggatactcggtctgcagtcgccccacggaccagatgagcgcaggtgtatctgcggaagctcaggttaccatgaatatcactgggccacggcgaaccctccctgcccagcctcccggagccctgggcgcgggtctgcacgggccccacagcttgcccggacccggcgagcggacgcctccggccgcagcgccctaccgcacctggctgccaacaccagttgaaagcagtcaaagtgaagggaggcggacgcggctcctggcaccgctccgattccagcacacaaaggcggatttttaaaatcgagaaagtcaaagccgccggaccccgggaccggcgcctttcgccaaggggctcttacctcggatccgccctcggggccacggctttccccggagacgccgcgagcccagacgaggtgggaggggaccgggagaaagccccccaatctgattcgcgcccagccagtcgtccgcgagccgcggagccgccttctgcacccagctaaagagcagcgatctccgaggcgagcacagcgccggcctcgcgccgggcgagaccgcctcgctagctgctgcctgtgaagtctggagccgcccgcccgctcgcagccagtgccaaccgcgcgccgcgcatgcccagtgcccgcgcgaggaacgagcgagcgggcgggcgggcgagtgcgcgccccgcagccaggagcgaaatccgctatccgggtcttgccggcagccgagccgcagagttctggtcgactccagcgcttgaggcgaagtggccggtgaggccgggtgggcgggagagggaccggaggaaaggagacggggcgctgcgccaagttatcaaggccgcgatcaaagtcggaccaaggcagcgagtcgacagcaggtttccagaagtgccctaacaggactgactagcagccaggaggcgcaggaaggggcaaagagcgtgtggagagcttcgcccccggcgaggatggacgccccgggcggagggagcgctcgggttgcaacacccagtctggctgcacagctcgtaacccctgccctttggcggcaaacaagacgcatctaatgaccagccagccttcgtcttcctcctctgatcatcggacctattttcccccttttgtcgctctcctctttttttgtctctccaacccatgcggtaaactggtggtgcccaaggccctccatcgggtccctgagagtctcccaactgccggtccttagcgccagcctgcaagcccagacccgcctcgccaggctgcctgtgagcctatttttcatgtagctcttgccaaaagccctgatgtggtttgaagtagtggaggcttctttcactttgtgcctctcgtaccttaaccaaccctcataacctcctctctgagtagctcatggagcctctaaaagagaagtccatgttctcatagacattgtgttttctcactcttaaaactcctcattgtcatagctactcccccaatccccccatgctgtcctaacttcgaagtcagttgacttccagaagtccacgaaagcctataaattaaacttggttaaaagagattggacttgcttgctttgtgaagcaaataaaagcacagtcagggagaaacgacgtaacatgccaaggtggacattcaaaccattctaaaagttggaatcgatataacggctaagtccagtcccctattttaagtgggaatactctctccaatatttccaccagaccactatccacttgaacatttccaatgttgtaaatttctatttttatcattacatataaccatgattatttgttgaatatttacctatgccaggaactgagcaacttacacacattattcctagtccttaaaatgagatgggccttattatacctattaaacacattaggaaaatgaaa

SEQ ID NO: 57599 - DNA, 3279 bp, Homo sapiens
tcattctaaggtttttgtattgttctgaggagtttaatatattaattttaagtgtccttaagaaaaatattcacaataagattttaacagaaatgatccatatggtacttcacaacctcaattttacaggtaaacacacacacacacaaagataataaatcatagagttagtatgtgatgaagctaggatttgaattcaagcagagaacgtggttttgaccattatgctctacaatatcttaaagactctaaaagaacggaaatgtgatgtagaaattccaaaccagtagaggaagggagaaagaataagaggtaaacaaatattaacaatcaatcttcctctgtaagccacaaaaaagcaagaaaaaagaaatgtagaaggaaaggagacacatagatagaaggtaaagactgaggagaaaaacattcaagcatgtaaataatcacaatataaatggactaaactttctagttaaaagacagagtcaaggcagtttttaaagatatagctatatgttatttacaaacataagaacgtggaaagcttaagatatatcaattatataataattaaagctggtatagctatgttgacatcacacgcaatgagcttcaagataaaaaagcattattgtggctagaaaaggtcatcacataatgataaaatctacaagaggaaattgaaaaactcattatcatagtgtagctatttcaacacccattcaaccactgttaagttattgatatctctctatatctatctctatctctcaatatatatatagattacttatatagagacctatatctatcgatatatgtatatatcatatatataatacatatgtggcatatagcaattagagaatacacatactcaacaaacccataagaaatatttgtaaaaattaaccagcataccttaatacatttctgagaatttgcatcatctagaaaaggggttaaaaatctttttatgtaaaggacctgataacaaaagctaaggttttggaggtcagtggtctctattgcaactacacaactctgccactgtgtaactcaatagcagccatagacaatacataagcaaatgaccttaactatgttccaattaatgtaagacccactaaatttgaattttatgtaatctttacagacctcaaaatattatccttcttttgtgttgtttgaccatttaaaatgtaccaaccattcttagtttgccagctgtagaaaaacaggtgacaggccaagtgtggcccatagggtggtgattcactgacctctgatcttgactcatctgtttgtaaggcagtacagttagaaatcaatagccgactaatttttaaaacatttaagtttaaaatgaaattttaattaattgtactttttaatttctaaagattaatttaaatgggatttaaaaacagactccccgcccggcatgctggctcatgcctgtaatcccagaactttgggaggccacggcgggcagatcacgaggtcaagagttcaagaccagcctgaccaacatggtgaaaccccgtctctactaaaaatacaaaaaaaattacccgggtgtggtggcacatgcctgtaatcccagctactcgggggctgaggcaggagaatcacttgaacccaggaggaggaggttgcaatgagctgaaatcccaccactgcactccagcctgggtgatagagcgagactccatctaaaaaaaaaaaaaaaaaaaaaaaaaaaaaacagacttcccaataatgtatgaatagaagaagaaatcataataataaaatttataaatatgtaaaactgcaagaaagagaaataaattctagtatattctgttaacaaaatattctatagcggtgaacatgaggaagcaaccactatgttccgcagtatagattactcttagaaacttagagttgagtgaaaaaagtcatagaagattatgcatgataagatatcctttttagagagctcagaaaagcataactaaatgatttattatttaggagcagcagacatttgttaaaaatttgtttgtaaacaaaggaatgtttatcacaaaattcagaatagtagttacctctgaaaggcaggaaaggaatgaaatgaggaagctaacacagataagttgcaatagtattgtaaggtgaatcatcggtgctcatcttaattactattcttgtccctcctgggagaaaaattgtggaattgcatacggtagggaggaccttaatgcagggagacagccatggctagggaaaggctaaaagagatgagacagaatgacggaagaaggacaatggaattgttgctctaatttgtggtgaaagtgctccagtcatattctcttatttacctggactcaggtcatcagaatgtctcattccctattatctctgacctttgaatgactgatgagctctgtagatttaaaacaaaaaaaaaaactcctttctgaacaagagcacaggtattctgtttccaattttaaatgtgaaagtttgtttttatggtttttatgaaaaggttgatttcctccagcaattttaatgttctgtataactaacagaaatttaatttttgaatttgagagttattgatccatttactagtaacagctgaatgttccttaaaatgcaaaagagacatttgttttatctttttgagagaatggtgctgtttgttctgcagaactggaaatttgccatttatgagcagcacttatctcactatttacagctttttctaatcagatctaggctttttattttcctacttgtgcctaagcaaaaaaaaaaaaaaaaagaaagaaaaagaaaagcagatgagaatgaaaagggaagaaaataaaataactgtggggggggggaatcttcaaaaaactatctgtttaaaattatagtagagctttaaagtggaattctactatacaattgaaaagaatgaggtggtgacattaactactagctaggatagacagcaagatatatatttattaaggtggggggagacagcatgttgcaatacattatgtagtatgaattaacttatataaaaaagaataacaaataaatataagccaacattctaccagtattttatgggagaggggtgacagtgtaataggagtcactttcactatttcagttaatttatttctataattgaattttaagccatttttaatactacaaaaaagtattattttgtggcagagaaaatttaacttagtaatattttattattcattgtggatttttcatgtt

SEQ ID NO: 57600 - DNA, 709 bp, Homo sapiens
ttttcatcctcatgaccactaacctatttcaggctttttgcatttcttccctaggttgttacaaaggtctccttacaggtcaaaccacatccagtttcactctaagccatccctcaaactgcttccagactgactgtccccaaaatacaaagaagataatgtgacaaccatacgtaaaacatcatccttcattgtttacagagcagggtccaatctctgtcatcagatagaataaattctccatgatacgtcttcctctctattatcatctccctccaatttcctgaaagatccatcatattgtttcctgctcctatgccttcatgcatgcatacacacagaaacacacatcacatatatacatataatgtatatgtatataagtgcacacacatcacatacatacatgtaatatgtatgtatacgtatataaatgcacacacacactctttctaaatggaatgacttccctctctttattggtatacagagtgtctctgccaagatctagtgtaaacatgaccttctctttgaagttttctattactcttccacctctgctgcctgctacactattaccactccctacactgtgctgctaagtgtgcctaaatcaaacatgacttttattattgcacttacaagattgtatttctattatcttttgcatgtctgtcttctgtagaaaattataatttttttttttttt

SEQ ID NO: 57601 - DNA, 670 bp, Homo sapiens
atcttgcttgtggctccctttatggctgctagaggaggtggatctttcttttcgcttgctcactgcttttctcacaatggacactttcctagtgcccctttatcactcatgcacacaaaaaggtacacacaaaaaggtccccttaaacaaggtacagtacttgaaatgaatgagagtattttaggaaacaaaggttggattaactctccccattcataccaactgtgacttcaacacagctctttgtaaataagggtttcacaatcatgtgatttcctggcacgctcatcctgttcatggggtaaaagaatgtattgatctgattcttgacctaataatcaaatttcatcaaacttttatacaaatttgatttacagcagtctagaatagagattggtgcttgctttctaaacaatgtatttttacagaacagactgttttcactagaagttctgtcccagattttatgatctctctatatatatgcatattttttgagacaggacctccctctgtcacccagcctagagtgcagtcacacaatcactgctcactgcagcctcaacctcccaggcccaagtgatcctcctgcctcagccttccgggtagctgggaccagaggcatatgccaccatccccagctaattttttattttgtagagatagagtc

SEQ ID NO: 57602 - DNA, 996 bp, Homo sapiens
cctccttcctgaaatacccatcgcatttatatctagttatcagagtcctgctctttctgtaaaaggcccagcaactaccactcccctgggactgttcctcccccacaattgctgcctacactgtgtttctcaaaccaaattatcatgagaacttataaatgatctaagttttccaactcaacactgaagattgaggattgtagagagacgatagaagagggataaaagaaaagagaaactagttcaaaagagtaaggctttgcctttcaagtctccggaaggagtgggggaacaaatgtgtttggaactgatctaatatgacttgcattattatttctttgccagtatgtcttgtctcccaaggtataactccttagtgacagagtcatttctaatatttctttttatccttgtcattttttaaaaaaagatgtcttaccaacaaaaactacttacttgtttgctcagtgttgtaatacaaaaatgataatgacattaatacaccaaatccagttttagcttccacaattcatgaggataaaaaatacataatgagctcatcaaccaagtatttgttaaattcctgcttgtgtatagtacatgttagcaaaataatccccagtactggacggtgtggactctcaatccccctcattccttggcctctgaatcccacgttttcagcatgactttttggtaggtgccaaatataactcatagttctctaacccctcttgaatttctctggtttctaggagggagttctcctaccagtggtccaaagcctacttcattgcaagctgtgtagtcacagccatattgccagggcagtcagcttcatccagtggagcaacatggaggcctcgaatgaatacaagatgtggctcattgtccaaaaacaagggcaatttcttaagaaactgggcatctttatgagaaatttttagatttcctcaatttagttaacccataatagtacttagtcagattctttgc

SEQ ID NO: 57603 - DNA, 1013 bp, Homo sapiens
aactgaatgtataatattcttccccaaaactgctcttctttcagtgtcccctgttgttaaatagcaacactattatcaagttgtttagatgagaaatcgaggcatcggttgacaaattcctttcccttcctctcctaaccttcattaatcgtgctataaattcttcctgctaaccacatttgaataatccaatgtgacaatctccattgttgcctccgtcatctctggcctcaattatataataaacttctaactgctgtcctggtatctgctcccattcccattctttatgcagcagccaaagttctgttttaacaaaataaatctgattgtgtcatctactgcttccagttgcacaaaggttaaagtctagtattctgaacttggcctgtgaagtcctgggtaatatttatccttgtcttctttcactcacccttgcttacctttcccatccttctgtccctcaaacttgtcagataccttcccaacatagagcagtatctgtctggaaagctctttttcttattcttcagctggcagattatatctcatccttcttcctcattaaatggcacccactaccagactaggttagatttttctttaaaaaatgcctaaaggcaatattaaaagaggtcaaaagactgaatgagaaggtatttcacaaattgcgggagtccatcccacagaccctgaccccacgacggatgaatgatgtacagtgacacagatattatgtttgtcagtccagctgagcatctgggccactacagactccaaggagagtgttgtaaagagtagcagccaggctctccactcactggccctgcccgcatttattcagcatacataaaatgacaaaagtctcaagtaaacaccactagaaggtaattacctttgcggttgctggaactccgcactcccccggagtaatcacgcacccgcggatggtcaaaacaagctatttagatagacttctctacattcctatgttaattactcatgctatagct

SEQ ID NO: 57604 - DNA, 2159 bp, Homo sapiens
ccacagtgggctgcctgctgcagacaatatcagagtttgtttatatttaaatattattttaatatttctatttttgtccatgtattataatgcacatctatgtaatttgcaaatcatcactcatatatacatcatatcaaaaggtgtaaaagtttttgatagaattcagcattcattcgcttataaaatgagtgaaggctcactttacggatgagagtatttcatcaaaaaaattggggatctacgactctagagttctccgaagtccaccaaggaaaaagtaacttgaatttaatcgcatttaaaactatatagtatccactcctaaaacattagcaacataggaaaacttacacagcggaagaaatgactggggattttttttttttttttaatacatggtctcgctctgttgcccaggctggagtgcggtggcgcgagcaccgcttactgcggtgtcgacctctcgggctcgagttatcctcccacctcagccttccaagtaggtgggaccacaggcaccaccactccaagcccgtatatggtttttaaataagacaaattgcaaaaaacgttgccagacagcgttcgctggtttgggccgtcactgggtatggctcgtgtccgtctagatattcagaggccgagcacagtcctcagtagggctgctcggcaggtacacagctgacgctggtccttggacttatgggagtgggaacaactttcaactcggccgcggaccaggaaggcgttctgacccgctagagctcggggacagggaccccatcccggtgcctagagcgtctcccttagtcggcgtgggccagcgccagttacctcacgagcactgaactagcgcctgcgcccttctatacttctcgctctttcttcaagtcacttctacccggcgagcccgccctcccgccaatcgtcatttccggcgggtgctctgcgtcatttacgtcgtcacttcctgccgatgccggtgtggacgctgtgaatcgtggctggcccggttctccgcttctccccatcccctactttcctccctccctccctttccctccctcgtcgactgttgcttgctggtcgcagactccctgacccctccctcacccctccctaacctcggtgccaccggattgcccttcttttcctgttgcccagcccagccctagtgtcagggcgggggcctggagcagcccgaggcactgcagcagaagagagaaaagacaacgacgaccctcagctcgccagtccggtcgctggcttcgccgccgccatggcaatgagacagacgccgctcacctgctctggccacacgcgacccgtggttgatttggccttcagtggcatcacgccttatgggtatttcttaatcagcgcttgcaaaggtgagcaaggccgcaatcctggtcctcgacggctgggactgggctgaaagggatcgggacccgcacgctccagtgccgaagcggtggtgtggtgaggggggagggggcgatattaacatctgagatgagagccaacactggtccggtggagaaaggagtgtgttagggaatccgcagctggagccgagaggacgcttttgtagaaactattacctccaactaagacctctctccttattttatttttattgctatttttgaaggagctggtcagcatttgcctagactctcgggacaacacggtaaatagctttcaaggatttggggaaaggagaaattaggccaggccgtgcaataccttacaaagacgttcgctcttgtctcactggatattcctttgtggtattagcctcatttttcaaatgggaaactgagattcaggctaagatgtctgtccaaaataagactaaaatctagattgttttgacgcagatcagtattcccagccaattacagatgcttttcagagagaatgatctgttcagctcttcagttaatttattactgcacattccttagtgccttcagtgggtggtggtagttaaatagctgaaacaatttttccactttgtcattgaacatcattgtatatttacatttgaatcttagactttaagtaatctgaacttataaattacatgttttaaaaaatattttctagatggtaaacctatgctacgccagggagatacaggagactggatt

SEQ ID NO: 57605 - DNA, 2064 bp, Homo sapiens
ggattgttcagagactcaaatgctatcatacatctatatatgatgtatgaaagcacctagcacaataactggctcatggtagacaaatcataactaactgtactgttttcatagcagaggtgcctctaaacgtgagtacagataagttaactatattgagattgtggagtgactcgacgattttaacctcttggtcacagagaaatcaggctgaagcattttacctttatagaatcatagtattttgaagaaccaagaaattgtcaaggtcttcttttacagatgagaaaaatgaagctcggaaaagcagttaatttgcccagggtcacacatttaattattgcccgagcttggctaagaaaccaggtcttctgactcctaagcccttgccttcttcaggccacatagctgcttcttttcatgatgtgtagattagaaaagtcagtgtgccccggggcccttgattgcaccttggtttccctaacaaggatatgggatccctgctgacatttcagaccttaagttgcagagctctgcacttggatcttcttccttcttgttatataatcttacagttaaaagtttctaggaatatttttattacgtgcaattggcaacttcagtattttttaaagggtgttggtagcattatttccgggagctacttagcgctccggttcggtacctcgtggagaagacgggggaggggagcagcgagatttccttgcggagcaatattcctagggtacagacctcgtagcccgggcccgcgactccgccccgggagcgggcaggggcggggcgagcgctccagctggcgggaaggaggaagggccgggcgcggcgcagaggcgggcgcctaccagccggcagctccggagctgcccgcgccatgtccgcgcacaatcggggcaccgagctcggtaaggggcccgcggggctccccatcccctctccctcgcgttcagcgccgccgggactagcgcggggcctgctgccgcccagtgccctggctgtgggtccccgaggggttttcgctggggcgggaagcagtggcgtctggtcagccctcaccccaagtaaaggccgaacccggcacgttcgcgccgcttgtctttgcacctaagcttttactcttgtatgcggaaggagtaggaaagggttagattattatcttcctgccttttcgttcactctagctcgctggttggaaaacccaacaacccaaaaaacaaaacccaaaacaaacaacccccaagcaggtaaaaacagataaaaaccttctttctcctccttttaatagaatacttgtgtaatttaatgcagtatttccgtagataattttaaccgtaaccttgaagtggccgtgctcgtggaaaagttgtcagccgtctgtgctcaaaatgtaacactgcagattcatgggattttagagttacaaagatttgttaaagtacctgtattatttcccagttttcatctttttttatattgttcaaatactggcaagaaaccttagttcagatttcttttttttttttttttattgatcattcttgggtgtttctcgcagagggggatttggcagggtcataggacagtagtggagggaaggtcagctgataaacaagtgaacaaaggtctctggttttcctaggcagaggaccctgcggccttccgcagtgtttgtgtccctgggtacttaagattagggagtggtgatgactcttaacgagcatgctgccttcaagcatctgtttaacaaagcacatcttgcaccgcccttaatccatttaaccctgagtggacacagcacatgtttcagagagcacagggttggggataaggtcacagatcaacaggatcccaaggcagaagagaatttttcttcagatttcttaacatgtgaaaaatttataattcaaacagcaaaaccatgatcaagagaaggtttaagcgtctcgtttaagtattatagcttggatatctgtgtatccaggatctttaacttcttacctgtgtgacttcggacaaattaataactttgcgcttaagtttcttcat

SEQ ID NO: 57606 - DNA, 1886 bp, Homo sapiens
tataaccttcacattccatatacaactagctgctaattatctgtcttttttaaaatgctttttttaaaaattaggaattcaaaatataatgagattacacggatgagatttagattgatatggcatggaatagtggctaaaaaccatataagggaagaaaaagtagcagacgaattagaagttaatttatatttctcttgctaacttttaatgaaactgttcttggctcaaaaatagttaaaactttttaaattggaaaataataattatctatttaggggatacaatgtaatattttgatacatgtatacaatgtgaaatgattaaatcaagctgagtgacttcatcacctcacatacttagtttttgtgttgagaatgtctgaaatttactctcttagccgttttgaaacatacatgagtattaactgtagctaccatgctgtgcagtagatctcaaagacttacttttcttgtatgactgaaactttgtaccctttgaccatcatctctaattacctgccttaattggaagaccaaaatgaaggtagatatgaaatctacaggtaatctctaagtgttattttaattaacaaattttaaatttcttgcccattattccacttacagagatttttgaacaagaaacagaaaggattactttaaatttcaactctttctgtatttgcattttggactatatggtggacatgccatgtgcaaattgtgagcacaggaaaaggctaagggctgagatcaccctgtttggactacttaacccttgagtcattgagccagctgatggcaaggacagcccttatgaagtaggggagattttgcctgtgggtgtgttggactcttattgcatgcttttcccacccccgaggtgtctacttggagagtttcccctattaaaagctgtctgggagaagaatagaaaattcggctctcactaaagtgtgaaagcctattggtgtaaatagctttttcctgggaaaggtaagtttggttggtaccaaggaatgaccctttatatgtgcagtttaaaatgtttaaccaaagggaatatttggttgtggggagccttttgggtgtccctgaaatcttgccattttgacttctgtccatcatggtttttgtacacttgaccttacttttctcagccttctagatctgtagctgttaaatcctgtcctgcagacgggagcagcgttctctgtgaaaactggacaggagtcagctcctttagagcactggctcagccacgtgacttcttccaccagggcttcgggttcagctgggtcaggggagcagaggcgggaagcttgtgtccctgtggagccccactagggagaatgtctcccagcaaccagcatccaggccacagtgatcgcagagctaacccacactaacttctgagtgggtacatctaaggactccctttttaaaggtggaatggggtactttaaagtttttgatgacttgtcagagcatttgaaagcactgggaaaaccagccgccttgtcaaaacctgtgtcacttcttccagaggagaaattgcagaaagagagcaggtgccgtgggaagcagtgttttgaatcagcacccagcaggtggtgatttcccctctaattcggttttgaacagatactcccagacagtgttggcaatcactgtgctccataatgtagcggaggcttgtttgtttgtttgttttgggagacaatatcagctcaagccctgtctgcttatagtcacagtattttagcacatgttagatgcctgctgtttaaggggtacacctacattccaagcttcttctgtgtgtgtgtctgtgtgtgcatgtttaaatatatatttaagcacagaaaaaggcattaccagaga

SEQ ID NO: 57607 - DNA, 1160 bp, Homo sapiens
tttggaaagttcttcatctagtagttttcattgagaggaaagagttaagtggattttctctgaagcgcttggttcctagaataattgattaaatcttttcaaagcactgagagttgactctttacccaacagggggccaaagttatccagcttcttgatgaatttctctaaggtgtaatgattctctctgtaagttaggcacatttaggtgcttgacaaaactgtcatcagaagttttcccagagtacattaagttgaaaaactacatgtttggaaatctaaatgtgctttattaagtcttttatggagttatcttcatgagagcatgctatggtttggatgtggtttgtctacactaaagctgatgttcaaatttgatcctcagtgtggcagtgttgggagatggggcctagtgagaggtctttgggtcatgtaggtggatttatgtgaacagatttatgctctctctggggagggagtgggtgagtgagttcttgctctcttgggaatagattaattctcatgagagtgggttgttaaaaataatctggcttccttgttttttcttctgttgcttcgtctcttgaggaagatcttgtgagtttttttgcacatacctgctacctttcacgtgtccgcttcccctttgaccttttgccatgttatgactcagcagaaaagcccttaccaaaagccagcaccacactcttgaactttgcagcctacagaactgtaagccaaataaaccccttttctttgtaaattacccagtctcagttattcttttattgcaacacaaaatggactaagagcatataataatgtaaccaagatattgacaataaccatcttgtgatatgaaaacttttgtctgttaccaaatttatccaagatgttaatttgactgaaaagcatgaaagagaactgatttttagatgacagctttccaaagcattgttagttcaaggattaactcacaactttaggtgtgtaaatatgtgtgtgtgttttccatatttgacaagaatgtatgaacccatatgatactttaccttaaagtttcactataatttgttggctggacatggtggctcattcctgtctcccagcactttgggaggtcgaggagggaagatcacttgagtccaggagtttgagac

SEQ ID NO: 57608 - DNA, 1033 bp, Homo sapiens
aaagagttttgtaattagtgcattttttctaatggataactttttttccacagtactcttttaaggctcttttaaaaacatggaattgctggagagatatagaagtgaggttagttatagaaggtaaataatgttcatgtccgatttaccgtgaggccacctatgtttataggatattggtggatgaagttgaaatatgtgtaccaaacactgttggatgttagacacccaaagatgagtaacatcatggctgacaatgtactaagtacaacgaatggtttcaccaggaatccttgatgaattgattacaagttctgtggtagagatctatccaaatgttagctctgtctggggagctgacagtgttttcacaacagctaatatttagactaggtctgaaggtagaaattacagttaactggaagagaagagagagtagatcaaggtaggagagagcatttcagaacaaaagcaacagagatagctcctgaaactttaaataatttgttttttctttttttctaacttctgttatatcagtcaatgttgttatttctaatacattttgaaaaatttttctttgaagaaagaatgggctgtatcctgtcagcatgcagtaggtattaatcttgccagtaagcgggtagtgagcacagattctgtaagccccaccattagttcacttaagatttgttaatcatttgctctcctgggctggacactcaccagtaagtctttgctctcagaggtgaggtacgtggcatgggtaacacacatttcccacgtcgttagacatgtctgtgtgatgaatcaatacaggttcttccagttccaaatgtataggctggtacagaagcaattgtggtttttgcctttgaaagtaatggagtgattttgcatgaagtatgccttttgttgactggtcttccatcaataaggttgtttatttatagttgtacaaaaaagaaatataagctttaaaaaaaggttgatgtcaaatgataaatgtatcctttcaaggaccatgtaaaaa

SEQ ID NO: 57609 - DNA, 2580 bp, Homo sapiens
tcaacctcttcacctcggatgatccgctagccttgacctcccaaaatgttgggattacaggcaagagccactgtgcccagccccaaggaatttaatatcaaggtaacatgacaggtttttttagaaacagggatggagagttaatgatgtgcatgtaaaagatgttactatttttcaagagtgtagttgtgttttgtgttttcattttcctcttatttacacttggctctgctcttcccaaccctgcccctgcctcaatttggtggactaattaggtgtgttttcctcctgcattctcttttctttatgctcatctgccaggctggttgtttttaacataggcagtgggaggaacacataggacagtttgtttaccacagctaaagaggttcatgagagaattaatcaagataaatcaagggtaaatgagtaaatcaagatagctaacttgatcaagatttggacccagaactagtgtgctagataactagtgttcattaagatagggctaccactactattttatggctatcactgtgaagataaaacatctttgctggttacttaatccaccttcatgagcatctctgcagcatcttaatttcaggtcttccagaaaatgatatttgtcctaacactaatatgagagaacattcaatttcttcacacttatgcataagtgatgttcttaagtgtcagtgcattggtctttaaatgctgatgtttgggggtttggaattctttgatgaactactactgaccaattgaaatttgttttcccctcccccccttgcttactttctttcttccctccttccctctttcttcatttcctttcttaactctattagtggccgctggatttccagctggacagactcatttgaagacacgattagaagagatcagattggctgtggaagatggagctacagaaatcgacgtggtaattaacagaagcttggtgctgacaggccagtgggaaggtaggtgcatgcttttacctaagagagtttcaccattcttccctggtgaatcagatgatgaggtaagatgtggtatgttttagaggtcactgttctaggtgacaagttagtagatcaaatggtgagtttaggagaaagcaggctaagattacccatccttgtgcccctcataaatctaggcagttgcctacctacatgaacttttcagatccttttgagtgcttaggtgaatagttacttccatgcaatagattcataacttttaaaacaattttattttaccaacatgctttttcttcagaagggaaaagttactactattctatactgttttgttactcaatacatacttcactccaggcaagtcttttatgcaaagtttatttgaatatattggaggaaacttcccttttttatgttaatttttgcagtctttaaaggtatgggattattaagttgactaagtttatttttacttctagcattcttagacacagctctgatgactatcatgaaattaatgattcactatcacgtcagcatacactaagacattgccctttccagcaacaagcttttgtttttttaaacagatattaaagaatcaaatagattttacctctgtcttaaatatattttgtgtactaaagatgaggtcattggtagctagaaaagtaaaattctctttcaaaaaagtcattataataaatagtttaaccaaaaatttttaatgaaatcacaagttaaagccaggatagtatattgtctctttatatatcaaataaatggcatattttatactaattatggaggctattcccacactcctttaaagtttaaataagagataggattttatctcttatttaacctgcttattggacttgcctatttctcatgggtattttcctgtgactgtttctatccatctgtatctgtaaagcctatgtctatttgtgaagcctaattccattgattgtcaattatgaattgcttttggttatgaagtagcaaatgttcagtcagtggtttaaaccctcagtatttattctcttatataaagtccaggggtaggtatttcaggggtgtgtggcagctccacaaagttcttggagacccgggctacgtttatattccagttccaaagcatgtggcttctgctgttaatgtcaagggcacttcattgtctgagatggcttctgaagctccagcaccttacactcatctccaagaccataggaaagaaaggcttttctcatcaagtctcacacaacacctttgtttattacacctttgcccgttggcctgagctgagtgacgtggccattcttggctgcaagtaagctggaaaatagagtttttagcttggaatattaactactttcctgtacattcccatttccattgcgttcaccccactgccccccaagttccccattaatactcatcaacatttataattcttgccaggtttaaactcttgacagttcacaaatatctttttgtattttgtgttccttttttgtgattgttcatgtgtgtgttttagccaattacagtcattctgaaaaggcgtattttaaatagatatctc

SEQ ID NO: 57610 - DNA, 2378 bp, Homo sapiens
gttacatttcagccatcaagccactttgattagcatatgtcattcatctagtttctgaggtgtctatcatggtactgtcaaagtcctcaaaacgacctaaacactaataatgcttctttgtggtttctatggcttgtgttggagtgaagtggtctattttttcttatatgtaagactggcaaattctagttgtgctttcataagtattaggacagtgcttgctattttttgttcgttaaagttatttttgggtttctggaagtgtataagggaaaatatgggaagctagtattgaatgattaactgcctactaaatgcctggttctattctagcaacatatattatttaatcatcacaaaaatatgtgagcaaactgagcctccctaagtaattaggcttagagaaatcgaataattcctaaatgtttacacaactagcaagtagcaaaaatgtcttatctcaagagtctgtgctattcaaagtagcatgggttcttagcttaaaaacaaacttgtttgtgatatatagtaagccgtttcccccagactgtttttttaggggcccaaagaggttttattttatgttcttcaaggaacatagatcatggtgtcctctgcttttgtaagtccctctgtaatctgagcctgataagcactgaataataacaggaacaccatcactgctgccaccaacaactttgaaaacaggaactgacattccttgagcatgaacaatgtgctggatattgtccttatctattcgtgtgtgttaacctgtttgaaaataactccgtgaggtgtgcatacttctatcattcccattttgtaaatgaggaacatgggacaggtttagagttaagtaacttacccaaatcaaacaataaactagtagtaaagttggggtgtgaatccatatactcaggagaatccacatttttgtctacaatactatacttcttcagtaaatattcatgagttgaagaaaaccaattctgattaagtgaagctgaaagggaatttattatattaggaagacataaagaagctcactgaataagtaggaagccttgcttggaaaaaaagcaggaccatgagggaataaggagcagagaacacagtcagattgtgccacaggaagagcttgggcccagggccactgctggtgctgctcctactggccagcacaggtaccacactgttggctggtggctggcccctgggacactggacttttggatctcctgctattgctgatgccacaataataaagaaaatatctaactattctttcatctttgcctcactctttaagattcaaaggcctgagtagaagcaatcacttgatagagcccaggtcacattttaaaaagaccagatttggtataacttttgatttaattgttctgatatattttgggcagaatggtaacagaaagaaatgacaactttccacctgttgaaccttaaagattaagatattttctcagaaaaacttgatcctgttatgtggtaaaataggccagtaaaatgattttagaaattggcagttaaagaatgagaagacattggttgcatatttgtaaatccagttatgctctaagtgaccacttgcagttcattctgtttggatcatggattaaagagtataacttccaaatgactgaatcataaaatacctctggttttcgtggttaattttaactatacttcaagaaattcacttggcatcagaaggtagtactctagaaaaaggatggtgtttttttgttcacaaatatggtcgtgatcagtgttttaagaatttgttttacaggccaaagttcactttaacaactgctgtaataaaatactttccagccttgtctgatggctcactgattgtaagcagtaatccaacagaactttggttactggaactgggtcaggccatgaaataagatttgacttttataacacaacacttagtggaaattcattttactagaattctgaacttaataattaaactttttgagtgcttataacatgtcaggcagtatgcaaagtactttgtatatctctctctcattcctggtaaccctgtaaagtaaatattattgacactttaaggatggagctgatgctgacagaaataacttgcctaaggtcccacaggaaatgatggagttgggttttaaatctgcatttgtcctactctaaagcctgcttttaatgacaacactattttgtggaagaaaatcattaattaaatcacaagttaacttggattagcgttcttggatttttagatcagaagattttccttgtcacttgttcttagaaaacaagtttctttttttagattcaataacttaagaaatgtcattccatccaattca

SEQ ID NO: 57611 - DNA, 579 bp, Homo sapiens
ccaactccatcactctctatctcattacattgtattatatttctccatagaacttatctccacttgacatttgtttctttattgtctttctcttctagaacacctgctcacaaaggcaggaactttttgttcattggttgctctattcccagcagctttagagcagagtctggcacatggtagtactcagtaaatatttgttgaacaaatgcatgcatggtagtcatgtctccactttctcccaggcagccttacagacccaaagaaatgaaggcttccagtgacctgctctgatgcatcagtgtccatggaatttgtacagattgcagtcctacttaagtccttgcttcatttctctttgtataataattgacagttttcaaagtgcttgctatgcgattgtcccttttgatgctttgtgtaatactatgaagcaagtgggaatttcttagacctgtcgtacaaatgaggaatgtaaggggatggaatttcaaaggtaactatcagagccagagctagaaaccagatctcctgacttctagctcatttggtgattatgcggggtttacgtttcatctc

SEQ ID NO: 57612 - DNA, 1189 bp, Homo sapiens
aaaaaaaaaaaataagaacaggttaaccgagagaagagaatcttctatatgcctgaccttgactatttcaatagaattgtttctcaagtagaggataagacattaggttaccattgcatgatattacttaagaatttcaaacttcctttgctttctgtttatgctcaccaaacaattaaatgtgtcccctgcacataatgactcataataatagctaacatttatagagcttttgctatgtgtctggactacgttctgggcactgatgtcatcctgagtgatttcaaaagttttagagaacaaaatgatccaaaatttatctagggtatgtccctcaatgaaaaaaataagcaaactaaaacaaggaagtttcagtggctttttcaaagtcaccaggagcagttcaatgtcagagttctctgattcttagattgaaacttgttttactgtacccccactgttctcttgttccctgatggtgtcgaaggaagacaggcagaggagaatatgatcagaatggacttccatccttctctcccatttcaatcagataaatttcattttatgtcctattgattatgttctgagaatgatatcctaaattgcactatttgataaagtactgtattgaagctgtaacttacaatactaatccttaatcaattttgttaccgattcagaaattaaaatgatcttttggaattaattaactgtttatttttaagaacctatttgacatagacttaaggggtaaggactgcctgactttaaggataggtcatttggtagtgctggaaatttcaccatctctttatatcaggtgtgtcttctgaggagacataaacataaaaggataggaagaagatgggacacatgtctggctagagatttcggaagatgggtgttatcagtcacaaattcacctgttttccatattatcaaaatctgacactactcaggagcatatagctagttcggatcttagcagaatgttgttttaaaaaagtttcaaacgattcgcatgaaatggttaaattgtacttactgatgcatgttgacagaaatgatccaactctcttagagggaaacaggcaggtgctgaaatactccagaaaaggagccagaattagtaatggtaggctgctgatggcattcattactgcaatcggcagaagaaatccatccaaat

SEQ ID NO: 57613 - DNA, 1568 bp, Homo sapiens
tgtagggacatggatgaaactggaaaccatcattctcagcaaactatcgcaaggacaaaaaaccaaacaccgcatgttctcactcataggtgggaattgaacaatgagaacacatggacacaggaaggggaacatcacacactggggcctgttgtggggtggggggaggggggagggatagcattaggagatacacctaatgctaaatgacgagttaatgggtgcaccacaccaatatggcacatgtatacatatgtaacaaaacctgcacgttgtgcacatgtaccctaaaacttaaagtataaaaaaaaaaaaagcattacaaatcagcaagaaaaaaaaaaaaagatcaggctccaggtggtggtaacctgtggtttggggacacttgagttagtaagagcaacagcatttgccgtctttggaggggatatttggtaaccctccaagagagccacctatttagaaataaagtttattttagttatctgtaagggggaaaaatctgacttcaatagggacataatagttagccaataggatattcatttaagtgggagttaggagaactaagttatattcctgcccctttatcacttaaggcaaatttcttcctgtctatgagcctattacattaactgcaaaatacaaacagtaaagcctgtctcagaagatcatttctgaggcttggtataaaaaacggcttatgaaatgtcaagaattgcacatggaaatgcctttgttattacttgcttctatattcctgcattttctagctactctaagcaatgagccataaagaaatgtcatggaaccacttccaaattccagtttgcacaagagacagacgttaggaggcctggattatgcggaatagagttgaagcaatgggaaaccaccgcctttttatttgtcacatccctactagttctcaatacaaagttcacagtgagctcaaaggacaagtagtaattccatttgagaataatacttggcagagtatattgaatgtcatcatctttatcaacagacttgggcccttgagtaagacttatgcatactttagttttatgcaaacccctcccccattccaacccaggcttgttctctgtccctgcctcttctctctgttataaagtgatatttttctcctttatagaggcagtgtatggaatgtacgtaagttggatacaatttggaaaacatctaaaaatagaagaaaaaccatggaagtttttgaagcattttgttggatgttttctccccatggcttgttctctttattagtagatttaacatatttaaattgtataattgtatacaattattgttcaataaattttctaccccatttgtaggtactgttaaaaagcattttaacctgccattatgaactctttgtaaacatagttttttatggttgcattaatggagacatagtttacttaactattcttccatcgttggttagttatatttgtttcagattggttataagccagcctttgtcaaacgtttgaccatgaacccacagttgagagaaaaaaaacctttataaataatgctga

SEQ ID NO: 57614 - DNA, 2138 bp, Homo sapiens
tgttggattataaaacagttctatgtttatttcataagaaactatgagacagttttactatttgattccattttataccctcactggcaatgtatgatggtttcatttgctccacagctttgccaatgtttgattttgtttgtctttaattcttgccttttcaatttttgggaagaagcaaatcgttgtggttttgatttgcctatctgtgaagactaatgacattgaataccttttcatgtgcttcttagtcattcatatatcttcttttgtgagtgttgaaatattttgaatattttcaatttttaattttctacttttgtctcaattattgtcataggtgttcttttgcatacaagttctttgtcagatacatggtattgggaatattttctctcagtctctggctttcctatttattttcttaataatgtcttttgatgaagttcaatttatcagtttttttttgttttatagataattttttgtttcctgcctaaaacgtctttaccgaccccaaggtcatgaagataatcgaggttttcttccagaggctttatagtattagccttgaggtctgtgattcagcttgaatttttgtgtatgatgtcagttaagggtcaaagttcaatttttttaccatgtggctattcagtggttccagccccttttgttgaaagctttcctttcttcagtgaattgtcttggcaccttgttgaaaatcaattgatcaattaaatatagttctatttctggattctattctattcttttgacctatttgtctatccttatacccttactatactctcttgattagcttcaagaatttttatcattttttagttctgttcctttcatcgtggctacttttgcctcttgacaatattagcttaagagtttatttcagaagttagcacagctttcaggctgctgtgtatctcagagtgtctgtctaaaaaataggaaaaataagaactcccttatagggttattgggagaaataaacaatctagtatacatgtttaaaatgtattataactctaaaataatccttaagtgttcagaatattgcttatttttgtttcactttttgctctcttgaccttaaaacatattcttatgcaagtttactgaaatcccccagtaagtttcagattgtggcagggcacctgttctgtggatttagggaaaaacaaaggccccaatataattgaggggagtgacaggcacctgttttcttcctatttacagcaagccttaacagaaggtgatggcaattctttctgccatttttactttgtctgttttaaaaacagacaaaggtattactggacttccaatgctttgctcttccagatatttctaatttgatcccctgaacagtctgctttttttttctttattgtggtaattcctttttcagatgaatgacctttgctctcctcaccccaaatcaatgaccttttaaactgttttaatatttactagggaattacttgttctgaggcttggattgagtttctctaaaagatggtattctagaatttaaatggtggtgagaggaagggttgaaaagctgaatccattcttttacccagacgaaactaagctgaataacaactctctctctttctcaatcatttaagagcttataacaaagatgaatataaagtgtcaattattttacaacttttacctgttaccgccctagttcacaccccaactgtcattcttatttctaaatggaaactttccttccacaagcttaatggcaactttttacctttttggcctttgtgtttactagattgtaaaatcctggaggacagctctttgacgttatttatcttagttttagattttagcatcaaaccaagtacattgcattcatttaataaatgtttattcaattaaaccaactgctaatattctacccaatacagtgtcatatatatatccgtatgtatatatataatattgcctgatacacacaaacacacacacacatatatatatgtatgtaacaggcaataattgttcgtgatttagtgatagtaggaactcagtatttattcattgatcaattaatagtttgaacacattctatatttagagcattagatgagtcaagtgct

SEQ ID NO: 57615 - DNA, 5418 bp, Homo sapiens
cggtgtgaactcgggaggcggagcttgcagtgagctgagatcgcgccactgcactccagcctgggctacacaggcagactccgtctcaaaaaaaaaaaaaaaaaaatgttagaaccattcaactagcattctgtagaccaaattatctaaacagtagctctcctcttcctttttctgccatgttatccataagatttggcctgtatcaccttataataaatgaagagagtcttaaattcttataataccaaactcctttggagagaattcagaatagatttatgtcatctcaaattctatcctattccagttaatgttacagacagattctagtatactttacaaagataggtgaataagtagagttttgaaaagatacagacataaaagtgaagaacagatgccttctgatgctagattttccaaaactcctactgttatgcttatatagaaatcattctcagaccttccttggattaatttctgttcctagagcaaactggtagttatttctttctttaatagaacatgaacttgtccatcacatcctagaaagttagtcctagggatatcctttaaagcctaaaggagtaaattaagagcaaaaaaaggaagtagaccttgcaacaggtggtgagtgtctgagatatagcactaggagagaaataatatagattgaaaacagaaatccttaaacatttctcatataaacccatgaaagatagatccataaatattgtggggactatggggactaggaagcttggaagtatccctaatctagatagtgatggtaggctaaatatctacggcttccgtaaacgttcctctaaacctccctgtaaaaaacacactaagctgattgtgtaatgagctgatccagtacaattgcctccaatttcattctggaccctgaacaggaggggacatcgtgacaaagcaaattgtctggtatcatgaatttggaacaccgtaagtgatctttactgagggttacattctgtcattgtcagccttttaaggaggccttgccaccagcgcaggggaggtgaagtctaagggaaggtaatattgtcaatgcctgctaattagttctaccctggagattttaactttctgcgaagtttttaaaaacaacttccaaaactctgctgatcctgaaatgttcgagaattcagagttcctagacaatggctactgtcccccttcccactgattaggggagttggcatttcaggaaccagagtttctaagggcgccaaatagaagggctcaaagggaatcagcaggcgatggttactgtgggcgggtaaatcaggtgatttagaggaggggtttggcgaggttggggtcgggctttaaacgtgggagggctaattaacaggagattaactggagaggggcggtgcctgcgtccggcccgcgcggccacagtccctgcattgcgcgcgacccggcggcgggacaggcttgctgcttcctcctcctcggcctcaccgtgcgtactgggaggggagaaggggaccgcatgcaaagggtggcaggcagggagggccagggtgggtggcagatggaagacttgggggggtctctgccagctggaagtgcttggctccacttagcagctaaacttagcttttcaatcgatcgcttttgaaagggaattgtatttctgtccccgtgcgggtaagttttcccatttctcaaactccaggaatgaaacgagagagtcttttcatgcttgagtgatgatttccaaacttagccttttcaagtcaaagtaacctcctgtttgaaagggtcccttgaactctggggaaggaggaaaaggcacgtgtagtaatggaggaaatgcctgtagtttgaacgactgctgttctccccaagagtgcaaaagcctgcgatgtctcaggtttcatgggcatagtggcctttatgcctattgtaaggcaggatttgctcttctgagttcactttgataggagaaacatcagcaagttttaaaataatactaaataatactactgctaataatgctagctatcgaaacaagaggatgtgggttagatgataatatttttgtgtgatattatagccagtgacaagagagctaagggtgagccccttgggacggttctcacctgtgccccacttccccagtctggaggaggaagccatgtggaaggagaaaaggagaagggaactctctttttcgggaattaaggtgtcatatattgctctagctggcttgggacagaggagagaggagtgcatgtaaatcttctagtctctctgcttctcttgaaatgtggcagtctgagctccacgtttatattcccctatttcttctccctaatttcttacccagtgagtgctgagtgggtgcccgcaagcattgctgtatagcacccaggcctccagtgagcaatccttaaagcccagttttcctggggtcccagcctgctgtgagtcccagcctacacctaccttttgcatatgcttttcttggccttaggatagtactggactttgttgtcctctgctgtttccaaaataagagggctatgtgtgcgattatctttggtaattaaaaaaaaaaaaaaaaaaaaggcaaatcagtccaaatttggatattaccctctctggcagacgagtaaaatttttctaccgctttgttttagagtggtgtctatgaatccctgagattggaaaaggaggtcaggtcagcacagagaaaggccttaccccaccactctcccgagaggcaccagcatttcacctgcagcctctgggctctgaaccccactttgcatgagaccacatagtgggctgagtctgcagccaccacgatgccttcaggaaatgctagaattcatctagagttccagattaacgtatccgcaacatggccaccgaattatcttttttctttatctcatgtgtagtgtttgttagttttagaaggtacaaaattgcagagtcatggccctggggatgcgtgcccagattattcatgtgtttcacaatattgatgcagaaaggctggccacctcatcctgagaagagaactttgctcattttggccaaaagcctgtaaagggaaagggcgttcctcaactgagaagtgaagattcttctctgctagatagtacgggggtttggggggaggggtagaaaacaggaatgagatttgacaaggaaaggcctccagaagaccagagctgttgagaattcttagccttgatggtgggtagcccagaggtaaacacttgagaaaactaagttgcagtcttggtctctccactgtgaatttgggtcatattactcactacttttctgggccttaatttccttacatactaaaggtagaaaaaaatattatttgctctacctcaggatttttcgggtcaagcgagataaaatatgcaaaagctttttgaaaattctaaaatcctcagtgcctagaacagcgccaaagtcggaagttttttatttaccaaacacacagcatttaacaggtcccagagcttctttttttttttttttttttgagacggggtctcgcactgtcacccaggctggagtgcagtggcacgatctcagctcactgcaaactccgcttcccgggttcacgccattctcctgcctcagcctcccgagtagctgggactacaggcacctgccaccacgcccagctaattttttgtatttttaatagagacggggtttcaccatgttagccaggatggtctcgatctcctgacctcgtgatctgcccgcctccggctcccaaagtgctgggattacaggcatgagccaccgcgctcggcccccgcttttctaactttattcagctaaggctcacaagaatccagtgaaatgggagttcttattcaactcctttcacaggtaaggtgaagaggtcccagagaagttaagttacacttactaagtggcagggtcgagatccacccgaatgccaatctagttccagagttttgaatacttgacactctaccccatgtcctcttatgaagaagtcacctccacattaggggacagagctctggtctctggcaagagaggttgagatacttattaccatgctggccaatgaatggagaatataatgagcaaacaaaccactgtgcaaacatgattgatcattgtaaatattttctataattcataaccaaattagtgtttttccctgcttacttttctttgattatttctccttcattccttgaatcctcaaaccacttaacatttcatcctgttatttattattatacaggaccactcttctccctcctgacaacctttcctggtaaaaggctttcagtaattttgttgtggctgcagagccaaccatgataatggctgcagttttgtgcagcaaactcgtggcaattgattgataaatcagctttgggggaaaaaaagtttacaacagcattgccttaatccatgctataaacaactactatttcttaatgttcttaccttaactgctcattacctggctcttgggtacctgtgaaggggaagatgttaccctggagagatggttcattgactcatcaggtgtgtgtcagatgcttggtgctggccagtctcccaaacccacagacttgaggagttaagccacattcttcgtgattgagaaactctgtgtgaagtgcacagtgtgttgttcatttttaaagaaaaggcctcccattgccctttttcccagccactgacttctttgtgtactttcctaccaacagtcctgggaggctgccatttttttctctactctttcaatactgattttcaatgagggggaaaaaaaagttctctggacttttgttccatcaatacataaatttcattctgggaacattagtagaggcctatagagaatgttttagttttaaaattattgttaagtagcaactttctatttgataaacttaccttaattttaaaaaacttcacacgcttgctgtatttcttcacatctttgtacagaggcctgggacttagggatcctttcttaagctaattactttacctacactctgaaggatagtgcagtttattcatgactttcaccccttcaatactagaacaagcagacacattaaatgttaccaaaaatattatattgcactgagagctaatctaacatactgtgctttcaagactagagacttatggaggttgattaatttgctatctaggggattttttaaaaaccttgcgcatgtagtttctgtttgcctaaatccaagctgtatatttttagcctaagaaaacaaaaataggggggccaggcatggtggctcatgcctgtaatcctagcagtttgggaggctgaggcgggtggatcacctgaggtcaggagtttaagaccagcctgacaaatatggt

SEQ ID NO: 57616 - DNA, 1357 bp, Homo sapiens
actatcactaaagatttttttaaaaaggtcattaaggtaatttgaactttatatttatatgccaactaggtcccaaggttggagtctgaactacattcccaatcaggatatggatttttcagacataatttggcccaggggctaccttgctaatgtatatttacatgaaagaccaagaaatttcataagacacaagctactctaaaagagagaattgaaatgaccaggcctattgaaggaacaccttctgggcccctgggcatgggatatggcctaggtctgcacaatcaaaatatgccattaccctaggcacagtaattttctcccccgaggaatgcacatgtgagtaggctaaggccaatcagagctctccccaggattttctttgcagagaatagggcaagattgtctttgagatgaacttgctaaccctgaaaaacatgattatggttgtgccagtgaccatcttagtggaacagagagtaaatctgctttatcactgggaagacagagtcctcattacagtactgaagcttctacttttatgccagccagactggagcagaagtaggatttctggacctttggacttcaaaattgcataagcctttttttgtttgttttttacgtgcttgttcaagtccatgtttctcaaagtgtgatctctgtagcagcagcattaacatgagctgagaactggttagaaatgctcattgtagggccctatcccatactttataaatcagaacctctgggaatagggaagaagtataacagactctccaagtaattctgatgcattaaaggttggaaaacaccggtttaagttattttgaatcaagtttctagccaccttcaattggccaagtcctgatatagcagtgacaaataagaactttcataacagtgctaatagtaatcagagaagtattttggttaagaagtgttcttacttgaccatatcagagacctagttttgaataaggagactctctcaggagactccaggagtatctgttcttagtttagccccataccaacctagcctcaagtggagtcacagcccactgggatataaacattgaagaatctgttccgtctaggacttcaaattattagaattttaaaattgtggagatatggataggactcttctctgaaactttatgtcagcttgaacacattctatttaaaagaactgcttaattttaatttcaatatctatgtttagaagagaacctttatagattgtctcaagggggagatttagtccctcaatctaaatatctctgcctttgatccaaatcattccaatttactttaacataagagggtgacttttttcaactggcttaat

SEQ ID NO: 57617 - DNA, 859 bp, Homo sapiens
ttcttattttttaatttatttttgtttgagtgggattcacttccccaacccttgaggatgtaactattgtgtatgctgcaaagggtcttttggctttgcttctaggaattcctacagacccttatcctccagaagggtctgttggaattccttggttgtagagagctatagtgtagtggctttcttaaatgttaattgtttgtggctgtagtagtgatggggtgcacttgtggtcaggctcactgtcttttacaggaaaaaggtagtggaggtctctggaggcttgtgtcctttcccagcgttttctctgtcagcaaaaattatatttggttgtgcagtacatgctactggacagtaggtggcaattgtgggtgagagctggctgagtgctgtacaaatacgtcagaagttgtgacagactctgcaggttaacgtctcagccacaaggtggtgcttgcaggcaagaggcaattgcaatattggcattggaatatttacttggcctttgttgattaccggaagtacctgggtgttcctggcaatgggtaggacctgaggatcccagggttactgtttcacactctgccaccatggtgactgaatcgggccaaattgggtggggctgggttggacaagctcatgactaggctctccaaggctggtgaaagcactgatcttgctgggagtttagcggcagctttcaggtgactggaacaaccctcctaggagaggcaaagttgctattcctttgccacatatctaacttagtggaggagtggcaacctggggatttttaacctaaatggtgaccacgaagtgtgataagctcagttcctgtacccaggggtctctctccaag

SEQ ID NO: 57618 - DNA, 883 bp, Homo sapiens
ataatgataccgagtttatagttttgaaataacaattttgaggtttattctggtatgacaaaattactaaatttgtaaaatgagaatataatacttgactcattagaccagcctcataaggtgactgatttcttcaaagactcattctctctctccttaatctgtaacttctttacaaggagtatctaaactgaattctcagaacacaaaaagagactataaatctctttgctactatacaactgtcagatttcactaaatccaattatcattgggtaccaccctaagttaatttgccactgatttgtatcactgcatgtttagatctgttttacttgctcttatgacagatgtatttccgccattttagcagtggaattaaacggtgaaagcctattgattattgaggaatgataactcagctacacagcagcaccatcttttggcctttgaaggaaaatgatccaaacttatgaatcatgaggtctgtatttctggcatgcgatgtatgcttactttgtgaatcacctttgcaatgcaattaaagtaaggaaatggcttcaaaaggactggaatcaacatttcacatgagatcagatatccacaaaaacaaatcaactgaaaaagatctatattttattcattcaacaaaaattaaagtattattttagaaagtgtttacctttagaattggaattcctttctttttaacttatgaattgcttgtacatttattttgtatggttatttagtattatcatttaagtttattcaacatttctgacttatgaaaggactttctgtaatttatttattttttggaaagctgactccaaagtatgctttttttccatttatctttagagtagtagtaatatattta

SEQ ID NO: 57619 - DNA, 781 bp, Homo sapiens
tttacaagactaagggaaatcatggtgacctcatatggcacgctatggacattatcctaaagggcacaatgagatatcaagaaattttaagtatgagagcaaaagtttttgattagatattctactctgaaagtgacatggaacatggtttggaggtagaaagagaggagataaaaagaggatgaagaaggagaagcagggatacctcttagaagactaagtaccctcagaaagggtcttgacaagcataacaatgagataaaggaaaaattttgaagaaatagccaatgaaaatctgaaaatcagcaagatttggtgattgttttgtggtaggccaatgcttgctgacagtcacacacacaggcctccatagcactcccgttatacaggcaaacttccatggcatctgccttaacactaagttaataattaaacctagggaaatcaatgcccagacaccaaagacaacaatgaaacatatcttcggtaagacctttccccgggcttctgctgaagcccagggcaagtcaagataaaggaaactttcataaattccttgtcttgacgaggtcctgtcttgggtccacaaaacctggggtgagtcaagacagcccttcattccttgtaccaacacccgtcttggattcaatacatttgctgggggtctgaagcaactctctagacccaaaccataggtaacataaggtagaagtaatcaacctggtatcaggggcctaatagattaagtagatttaggggacatttctttatcatcccgata

SEQ ID NO: 57620 - DNA, 908 bp, Homo sapiens
ctttctatcccgtaaatttcattaagagtcctctttttaaagccttgcaattgcctactggataaatgtcaagcactttttcacagcacacaaaggtctccatgaatttatctcagactttctcttcaactttattgttcatggataccctttgaaaacttctacatctgacttatcaaagtcagaagtacattgctcaaatttgtaatgctatttcataacttcctgccttggcaaattttgttctctctgcctggaagttataaacgcgtctttctaaacttagttcaagagtctcccctggaaaatctcaaaaatagttaattaactttctccattgtcacatgctatattttgcatagaaaaatatttagcacttacaatactttttactcaaaattatcgcctatctaaaacaataattcatagtctccatgttatgagaaactatcactatctttaggaaagagaaaatttattcccacaggtttaaaaaatgaaatatttacttttcaagtaaaagaatgtcaacttctgcctatattaggagaaacaaaagagaacgttgcaaataaaaaaaaaattattgcttcattggctcaacaccagctatgcactggtgatacaaagataaataaggaagtcccttccaatattacacaatacgtagaatggcattgaattgtaattgcatgtaactcatgaaaacgcatgctgttttttaggacctaacatccatgtaaattatgactccactatatcttcaaacaacaatgaaacattaggcagcatgcactttcagtcaagttaactgtatattatactccaagacactaccatacatgtaacagtaatggataaattataaaaagttaaaaattataaagatatcaggtagtcaaaaaaca

SEQ ID NO: 57621 - DNA, 925 bp, Homo sapiens
tgtttgtgtgcatacacacacaacaaatataaacaagtggtatttatcaatttatttaagaaaattaaaataaaacttcagacctaatctgaatcaagacaaatgataaatctacctaatcaagacatatggtaaatctacatctcactgaaaaaactgaaaaataaaaatattcagcaaaaaatccagaaaaataatttttaaaagagtctatgtaataacatataacatagatcaatttagaaaactgacatattaactttaaaatgagggcaaatttaaatttaatataaaaatcagagaagtgaatagacacagcacataacaataaaaagcataattcaaacattgtagtgggctcactggtgctcacaggtagctggtgatcctgtctttctggacattgaagtttgtacttctcccctctgcagtgagtcactcctctgtgattaattctaatcaatgaaatgtgagcatgagagatgtgtgatccttctgagcagaggcagtcgaaagcccatgcatggttctttagtctggctctttgcctgctctcatagcttaaaaaaaaatgagtctggtgtggtggctcatgactgtaatgccagcaatttaggagccgaaggcaggaggattacttgaacccaggggttccagaccagcctaggtaacagtgagactctgtctcaacaaaaaatacaaaaatgagccaggtatggtggcatgcacctgttgtcccagctactcaggaggctgagttgggaggactgctttagcctgggagttacaggctgcagtgagcagtaatcacaccactgcactccagcccaggtgaaagagcaagatcctgtctcaaaaaaaaaagataatgtttacccaaaatcttcaaaagtgaagacaatagaagcattgcattgcaatagac

SEQ ID NO: 57622 - DNA, 1004 bp, Homo sapiens
ataaaaatgtggctggtactgctgtttccttagacactgccaacaaacacattaaagaaacctcccaagacaaaagaacaaatgatgtgtttacaggagcaattagaatttggtttgcaaacatcctaaataatggatggcaagcttgggatttccaaaggtttctaatctttttattttttctagttaggtctccaggttattatgacttgtgttaccaaggtaacaatgaaaatggatacctctttaaatcagaccacgttacaaccatggttcttaatctctatcatactccaaataatgactgtgaccaattagacactaatgctgttgaactgcctacattgcctgagctttggtttgtttaacatggtttggctcatttcataacaactcttgttaagaaatacacctttgtattttgatgttatctttttgatagtcatgataattatccctcttgtgttctatagcctctcacatcttaaatgttttctgtgcagccatccgttgagagttagtttcactttgactaggtcagcaagaacagaatgaatcattcagctgatgtgaagctgtgacttgtgaactccatgctgacaccaaagaagacttgtgaacttcatattaagactacagaacacttgtgaatttcatattgagacaaaataagtcatttacagaggtgacagggagtaaagttattgcctaaagtttggccattctctctaaattgagaggctgagcaaaaggagtggattgttaaatgaaactaaaatctggcctgagaaaatattcttattcttgagtccttatggatgaactctaacctaatttagtagataggcatactcctaactgaggagtatgcttctgtcccagcagccatactttaaccagtcacagacagccaactgttcaaaccgtgttcaaataaggcaaatgctgagctataaccaatctggctgtttctgtatatcacttccattttcaggacaacacta

SEQ ID NO: 57623 - DNA, 992 bp, Homo sapiens
gtccttttgtggtaatttttatgccttcctttacagttttacaggttttatacacagtagatttgttttatagtcttgacctagctctattatgccaagttttgcttctctttgttataactgatgattcatacatggtacatttttcattgatttctgttatgatctatttgtaattgcaagttcctctttagcaaaataaagcttgtattttttttcctataccaaatataatacagcctggattttaagaaggtagttctagagtagtattacttatttccaagagtatctctggatgaggacaactttttttttttttttttaacctctgggactgggtgtttttgcaggacagagagaggtatagttacatataatatcacctgaggcacaggcttaaggtcttgatttctcaaagggagacattttttcctcacttaaatttacatcaggataaaatttttattttattttctgctgcagctggaggtcacggtatgtccaatattcctttatcttttgagaagccctttgtagcttcaagatttattgtagcagtctgttttaactcacatccctaaagtgaacacagaatcagcttttgctcctaaccccagcttttgtcccctttctgtttgtgccacagggggttttcttatctttcataagaacacagatgattcatccatattattcagtgcttccacttgtttgtaggggtaaaagaaaggtttttgcatcactttaaatggcaattttatagaaagaggttttgtttttagtttactatactaacaatgctagatataagtgaattttaatggaaaatggggaatgtgctcaaacacatatgtgggtggacatggtgcaaaatagagaaagcatggccaacatcaggattttgaaagtggaaatgaacaagaatatcaccaatatttacagacatattgtagaattttgtatatccccataaggcatatgattgagag

SEQ ID NO: 57624 - DNA, 3614 bp, Homo sapiens
ctttctcttttcaactacgtatctgagtgatcctggattcaaaacagtatgttgcagcagactgaattcagaagcagatgtcagaatccatttgtctattaagccaaacacaaacaagttttgcaaaaatgtgaaaaaactcttctcattattatttttttaataactatttgtaaaattaaatatatgatttattttgccaagcaatagtttattattgttgttttaaaataaaatgttaaatacgtattttaaatatttctgaattttaattcctaatgtggcaaatcttaagtcttttcagaggtttttatcttttagattataaaagatgcccaaggccacaaagttttgggaagggctgtatagactgaactccatgccttaagaggaaaatgaagccaatatattcttacaagagaagagatacacgacaaagcaacaacatacacctttcattccaactctgctgagtcatcgatggtacttttagatcttaggcgggtaacagcaaaataaggtgagaatttcaaataatcaactttctaagataaatttataaaagcccttttatagcactgatcccctatcttagttcttggaagttaatgaaagagggaagtttaaacaactaaattaatactagtaacagttaagttgtatgaattaagtgtgtcaatagtaagtgttaacggaagagattggaaaaactgattttcccagtcactcaaggtgctcaaaccgatcatgggaacatgtagttttatttgtgtagcaactgataagataaaatcaacagagaccaaaactcctttcacagtgttatagtgaatcattaaacacgaaacgagcctctgaccttgccctgttggcatttctactggccagagaaatacaacttaaagaagaacatataaggtaagtaatgtaaatgtacactgtactatgaaatgtatcctgaaatgaagttttcaacatcaagattatttgatttatgtaatcagaaatgcctgaataattataaaattattaattcataaagtttaaatcctataaagtctttctgtgtgtgtgtgtgtgtgtgtgtgtgtgtgtattttaatttcaatgataattttcctagataacaaattgttgacagaatagagtaaagcaagaataattactacatttgcaggtgttgggtaaaaattttttcagataaaaaaattttaaaagaataattactacagtaattaaattgttggtgatcttggttgaaaactcttctgttagagatggcaccatcccagaaaggttaaatcatatgttaaaggtcagtatgtgacttctacctggcccaaagtacaattcaaattcaaagaaaacaagggggtaaattaaaattaaaaacacagataattaaaaacattttaatcacaattatcaagtgcagttgaaaaattataattagtgagagtagacactaagccctgaagaaacaagtggtgagaaactaaagtgcttgttatggagccatcaatttagatttctttttgtctattagtttatgaaactggctttcatttttaatgcgtactcccatttcctataattcctccattttcaaatagaatttcaaattcagaaactctaaatgtgacacccagcttcacactggatttgctactttaataatgtaaattaggtttctagaaaatacaacagaaaaaaaacagaagactttttaaaatatgtaaaaggcacttataaactctaatttattgaacatcctgaggatgtttatgtgctaggtattataacagacaaaagaataccaagaaaattaagactgagtccctgccttccagagcttatattcagtaagagaagaagggagaattaagcacaaggtacagtgtggtaataactatgagaacagagggtatattacatgagtatagcataaaatagtgattaaaaatacattagttgtcaaaatgatcttggtaaattcaaaatgccaaatcaagcaaaataattttattcactaaagaaaatgtctagaagaaaaatatattttaccccaaattctataatctgtaacaggatagaaatctaactgccagtcagtaaaggtaataaaataaccatcagctaatagcagagcctaaaataaaaataaaagaatactaagataattccagtatagtgagctctattcaaaccattagtagaaaataaattatagaatctaatatgttagattgtttaataaagtggaatactgggggttcttgataaattgcttaaaaggtataataaaacagaaaatttagtaaacaagaactttttccgtacttttggtagaattctgagcttatctcatacctgctttctgggtctcaaaactacatttatccaggagatccacaaatccaatcattttctctgcattttacgctatctctaaaagtgatttacaagtaaattaaagtgttaatcaaatcaggaaaatactacaatttccagccattatttaatcaggtatgtcttaggcactgccgcgatgctatcaagctgcttccaaatgtgaagagtaactaaagggaagatccagtcttgtcctggggacacttataatatttttctaacaatgaacattaatctcagaagtaattcagaagcaatgtatggcaatatggagttagcatagattatacataatattggtggcatcttaaaaagaagaaggcacaatttttgaaaacaagcttattataaaatattatttgtgaagtcaaagatcgaggttatattttcagctttataattcttttgggtggctccaagcaagttctctgttccctcttagtctcaatgtttcaactgtaaagatgtatttttattcacccaatctgtttcacagaatttttgtgaagatcaaatgataaagcatgtgaactgaaaaatactttaagagattacgtgggcatctgtatcttagaagcctcaattgaggaattattgtgagtcagaaaaaataggaaaactcgtaataaaaaataaacaaggcatagtctattttatataattcatgtttgggagcatctcttactcagaaacaacgttcgatccttcatgttttagaacctctcatttccagtgaattccaattttaactcagtcagcgctgcattttacacattttgatgtcagtgtgatataattaaacactgggaaaaaacctactccgtagtgaaagatttacttacatctcaatattttatcataaaattgttagatttcctttgaatatttttacagcattctgttacttcatttaaaaaatctgtattaaaaattacccaagagtgatttgggagggaaaaaaatctactgtatcctcacaagcagaaataatgtcttccatttttcaatgttcccatctaaatttttttaaattacacattttattaattatcattataatgtacaattggatgcactgcatatgtaacttacaatttttaaggttgctagtcgttatacattcaaatttagtgataacagaattttccctttatctaatacagcattatttgcttaaccatctctttgtggtttggtaataa

SEQ ID NO: 57625 - DNA, 1158 bp, Homo sapiens
taatttgacattgatttcttaatgtaacaagcaagaaagttttagaaggctgttcaccatggaacttaaaattttgactcttacaataaaatgcataaacaaaataacctaattaatgttaacataatagacaggaaatcaaataaacttgcacgtaaacattgatttttaaataaaatttgcatttcattgttgaagcttgatcattctgtcttaaatactttgcctaaaaaacggagtagactactaccaggtaagacagaaggctttgtgtgtttaaattttagacataggacatagccatgaaaaaagtaaattttagaagaagcttaattgttctctggattttattttaattaaaagtgctactaaaataggtaagcgtacatgttaagcaaggaaagataaattattgaagaacatattttcaaaggaaacaaagtacaaggtacatttttgtaccctttcttgttaatgaataatgactatcaaactgttctaaccttaatctttgagttttatcaagattagattgttccttttcaacccagtccagctctcataagtcctcctgaaaaatgtatgagcctactttaatgtgtggtaagagatttgtagatccaaaatgtttcaatttttgaagggactatttttcttaaatagtggctcattttaggaattaatttaaagagatttttaagggtttagcataaatgtatttggaaaaaatcactacatgtaaagttatttttaaagtcatctatctccccagagttccaaagctaagaattgcagctcaggttattattaaaatataaaggtatgattgttttcctgtgtgacatcaccctccacttctaggtcaagctcccatttttctgtgacctctcacacctttgtagctttagaacagaaggggtacaagggtcaggggatggtgttgtacaattgtgaaccttcaatactataaatatctttccatgagtagccctgaaagtgatataattctcaactttctcttctctacccttccatgtaagaaatcattcttacagaaaactactataaatctaaaaagaagaaaaaagaagagaaaaaaacagcaacaacaaaaggatcctacgacatattttggaaacaagagtaatccaatttatt

SEQ ID NO: 57626 - DNA, 819 bp, Homo sapiens
gccaaatattacagttcaaatcttacttatttttactgtttttcactttcctattttccctcttcttttactgtacttttcatgactacagtttagctttctctgtcgcagaaaaaaattgtcttgtcaccatcacactttttattttagctgtcccagtgactctatatgtaaatttctagaaagtaagactcacatcttcgtttctcagtcattctacatagtgtttctttttcacagcatgtagtcaaaatattgttttataacagtgaccttattctttccacctaacttagcttccttcttcctcttcacaaaacaaaccaatataaaaattaatttacctttgacattgggccatatgaaggttttccttctgatgttttctgtccgaatttctaatagtcagttttaaaaatagattgtgtgtgtactgacacacaagattacatacaccctaggcattaagggacccactcagatctcaaccttaatgccaccgtgtggtgaaatagtgcaattatgttgagacatactgcattctctgcatacttgcaaagggttttcatgaatgccctgttgcaggagagctggtcaagaagttaaggtatgcgtgtgtgtgtgcgtgtgtgtgtgagcacacacatatgggccataggcatgatattttaagataagtagttcatgcttatgtaggaagaaaacaaaatgccaactcctaacatttatacctaccagtaattgtcattaattagcataatttagtgctcatggaatggaaaactctcttacactgacattttggcggcaagatgtggt

SEQ ID NO: 57627 - DNA, 1474 bp, Homo sapiens
caggctcttaagtttccaggcttgtggtgaggggtttgggacatagagttgagaaagatgcgcagaaaaatatttaacatggaaaggaaaaattaatgctactaaaatatggcatcacactcttgcagaggaagattcgaccacgtgacacctaaaggtccacttctaatctgtggacatgttaaaaaagaatgcttattcagattagatcttggcacaatatcatagacactccacacacgatatcttatcaattagcacttgttctgttttaaaagaacaaaaagataaatatatccatgaataaagaggagagactcatcacaaacccggtaaacatattctactaatgaagaaaaatagcaaaatgccagaggttcaattcaatcacatttgattcatgttttacatatgactactatgctccaaacattatggtaaacactcttacaaaaatgagcgaatatgtaatactaagccaggaattcaaggaatgcaaaatccagctggagagacagactttcgcaactcactctgatgtaatgtgacagatactatagccattgtagggacactaacacagcgagaatagcaatgaatatttctgagggaaagtaaagaaatgtaaaaagtctggggacagacacccagaggacatgacatttgaatgccctttctagaatgagtaaattctcactaacgagtttaagtgggaaggattatccagtcataaaggaatgcacaatgcaaacacacagattcagaaaagagttggcagtttcaaaatatggcaagttagttaagattaaagaataaattatgtgaggaacagtggtaaaaagtggaaaatctttagggcactagattgtgtaccaggtttggacatgattatctgggcagtaagtcataaaaagtagttccagcaatgttgtagaaaatgccttaaaaaaacaggaagatcggatatgtgaacacttgttttggtttgggtttgggtgttttttttttgagacagaggctcactctgtcaccgaggctggagtgtaatggaataaacatagctcactgcagcctccaccttctggggtccaatgatcctgtcatcttagcctcccaagtagctggaaccacaagtgcatgccaccttgccctgttatttttattattattattattttttttttttttgtagagatgggagtctcactatgttgctcatgctggtcttgaactcctgacctcaagcaatcctcctgccccagcatcccaacgagctgggattacaggcgtgagccactgcacccagcctggacatttattagaagaatattttagtgatctaagttaaggatcatagggccaaaaactaagaaaaaacaattaagtggtagattttagaaactttttttaaacagaaaggggtgcaaccatatgaaggaaatatatagggaaacagagacagaaacttgagttc

SEQ ID NO: 57628 - DNA, 936 bp, Homo sapiens
attattcctattttacatatgaggaaactgaggcctatagaggttatgttgcctcaagtgccctgtaagttgaaaacctgggaatcaaatccaggcattcatgagagcttataatctgaaccattctgtttaaagccttcctgcataaacatgctaggctatttacatatgaaatatcttggctatcctaaacggttttttaaaattgtaaataggagcacttagcgatctcggtcatgctcagatgtttctacttcactgtgtaatttctttttttctgaataatcagatttttagaggttatggggactgattttaaagtagaaggtgtttattaaacttcattcagggaacttagtagaatcctgatttatttacacactggaaagtttcttatcatgcaccaaataaggtcactgcaaatgttggagtatttccattgtactcatcctctgactcccactctcagttttactgaactattaaaaaacttgaggacaagctgtttccagaaatgaacctttcaactcctctaaattaaaaagctgacttttctgagaacaaacagtatgtgcttattaagtgagttgtcagagtgagtacttgagagatctatatttttcctcctttgaacaatctatttttttaaatggtttaacctcttgacaactggtgtgctccatttccagcttggggagtttttaatattgctatttacttaatctgtccaaaggttcaccatctccttttactttaattttagcaagaggcatgatgaaatttaatttacctaggatgggccatacagtgttaatatttctactactgagtgccagcagagagctccctgggtactgataacttccattagagaagggggtgctgtcaggaaaacagagaccaagggctaaggtctgtggttcctggcagatggtt

SEQ ID NO: 57629 - DNA, 807 bp, Homo sapiens
ctcaaaatatctttccttaaaaaaaagtcttatttaaaaaaaaaaaaaactagaaacccatcagtcatgagtttatgagattttttttcacgtggatgaattactgcttcctcagattcaccatattcaaaactgaactaaatatcctgtcttgctcacacaggtcttgaggtcttccttgtttctcactaacatgaccaattattcaccaagccctataactctatatatcctcaacagcgctccctgctccacaacttccacctgtcactatcagtgatcagaaagttgcctcaccagatactgagctatgaataagtaagattggaatgaaaaccatcttgactacttggcatcactgtgggtagcctttctgagaggtgaaattgacttaggctcacgtgagtctcttccactggaagagtgaatgtaggatgaatagcccctattttccaaggcaagtgagttaactagaagctttgtgtttgaatttaaaagctttacctcacagtttgcatcctaaaaggtggctataaatgggaaccataacatttggagcttatgcccaggaggcccctcccccattatgtaacaattaattacaaaagcttaaatgtagtgcccctttccatttggaataggaaacactttaaccactagtcaagtattgagttgagtggtggccccaaagaagatatgtccacagcctaacctcagaaacctgtgatttgtgaatgtgaccttatggagaaaaagggtctttgacgatagaatttaattaaagatcttgagattagttccccctgg

SEQ ID NO: 57630 - DNA, 508 bp, Homo sapiens
catagaaagttggaagcctttggaaagaaagaaggcaacctggagaacatgagacttcagagtgttaggaaccaggaagcaagagaaaaagattaaaggaaaacagggcaggaaggtggcagaagataattcctagattgcataagagtctcgggctaacccctcagctggtatccatgttaagacatcaggaggtggcacagcataaggctaaagagcaagggctggggagtcagacacacttggatctgaatccccagtccactgggtggatgactttgggcaatttactccacctgcatgaatcacaatatcctccctcatctgtgagaaggaagaaatcatatgacctggagctgaggtaaggattgcctaacacagctatgcaaaatgctcggaaacacctggcacagagtaaatgcttgataatttcataaaagaataaaattatagagccccggaactggaaggcagcttactaaacctcaccaatgccaacatttgacag

SEQ ID NO: 57631 - DNA, 465 bp, Homo sapiens
gacctggaagcaacaagtcattttaccaagtaagatcacctatgaatgtgtgagcatgcatgcatgaatgtacgcagacacatgttccacagtggagatgatttcaggttgaccagtcattggtatgaagctgttgtttctagaacaagcttgtgttccctttcccaaagagcagaaaggaagcaatgtgaatgtctagcagaaggccttagtcagtgtttctgcagcatgtcattgtttgctaaccagcctcttcatctaacagattgctcaataagaggtcattgaaaagagcaagagctgacataaataaattggttgttctacttgaactatgtccagaaaaacaatttggaaaaagagatttatgatgagatatgtactcactactttcctatgtaagacaatacaaatattgggatatttggtcaaagacctgtgactctcttctacttttaatctatt

SEQ ID NO: 57632 - DNA, 1243 bp, Homo sapiens
agaaggggtgtaaacttctgtggaacgacactgacagtctaaagacattgctcagggaaaaagctaacagcataaatgttctcctcctttctccagtctccgtcagggctctctagctaactcaatctacaaacggaggacagacaagagagcccatgaatatagtccatacacatcagcctccacaggttaacaatagggtggtgaagggaagaaagtaagactggaagagcaaataggagatatcaaacatccattcatctgaatgctatttctgacaccttacagagcttcattttgataagatgagcatctggcattcactaaagatattttatccttttgttcatttggaaatgccatttgtttaagtaaataaatatattttgtatcactacataaaagatgtgtttggaagcttttcaagtaactgttctgtatattttagtccattttaattcccctgaaaaggacaacctcttctaggttataaatgcaacagctttcctgaattaattttgttacacaaatataattcttaccatactgttcttatctccctagtcacttttcattcttattttagaatatgtaaagtgcccttgctttgcaaacaccatgttcagactccaaactcatgcaaataaagaagaatttgtggtgcgaataggatttgctaattggacagatttattttcttcattccctgggaatgtgatctgtgaccctaatggcatgcaaatgtagcctaaattcagaggcagttgtggcatgagagagtgagttaacttattggtatgtaagactgctttcttatcaaacctgggaaaaccactcagctaggcagccaacaggctgatctcaacactgtgatttgcaaacacagtgacagtgaagtatcatataaggcttattactgaagatactggaaaattctatatacattatatgttttttagcagggatattggaataatttctcaatgcttcctaataaatattttgcgcattcacctcagtatttcattttatacctcatttttggataaagtctccttctacaaagaattttccttttctttgggaatttccttatgactaattccattcttgccttgaaaaattcatgttgaagacttctgctgatgagccatgtataagcttgaaaacagtttgaagactttaatagttttgtgttttgtttttttctttcttaactaaaagacaatagccaccatacagt

SEQ ID NO: 57633 - DNA, 876 bp, Homo sapiens
cccgctgctttccacccctcgtcggacagggcacacaggtaagcgggtgcaggagccagggtgagtgctactgggtgctggcaagagcaaactctgtgcatgctcagcggcagcactgcgggggtgcccacgacccttgaagccccagagggagtgttagagagctcttttcgctcttccctccatggacagcttaagcgttaacagctcagtgtaccctctgccttttcatgtgaggcagctgccttctgccaacaaaggcaaagggtcagtgtgacagtctttttgcatccacactcacagctcccgagctgttgtccagtgtccaggagaaatgagatcatgtgaacaaattgaaggatggtaaacgtgggggatattattgcagatgaaagtggctctcaatgtgaaggagagctgcaaaggggataaagtgggaaggtattcttcccccaaagtccagctatctcctgccggattcctctctgaagttaccagagaagctgtcaatctgtccctctgaagtcaagccacttttctccaacacccagcagtagtagccaacgtccagctgcttctcctctctctgccggctgggtttggggtttttacaggcacagaatggggcagggtgggtctatgggttgtgttggaaaaggcaacattcaagcaggaaaacagcgatgtaaactctcactttgggctgcagtctccggctttttggcttgagggtggggcccttaccagggacctgccctcttctgcccagaatttctttgccgcctgtccctatcactactgggctgcattcccaggagattagacattctaagtcacaggatgagataggaggttggcataaaatacaggtcatga

SEQ ID NO: 57634 - DNA, 1151 bp, Homo sapiens
caaagaaacactctttgtagaactcatgggaaaattactgggatttataataggccttttctatgaggaggtaagcctgcctacgaggcagacctgctattgaataaatgttattttaaatggagtgtggctgtattgtaactcagttcctccttctatggagaagagcatgaatgggtaggttagccaaaaaattaataggttttttctttttaaagcagtagatttcttcacaaagcctacctaattatgtgagtttttcctcaagaatgacatgcttcaatgctcattttctttcaactatttttttaaatgttatctaccccaggacttccaaccccctttctctaacaaatcagcatgtagcagagaagttctgaactaacacagctttgaatgtcaaatgtttaaatttgaatgttctgccttttcgataaaatgaatttaacagtgaccctccaaggattttccacttccagtcttacccagaacagccctcattaagcatgtagcactccacaaagagtaaatcatttatttggaatcagcccttatgagctagaaaaactacctttcagaaagccttcatttcaaaggacaattgccatattctgtaagcctattgatttttcttcactgttggaatgaagaatgtaaacagaattgcatatttactcattgccttttctgatacctttgctctgagagctcaacacttctgtcccacgtgtatgaaaggctgctctttccagagctggtccgtgtgagatgattaatgaatggccagacaaaattctgattaatgctccactattaagatttgcctttacttcaagagctttttataagttcatagttttgaccccacaaacctttctcccctcccccccccgcttggtaattgctaaagtttgacagccactgtgtttgctgcctgtaacatatggctaattgaatcagagttggggaaagaaccagtagattcctaattatgatccactccacagatctgaagcctgaataagcaggaaacaaggaaaaggctgcagagcctagaaaacctattatagcggtgattgtagcaggatgcaaacatttctaaaactgactgaatatcatttatttagaaagcgtagtttgctttctgtctt

SEQ ID NO: 57635 - DNA, 3713 bp, Homo sapiens
acagatcactataacaggtacaataatgaaaaagtttgaaagattgcaagaattaccaaaatgtgccacagagacatgtagtgagcaaatgctgttgaaaaacggtgctaggacttgcttaatgcagagttgccacaaaccttcaatttgtaagatgtgaaagatctgcaaacagcaataaagtgaatcgcagtaaaacaaagtgggcttgtacagcaaggaggttatacaaatatacttttgaaatcctacagccagtttgaatccaggctttggcagttattactatgactgggcaaactactgtgtttttaaacttcatttttcctatctgtaaaatggggattttttatagattgtgtgtgtgtgtgtatatatacacacacacacacacatatatatatatacacacatatatatatagttgttgtgaagatttaaaaatgtacaccgtcacaaggactccataaaataagctattattgtaatctattggagacagggcaagtaaaaatccacactgatgttaagtgaatctttaaaaacaagtaccagaaaaagacgagtttttattttataagatatgacctaaggggcctaggaagagaaaaaacttgttttgtcaagtctaaatccactcatatttcatggggccacgtatcacgtccaacctttgatatctggcacacaacaaacaaacaggaaaggcctttcgtgtgctttaataaaaacagctttccattttaaaacgataaatatattggaaaaatctgttggctctccaacagctcttataaaacaaagctcagacgctgtgtttttgttgtttgaaagagagaaatcaggggcttgggcattattaggctccctttgatcgcgccctgggatgggaagccttcgggcaaagccctgggggcaggacgcgtttttttttttttttttttttttttttaatcgatcccggaaccttcgcgcggcggagggggcgggcgcgccgcaggggcccgagggaggggtctggggcgcggcgccgcttgcccatcccccgagcgcgcggcggggcggccggccggcggccgccgggatgcggaggggcggcgacgggggccggaccctgccggggcggcggggcgggcaccgcccgagggggtagggcgcgcgcgggggcgcgccgggccggggaggcgcgctcgctccgcgctcccttcgctcgctcgttccctcctccctcggcagccgcggcggcagcaggagaaggcggcggcggcggctagggatcagacatggcggcggatctgaacctggagtggatctccctgccccggtcctggacttacgggatcaccaggggcggccgagtcttcttcatcaagtaaagagccggggacggcacgggggcccgcgggggcgggagggcaggaggcgggcggctggcgacacgggggagagcccgggtctgtgctcctgcagcccctcggctcgcccccgcgtcccctctcacgctccgtgtctgccccttctctcacccctgcagcgaggaggccaagagcaccacctggctgcaccccgtcaccggcgaggcggtggtcaccggacaccggcggcagagcacaggtaacgccgggcccaaacggagttgggctccgcctggaggaggcggcagagcccgggccgcccggctccccgcaacctgccccgcgccgcgggccccgggaggcggcgaggcggggcggaggccgggcgggagcggccgcaggtagaggggccacggggactccgccgccgggagttctctccagtctcggggcgcctctttctcctcagcctttcatcagcacttggagacggcgccctcttcctgcgccttctccccccatcccagcctagacgaccctcgcgaccctagagtggcgacgctcccctccctgaaacctggagtcctgagtttttcctccgcggccgctactcactccccggtgacccccagctgccgtcttgccccccagcaatcttcaggcagtccttacccactcccctccctgcagccccggaccccgatcgcccgccgggataacgtaaccacatcctccccctcctcccaggagcgctgcctcctgccgtgcagcttcctcctcctaggtgggacttgtgggtaggtggctgatgaaggaggaggaggaggaggagaggagttcgggggtgctgcgatcctctctgtgacagggaacggctcgggaaacgcttggcgcgttccctcctgccacgggaggagcagccggagccggaggaggcgttcgcagcctcagttgctggcgatccggatctaaagtccccgccagccgcacggaggttgcacagactgccaggaggcggtgggcgtgcgagggggtgtcccgtatgggggcacccgggccctgtttggagggagtccgtggggaagcggctctctcgggtggctttgggagcttgtttgaatgctaagtgtgagtggagctggaaaaggctcctcgtagtttctgtactggtctgggtttcttttatcattctttgtttacattcgtgacttgtttgtctttgaaatgtaacatgtgttctcttactggcctgcctctagtcctggtgattggaaaggcttgagagcagtttgggtcgaaggcgaggccagtttcagcagtcctcagagctggcctctggggtacattctctcggactctgacattccgtgaatctgttaaagttgccaggatattgaacaaacctgcctctctgtgaaatgctggagttcactgaagtgactaatgtctccaaatttgcaaaaaggtggaggaagaaaggaaaggctggtgtagcaagcatgatgagcttacatttttaaggcatttctgactaatacactatcatgtttctcaattccccggtgcaggcttttgcttcaatatacctttctggtgttttacacgcatattccaactttgatggcctctttgcttttatggataatgatagatttatttcatgaaagacgatatgacatttaaattatttagactaattatcctatggaattatgagtgatataaataagtgtcctagttaaccccacagatttggtaacattcacgccacagaaaaattttattcttttatgtgatttcacttttttttttttctggtttggttttactttgcttggactctggttttgtacacacatcggttgtttttacttccaagaggcattttgatgaaatccaaacaacttgtcattaataataatatgtagcacataatgaccattgttcacctgaatcatccccaactttactacttgaaacttcacgtctcttagtcaaatttttagaaacacacacggaagtattcggtgtcatttcttttccattaattaagtagttaggaagttctgccttctttttggtgacacttcctagatggattcatttgtgtagctgaaaaatacggtcttaaatagacacaatatacccaagaagaggcaggcgttgcctgttatacccagcttttttttttgctagtcattcatgagtgttccacctgggatgagaaggcttccctttgctttcttgggtgccagaacatagttcctctccaccctaatatattacagtgtgtgctcaggtcagataatctctaatattatggttacttttctggtggctctaaatttgaattgctgt

SEQ ID NO: 57636 - DNA, 1652 bp, Homo sapiens
acgtgaataactgaaaataagctcgaatttagtataccaaatttactttcttctatagaataatgccaactactttctaattagtagctagaagaaatggagtaagagtaaaaagtttagattgaaattgagtccagtctacattccctctggtcatgtttttttgaaactgacccaaagctctcaacctcttgttttttgctttcttccttttttagaataccatttatggttcgtatccaccccttgaagtcctatattctaactgagctttcatctataagcttttttgggcattgtatgcagaatttaatagcttcctatttattaagaaacattcctttctctttgggcagaatttatattttattccttctaaatgctttgttaaatcagaaggtcgaggaataacaatatgctgtttctgccctctggtggttgaaagagatgttgtaaataagtaattacaaagatgtgtgtcctatgactctaaccacctatggcattatagtttcttttattccacctgcatttattggttcactgatgtatcaagcatgtaatgagcatcttctatatgaatgtctttatcagtactctaaagtgccttgtctagtagcattctggccattagaaacaagttaacatatgtgaggtcttacaaatgaagttccaaaagcccgcttttgctatgtctagatctgactttttgcactccaggtttggattgcaaagtgttttcctatctaaatctaaaatttctagatacactgaacttaattggtagtacacatggtgaatgaaaactgaggaaatattgtgtcttagtcaacagtaagtatttaatatctcagtttctgtgagtcaggaattatgtaagtgacttagctgggtggttctggctcaggttctcttaggagattatagttaagatgttagtcttaattacagttaagatgcaggcttgtctggggctagaggaactgtttccaggttgatccaggttgttagcaggtggcttcagttcgtcagtcatggtgcttggctttacccctagttagtgatgcaagagaaagcaaagagaagccacaagggcttcagtgacctagctcagaggtcaagttttgccatttctgcaatatcctactggatataaaagtcagatctttttagtgtggaaggggaccagaatatagataagttctgtattcctatctgatgattttaaatggaacacttagagaagtaggaaaagaatggtaattgagatgaatgagtgtctctaccttactgaggtgtagaacccataaaggtaacatacaagaacatatttttatgaaaatgaaactagaccattttaatattttttaaatgtgatctgtttcaatttatgtttctttcccagttgggtgagaaacatttcttctgatagagtgcctagtaagtggtggctgaccaagcttcacagaaacgactacttgtttgctaagattctttgacaaattacttacatatttgtgtttttttcttcaagcaatgaaaaccatttttggtctgccacctgtcagaacattgccattctcatcaaggtcattatgaaaaatagaaaaaaatgaagtcaattgggtggtaaggaaagtgtggccacttca

SEQ ID NO: 57637 - DNA, 1129 bp, Homo sapiens
attaaaaatatctgaactcaataagaaaacagacaacccaattaaaatatgagcaaatgatttgaacagacactttgtcaaagaaaacacacagatggcaaatgaacatgcaaaaaaaatgcttaacacgtttgtctgtagggaattgcaaattaaataacagtgagatactactacacacccattaaaatggctaaaattcaaaaaactggccataccaactgctggcaagattgtgaatcaacaggagctcttattcattgtggttggaatgcaaaattggaagacattttggcagtctcttactgaagttaaacatagtcttaccatatgattctgcagtcatgctcctaggtatttccccaaatcagttgaaaacatgtccacacaaaaaccagcacttgaatgtctatagcagctttattcatagttgccaaaactggaagcaaccaagatgtttttcagtgggtgaatgaataaataaactgtggtatatccaaataatggaatattattcagcagtaagaagaaatgggctgtcaagctacaaaaatgacataaatgggtcttaaatgcatattgctaagtgaaagaaggcaatgtaaaaagtctacttactgtattattcccatacacgttctggaaatggcaaaactatagagtggaaagaccaggggtttagggggtgagaggaagggttgaataggtgaagcgcaggagagtttatggtggtgaaactattccgtatgacactgtaattatgttcatgcgacactgtctgtcaaaacccattgaagtttacaacacaaaaagtaaaacccgaccgtatgcaaaaaatccttggggatgtcaaaggagatcccaaggtagaatgcagactatgacaaaggagcctattacaaatgtatgacacaacctcactgaacggcatggggcaaaaaaggtgctcacctaattaactttggaagtgtatggagtctgtaagacgaaagacaaacaaaactacatactttatttcagtaaggtcatcaaaaacaagaaagtctggggaactatcatagccaagagaagcctaaggagacatgatgactaaatgtaatgtgatatcctacaacagaaaaagcactgg

SEQ ID NO: 57638 - DNA, 1306 bp, Homo sapiens
atttttcaagagaaagaagcacatagtctatcttagtaaattttcccaatgtctaatgttgcctccaatctagaagccatggtttatatttaacctaaatatatggatggttcataactttactccaagaaaaatagtcaccttttttttttaattttttttccttggtgaccatattccaaagcttctagatatcttcatctatagttgattacagatatatgtatatagatctacatcctttccacacgtcataaacattggcagcattaccacacctagtttctgatagaagcatttttatttattggaatatggagggttggctggctcctgagaggcctcctagagtggcatgatcttggcagtttcgtgcaggttcacacactcagcttgatcttttcagagtctggaagtgattaggctcagggaaagacctagatatggcaactagaatagtgagcaagtacaactgtcgagtgacctagacacatgctgttaacgagctcattctttcagtggccaggtggacatgggatgccagattctaacccaagattgcttgatgtgttggaattataatggtaaaataaggtctgtgccagccactcattaactcatctgattctcacaagaaccctctgatcttggtggcacaatcatacccatttaccaaagaggaagcataggcactttaagtgttctgtactttgcctgaagactcagctagtaagaacagagttgcaagctggacatgtgcagtcagactccaagagctctaaaatcatactgagttcctcttgaatacaaacaaaaggagttaattatatggttcagatctttgatagcatcagactatgatttcctgttgcagccatttccacaaccagactcatgtttgtctcatgagtcaacaagcagctaaccttggctgggagccatgtggctcctttcaagggactatctactgtggtcctttaagtgtagactttgtggtttaactgtcataaggcaatcttaatttgctttattttcagattcctaatggtgggagcacacatcactttttacgctctagttctttatgttttctttttccccctttctgtttatacattctggtgttgtgcttgaatgttaatatcacagcattgggtatttgtgtagacttgtccactgtgaccctttccagtcccctggcccccacccccgtaaagtataatttttcctagattgaatcccagaagtaatatgtacattatttcatctgatttactatgattttcttctctgatttcagagtgga

SEQ ID NO: 57639 - DNA, 1757 bp, Homo sapiens
aaaaaaaaaaaaaaactcatcacaggacctctggagccttggggcaggaaatcagagagaaggtaactagagactgagttcaagaaaattatgaaaattcttctcgctcacaaacccttgagatgtttctgtgtactgatttgaagaaagctgtcccagactatttggcctctaaaatatttgtaagtttattgatttgtgcatacttctcactttacccacaacaaggttttgttttgttttgttttttgagacggttttgttctgtcacccagtctggagtgcagtggcaccatattggctcactgcaacctttgactcccaggcccaagcgatcctcttacctcagccttccgagtagccgggactacaggcacacgtcaccacagctaattttcgtacttcttgtagagatgggtttcaccatgttgcccaggcaggtctcaaactcctgagctcaagcagcttctcacctcagcctcccaaagtgctgggattacaggcatgagccactgtgcctggcccaaaacagttttatatagatttagcatatggcagagagactcacttttgagcaactgtatgaatgtgtaaggaataaactgattcacttaatgcaggaacaaatgatttttttgttatgctaaagtaatttgggaggagttttcccagaactgtttctgaaaaatggatcaaatgcttcatggataggttgaaaataaatgtttaaagtgtatgattggtattttaaaagcagaaattttaaatgttttatttagttttaaaattatttacagtgaaaagtcaaccgaaaacaaagtaaaaggctgggtgaaaggcatggagaaaatatggcaggactagtttatgtaattcaagcctgagacaacacatttaagaacaggagatagaacccccagctatgtcccggcgctcagtgactcaccagcttactggaaagtccctcgagtcctctattaactagattcagaaaagcctacccaatctctttgagtgaaagctcactcattccagcccttccctagaaggagcttcaccttcattcttctggtgtaggaaacagtataggcgattattctagcttggcaggagggaccctccaccaactctgttgccaggaagcctgagttcctccagaacaccctgttgctgctatggggcctcattgtatattggggaggagcacagaggctggtgctaggctacctgagttggaactgagctctgccacttttactgtgtgttctcaggccaaggtattcatccttcctaaacctaagtttttccacgaaattggtccgtgtcttagtttgttttctgttgcttataacagaacacctaaaatggtatcttataaagaaaaggaatatattttttacagttctggagactgagaagtccaaggtcaagaggccgtgtctggcgagggctttgttgctggtgggtatgctacagagtcccagggaggctcagggcatcacacacaatgagaggcagagcgtgtcaccatgctgacaagctagctcaggcctgtcttccacgtacaaagctgacagttctccagtgataacccattcattcatcaacccacgaataaatgaatccctggcctcgagatgcagtcatctctctcaaaggcccctgccacattgagaattaaatttcgacatgagttttggagtggactgatactcaaaccataacagcctactaagagttattacactatatggttg

SEQ ID NO: 57640 - DNA, 1697 bp, Homo sapiens
tacaggcaagtaaagaaataagggagaaagtgaaaaaggaggaaaaataggggtatgactaaagctagcaaggaaaatagctgccatacatacttaagaaaggagggctggttgctttattttggctgaaggccaagttgatttatccagactgctgatagacttttattttatatttcacttattaaatattaagtttaggtttttctaccctaccttcccagggatttgatggataaagtactaactggtattgtgacttgtatgttacaataaacaatctgtcaatttcaatttttttaataatcgagagagttttgaacatcacatgaagttttttggcaagtcagatataaaatacacgaaaagacaaaaaatgtggcagctatgctattcacctttcacattttgcctatctttttatctgaagtttatagaaaaggcattttactaaattcaaagtgagaactactaatactacacctacatatgacctccttatggtggacgggtgtcagccaaagcagttaagtttcaaaatggctatactgatagactttaactcaaaaactataatcattatttggtcatgttttggttggattacaatctacagaatgggaaaacttgcatcagatttctagttctttccagctttaagatcctatcatttccatcatcctgtaagatgttatctctttttatgcatactttctttaaagtccaagtcactcagagaatgaggtcattatgctgctattgatcttgctcaccatggcaatatcaacacacagaacctaaataaaggagcctaaaataaaagtgcaaaatgtaacacagctgccaattttagagaatttttcagaagtatgtcatttgtagtatagtaggaatctcagctccagtctaagctgggtctgttgctgggctcaagcatgtctgggcatgtctggcaaactggcgaggcaggactacaagaaacctgctgccatgggggctgaagctgcttcctggaacagaactcattttagtggaagagagaattagagaagccctacaagaaagacttagtcattgaatggagagtaacaaatgcagcgtggggtagctgttactcaaatctgtcgccagtctaggcccatgaaagcatgtctggatccctaagagaaacagagctctgagtaaaaacataaagggctgtttcactaaaaaccatatgatattgggcacaagcagtctgcttcggggttcccctaacacaatgatctccatttcttctgactgtactatgactttggctgttttgtttgtatcccaaattttggcagggcatggtggctcatgcttgtaatcccagcactttgctaggccaagttgggcggatcgcttgaacttgggagttagaaaccagcctgggcaacatggcaaaatcccatctctacaaaaaatgcaaaaattagcccggcatgatggcatgcacctgtagtaccagctactcagggggctgatgtgggaggatggcttgaatccagaaggttgagtctacagtgagccatgattgcgtcactgcactccagcctgggcaacagagcaagaccctgtctcaagaaaacccagaagacaaagtaaacacacacacacaaatcctggtaggtgtctgcagtacctagaatagcagagcagaggaaggggtcctg

SEQ ID NO: 57641 - DNA, 1953 bp, Homo sapiens
ggtgtattaaaacctgtcgccctgtgttgcgcataaaaatttagtaccttacaccgtagtgttttaatttttgcccattttaaaccgctctcttcgtagactgtaggctcgttctattcctggctcagctcctgtacagaggggacactcctcaaacacccccggaatgaatgagtttatcgtgagaactcggaaggctgctaaaatccccggccagcgttggagttttcagtccgcgtgtccctgggcttcgaagcccggcagggcgtgggaaggccccgaggaaacgctgagcacttgcaggcgccggggcgggggcgggggcgggcactgggcagcggggcgggcgccgggcgggggcgggggcgcagaacccgcagccgggggaggtgctgcctcgtgccgccgcgcaggcgcgcagcagtctccgtgtgagtgcgcgtagtcgcgcgcctgtccccgcgcgggctccgtagcgcgtgtgcaggctgacgcagctcgcgggccctcctcctgctctgcagcggcgtcggcggagttttgggcgtttgggaggggggcgagggagagagagtcgagagagggaggcggcggtggggaggaggaggaggaggaggagcaggcgccgccatggccgccgctatcaccgacatggccgacctggaggagctctcccgcctgagccctctgccccccggcagcccgggttcggcggcgcggggccgggctgagccccccgaggaggaggaggaagaggaggaggaggaagaggaggcggaggccgaggcggtggcggcgctgctgctgaacggcggcagcggtgggggcggcggaggcggcggcggaggagtggggggcggcgaggcagagacgatgtcggagccgagccccgagagcgccagccaggccggggaggacgaagacgaggaggaggacgacgaggaggaggaagatgagagcagcagcagcggcgggggtgaggaggagagtagcgccgagagcctggtgggcagcagcggcgggagcagcagcgacgagacccgctcgttgagccccggcgccgccagcagcagcagcggggatggggacggcaaggagggcctggaggagcccaagggaccgcggggcagccagggcggcggcgggggcggcagcagtagcagcagcgtagtctccagcggcggcgacgagggctacgggactgggggaggcggaagcagcgcgacctccgggggccggcggggcagcttggagatgtcgtcggatggggaacccctgagccgcatggactcggaggacaggtcagtgctctgaagcgtttccccttcccttcctcctcttgaactcccgggcccctcagagggggaccaaggcgacgttttgccgcgatccccctgctccccgaatcctcggcccctcccccagactctcaactcggaaatctctcgccgtcgccgccgcgcccctctcgcagcgcatcgcggcttccaactctcaaaccgttcccccccaactctcctttccccgccctctttcccctcggcgcttcgctcctcacggacctcaggacggctctaactcggaaacagtccccaaacgggcccagatcctctggcggagcagaagagggccttgatgtacacacgtcggtactcaaggttagcttcttccaaccgtgttcgggaacacttgtcagaactacaattgacaagtgtttccaatatggctggtctcgcctggatttaacagaacttccttgtccatgggagagaccccagctatcacttttctctacttaaacaaaaaaaggactgttcttttatattaaatcattgcctcccaaatccctcatttgtagtcagtcatgtggtctccaacgtgattttaacaatcttttctatttgttttgggagcatatctgggaaaaagttttaaacacgtataaatggttgt

SEQ ID NO: 57642 - DNA, 2439 bp, Homo sapiens
tacctacgtgactggtgatggggaaactagcccaaaggctgctgttctgccctgctccccagtgagggaaaaacataaaataaatcactttttgaaaacattcaagacttactgaagagtaagatttgaaaatattagaattcattactggggaaattaattttttttaacagttcttaataaaatatgttacctattaaatcagttccaacttccttgggtatcgtggggggtacctgaacttactcatgaaggtggtggcctttctggctatgtattggtcttatagtagccatatatgttttctttctatgtgggatgttaaagtactagaatagcagtgctagaataaatttcccattttatctttgtgagaagtaataaaacaccaaaaacatccttaaaacactaaaatacacaaaaatatggtatgccattatggtatgtcatattcaaactggtagagaagtccagcctacacctatttccaaattgggggaaagtaggctcattaacatgggactgagccaacaattatttttttcctccagcatgatggatggcttattttgtgacattgtgtagattgtataggaacttagcaacataggagatatttcctgaaatagagaatgacatttggcatagagagttagttgatatttactgtttataacgaaatttgaacattagacatgtattccaagcagattgtacaaacaggaaataattgattttttttttttttgccagaaaagggaaaaagtgaaagtacagaaatgaatcatataacaaatatgtgtgtaccaggcacttcctgtggctgggaatatggactagcaggcctgcattggatacttgattatgaagattagaggttgagatacttctagaacgctgtttctggcgttgtttcatccatctcttggaaaaaatataaaactattagtttggtatcttaccttttaatcttctcccacccgtaattcaaaaaggtttcatgatacagcaagataacaatttaaaaaatgaatagaaataagagaggaaaaattttaaagtaaggcgcagctggagtgatctctacgaaatgcatgctcttaaattttatatgcttatcagaggttggccataaacttgctagctttgaactaatttatgaaggagtgcatgaggatgttggaagattcatagcatttataactgggtagtaagcatttagaattagctggacagtgggctaggggaatttgtttagccttcacatttagtccttacagttaatgtatgaaatgtgggttttactatttttgttttacaaatgagatacttgggtaacttgtccaagacatacagtcagcaacagttctgcttgactataaatccagaaatcttactaatgtgccactttgataaatagttaattgaatgtattttgcaaggctgtgttaaaagaataagcatctttgaaagtatattaatcagtgtcatacacattctaaccaagctttgctcatctctctgcatgctttgaaactatttccagttgttatgcaactgattgcctagggattgaaatgacttttagttgatgacaaacaagataaatatgttgcaaaatcattaaaaatacttcaccttcactgattccttctctactgctcttttttcctttatatagacctgagtttctcacctgtatcattatccttctctctgagaaacttcttttaatatttgttgcaaggcaagaccaccggcaacgcattccctcaaattttgtttgagaaggtctttatttctccctaatttttgaaggataatttcacaggatataggattctagattggtggggggtttttttccccctctctcaacgctttaagcatctcactctcttcttgcttacatgttttctgaaaaggatgatgttattcttatccttggtgctctgtagataaggtgagttttttcctctagctctttccaagatttttctttatctttgattttctgcagtttgaatatgaaatgcctacttgcaagttttttgcatttatcctgcttggtgttctctgagcttcctagatttgtggtttgttgtctgatattaattttaggaaattatcagttattattgcttcatatatttcctttgttcttctgtctctccttgtattcccattacatgtattttacacatttttaattaggttggtgcaaaagtaattgtggtttttgccattactttgaatgccactttgccattactttgaatcccacttcttggatattctgtttccttttccttttcccttttccattctccccctgcccctgccccactttctttttcttttcagttttggaagtttcttttgacatatcctcaagttcagagattttttcctcacctgtgtccagtctcctaatgaacc

SEQ ID NO: 57643 - DNA, 684 bp, Homo sapiens
catgattcaatcacctctcaccaaacccacctccaacattagggattattatttaacatgacagttgggtggggacacaaatccaaaccatgtcagtggtgattcatctagttaggtgaaggccctaagagcaaaaattgagaaagattttctgaagatgaaaactcaagactgcaacattaactcctgcctgagtctccagcctgtcagcctaccccacagatttgttaaaatataaactaagtcacattcaaatttgggtggacaatgaatcataagttgggcagttccagaccataggcagttcagggctccagaaaaggagaacaagggggagcttttatatggtgaatgtggaagcaaggcaaagcaatcattccagtggaaagtccctagctagaggtgaggtggtggtttctgacaggcctggactatgaccatttacatctagttgggtttcagtttgcttacataggaacccagggtgctggagctgccgtggtttaatggccttccaaaaattatttcaacagatttcaggattccaaggctccacaatcaaatgagtcaattacaaaaaaaaaaaaaaaaacaaaaaacaacaacaaaaaaactctttctctccctctttctggctgtccattatcttctgtttctcttgagtccctggatacattcacccta

SEQ ID NO: 57644 - DNA, 973 bp, Homo sapiens
gggtaaagactaaagtcattaccatggcctatgagccctgatgtgatttgggctctactcctgtttcatgagtactaacctctctctcttctttattctctgcctactgtaatgtgtggaataactgctgtaggaacagcacagatgaaactccaccagaggacatggagagatttggaaacaggaaaaaggccttactgccagtgtgcaaatatgaaataagagagatcacgagaaaatatatctgaggcttaaaagaagagaaaggtccagtatttcagctgcaaccaggaaacaaaggattcctccagggttaatgcccggtttggataccagctgtcatttcccattacagcttgaaaattttgcaagagcctgcctattactaagcttcatgacattcctctctggtcttcatgatagtctgcagagtcaagggctgatcacagctaaagtccaaagtcctttatgaattttcatcaaaattagatttccggaaactatgcctgctcacagtggcttttaggtatatgatagcagaaccagcaattcaatattctttatggagagttggaagtgaaccagcataattcaactgaaattagagagtgtaggggttaaggggtatctcccaaaggataggtgggtgaattgatgtattaattaattattaatattaattaataggtgctataataagtgaatgctgatggttcagtggcttaatagaatatgtttcttgctcacataaaatccaaatcgagtgtttgtggatggcattccaggcagtgattcagcaactcgagcttattccatcctgtcagtcttccgtctcctgcaaaccctagagtccagtaatttcagtgagcagatggggaaagaatgatgaggaaggcacaactgctgtttatctacttcagcctagaagtgactcactctggctcatgttccattggtgagaaccggtcatatg

SEQ ID NO: 57645 - DNA, 861 bp, Homo sapiens
ttgtaacaattctatttatacgtgtttgttttttccttttcactaaactaagatctttgagagcctcatgcagccttgagagtaggcactccgaaaaaagagaaggaaaaggaaaggaagaagaaagtagtggcagaaataaggcagagaggaggagctcatacaaaatatttggtgaataaataattggctacttttttggtgtgatatgcccaaaactctcagcttaaaaagtttactcatggaatcaattatagacttaaaggtagcttaaagagccattaaatagaaatagatcttttaaatagaaatattcaaaattaaaacgagtgaaaaaaaaagataaataatgacctaaggcacattcaaacaaagtctgaaagaatccaatgttctggatgcttatctgatttaaatgtgcagacttctcagagttctgtcattactcacaattacgctgacagtggagttcccaaacattgtctgaccaccatctggttcaacattttcaatcactccctggaatttcatttagtgcttccaggcattttggtcagatactcatttctgcaattccaatttcaaagaaattgcagaatctgaacagcaaatcattttaaaggaattttctcagggaaggctaggagaaagtatcatgccacttcttctcttcttttaaaactcatgtgataaatgcctcatttaatttagcattatcatgtaacttttttttgggcaatcatgtatgttgtgttctcagattcaccacaaataactcttggtttaatgccagtttagtggatgtttcatggcaaaaaaaaaaaaaggactattaaaatagagcctgctgatgaacatgca

SEQ ID NO: 57646 - DNA, 694 bp, Homo sapiens
aattggaaagacactggcttaaatgaattcaaattatttatgtatcctgattactgtttgaaaagaattatttatgagagaggctagatccttcatgtgtttatttattgaacagaacgtatttagaaagttctgtacaggtaaataggatgttagagtttgttaacatcttcactagaagtttcctgaaacaaatgttctctgttttgttttatttcgctctttctggcatttatgagatggcgttttgccatgatggtgtttgactagtgtgttttcagagtctgagctgggaaggcaacaattagagaaggaatgttggggcttgggagaaaagagagtcagctatagggtgaaatgtctgaagactgtttttctggaatcacatgtgccctttggagcaatgtgcaaccttgagtgaactgtgatttgggagaaaaggtgcatggccctagacctctcactgacctctgcttggcagttttaggctgctggcaagtgctctgcaggcagagcccacggagtactgttctcaagatgaagcccacaggcttttgtcttgatgctgcagtcagcactgaggggatgctggaagctgcacctgtggatcctgttgctggccctgcctgccttaactaaaggcatcagtaggaggaatttgctcttttatgtacaaataaatatgttcattaat

SEQ ID NO: 57647 - DNA, 3236 bp, Homo sapiens
caaacagcgtggcatatgaaaggggacttctgagaatgcttaggcatgagattcaaaccttgattaaaccctttggttgtaaatggtttttggtctttcaatgacttatgaatttctcgtcctctttcttgtttcatactctttgcagtcacattgtgtcacatagcatggaatggaatgattttattacaatgcttgttagtataattgattgtgctagacttaatgaacaatgctctcagtggatatttcaggttgatttatagtgctttttctttttaagcaaacatggaacaaagtccatggagcttcctctcattgctcataaacatggcctgcttaacatgtagtggaaagagcatataattggaactcaaaagacccaggcccaggatttatttattccactgggtcctaattgtgtggcattggctataccactctgccaatcagaaattcaacttccttttctgtaaactgtgaataacaattgcttgatctgttgtcttaagttaggctcacatggaagagttctttgtacactctaaaatgctttattatcctaacttcaaattaagagaagcatactattcatgcttcactgatgatcaagataaacttacacaataattttacattcttgataaaagtcacaatttttcaccctgcatacttaaaacaatttcctgtgagctgtaaaatttgagccatttaaggagttttgctattatactctatctggaagcactacaggattcttaaatttgcaagcagacacgcctcgtttcaaattctggctctaccactcattaggtataagactttgagcaaatgtcttaatcttgttggaagtctccattttccttggaaaggtgatcctagtacccacttgatgaagctgttatgagaattgagcgagctagattttcaaaagcactcagcacacagcatcagtgaaaggtggctgttttatgacactagggaggacaatgcataatatgaggaaggcagatgactgttgacacctgacccaggccatccagttattagaacccatctgaaccacttcatgggatgcagtggagacaggtaaggtcttagtaattggcagttaactatgttatcagttattacagatttttctcatgccaaatatatataaatcaacaaaaatattcttttgttggcaaagacagctttcaaaatgagcatgaatataatagaattgttttctgacttctttcaaaaggagtttgacaatgttttaccagtttagattttaaacttggtattatataatgtttaaaacctcagttttattcacaaattgctacatctgtggtcattcctaagtaaagttaacctagtgaggaaggtgttaatcattaaaaattgaaataagtggcaagtgatatcatgatcagagtatctcattcttatggtcaaaggttatctctcctcctccttgcccctgacacgctggagattttcataatactcaaacatttataaactaacccaatgtaatttttctcaaatatgtgtaatatttgctcatttggaaactttcaatcctctggctcttgtctttgttttcccatttgccagtcttttggagcatttaacagtcattagtgtgacatgacagggtggggaaaaaacataagagatcaaaattaaaatcagtctgacagtctcatacatcagcctgacaatgtgagtcaccacaggggctttgtaggaaaatgtaaaaactcccagactcttcgttcaaattctgcttctagttctggccataaaggagatattttacagggtgtatgttcgtttggcataggaggagaaataaatcagaggatggtctatttactagggagaggcaccctcccatgaagtcagtcttttccaggctaaaccatgggatttcctgaagtagaggagcagagaaccaagcaaaacaagagtaagatgggtggtgtaaaagcactctggaggagtagacagggaaaagcaggagaaaatccacagcgtagcacaactcacggtgccagcctaccatgcttcataactatgtgcaactccaacaagactgcatagaaaagagagagaggaaagagagagagagagatagagagagagacagaaatagagaccacagaagaggcactaacaagtccagaagaaaatggatccaggataatgcaagacacacaaatcagcaacataaccttaaaaatataatggtgcagcagcagcattgctggaaatggagagggctaggaacagactgagattcacatttaaccatctaggattaaaaggtgatcctgagcatgctatggaaggatgtgtcagtggtcaaaggttaggtcgtattcattagaaggcacttggaagtagttgtaatgtttaaattaaatgtttagtaaattcacatattgctttttttccctataatgtatacttaagtaataataagaaagtcttttattcaaattttagtctaaggatgagtgaatatatcaaaaatagggaaacagtagtgtatccattttctagttttctgcacctactttctgttgcagtgttttttcagtgtaaggtattcaaataatatttgttgaattgaactaaattgaaggagaaatttctgagctttgtcgttttacctctttggcatctgtataagttttaatttcattctcagatgcctactggctcactcagtgttagggtcttctgggtcagatgctccttgtgggaagttacgtagtttggaagcctggaatgtgttgtttatgctaatgaacacacagctatcttctcctctacgatgagattgtcattcaactgtcaaacagtgcttatcccagggctgctttttatgtatttaaagtctaaagagatatcctaagctcctctataaggactcctgagatgtaattatgagtcagttaaatttgtttttttgttttaaatcatatttccccatattttatttatctaagaccaagcacaatgttttctttattccctatctcttagatagagttcacttgcttgccaacaataagtcatcagagcccagtaaacaatatccgtatttagcttcctctcattagtttgtctgttttctatcagtcaaagaggtgtcatgttgcagacagatcaacattgctacaagattctttttacctttgattgctaagaggggtagaatagggtaattcagcaga

SEQ ID NO: 57648 - DNA, 505 bp, Homo sapiens
atggcactcagtattgcgtcctttgatattatgatccaaaccctttcgcttcataaaaaactgtgaaacagctttttctgtgcattaaaaaaaagtttcaaggtggagtttcttacattaagagaatctttttaaagaaaatgtgtggtggagaaattttcgaggaggacatctttatctaatcatttctagtaagcaaactttctctactaggtcaagatctaagcaaacacacaaatgtgaacaacagggaaagaacccattgacctaccaagacaggctgccaacagaattttgaaggcttgccaagatgcttttatggaggtagagtgaatgagattccgtaagtgcaaaataatccttttaagactacccagaaagtaatataagtgaactagttatataagattcagtgaggactaccaaaacattgggaagaaatgtggattttatcattcaaggaaatataattttattgtaagatataatctttgtttttgtagtc

SEQ ID NO: 57649 - DNA, 840 bp, Homo sapiens
tgaaagtttaaacagtcagattgctaacttgtgccaggggctgtctgtgttccattactgtcaaaatgggctcctcattgtcaatcaggtaatgaatgatcagctcccaaattccatcttatcaattgcttgttgggccattgctagtaccaatgatcacaggttgctgtctctagaagcagacactgagacagagagttcaaagggcaagttgtttatcaataaccatcagctgcgatgggaaggaatttggcaaaggaaaaagtcaaaccacaatgcagagctgacaaaaccttaatcctgcaaggagctcttgaatgaatatagccaatcagagtgtcccatgtttgggccaaaatagcgggcctttctactcctgcctcactcagtcaccagttgcagcctgctcctgagaaaggcatgactttagatgaggaagtctctttcgctgcgtccaattgggaaggaggtgacagctgtaggctgttgctcaccactctcccttcagctggtcagtaagtccttgaaaagaattctggttctttgtacttgtttctactgcagttgtgctggggcacagaggagaaaggaatgtttggtgaagatggtacagataagatttgtttttcatgaattcaaagttcaagagggtaatatcaaggacctgggaaaaggaacggagtgaaaatttgagtcagaaaaagaaaatccagaacattatgggtgttagaacacaggagaagatagaagttttccgtttggaagatgatgagaaaagtagaaataaggggtatcgttcacttacacatttctaagccatttggccccatgattttaatt

SEQ ID NO: 57650 - DNA, 592 bp, Homo sapiens
gaaagtcctggagatggatgaaatagggaaagaaggtaggacaaacagttcctacttcttagaacttgagagactatatctaaaagaatattccagaacagggaagtgttataaataataccaacttgtgccaaaaaatattactcatcttagatctcccttttggggattttggatcaataagaaaccacgtttcaatggaagtggtgcagagcccgttgcctagtgtgaagagccaatgaactaagtcagcaggttaaaacctgaccccctggcccatttatttttctgtctttgcactcttgaaaagcatgttccctagagatctatccaaatagtcactggagtcctgaggccccaccctttgtccagtacactgaaccgtgttatgcaacatggaaattgttcccattccaatgcctgacagccagactcttggaagacaagcaaagaaacaggatgcttctacggagcacaaacacttagcactgacagctacaatctgtgaatgaaactattttttatatgagcaaataattttttaaaaatccaaatattatgaagcatataaacaaaggttctaataattaag

SEQ ID NO: 57651 - DNA, 472 bp, Homo sapiens
gaacccttgatatcttgaagatattattctttacctaagtttactacagatattttaccaatgtgacatttgtgcaaatactctaaagttttatatagccagatcaatttgtcctcttttgtaataaaaaaaaaaagtctttaaaaaaagatttacggacaggattgacagattgatagctctttctcgattccgtgggtggtggtgcatggccgttcttagttggtggagcgatttgtctggttaattccgataacgaacgagactctggcatgctaactagttacgcgacccccgagcgggtctgcgcctgccacctgtgcgggggccggcaggaccccgacaagcagctcatgtgcgatgagtgcgacatggccttccacatctactgcctggacccgcccctcagcagtgttcccagcgaggacgagtggtactgccctgagtgccggaatgatgccagcgaggtggt

SEQ ID NO: 57652 - DNA, 893 bp, Homo sapiens
ttatttcactgaaactgcgaatggttaagaaggttaatttcctctcagtaatgcatcttctgtatttacatattttaagcatctgatgcctgctgaactctgcccccagatactggttaacgtttaaaacaatagcagatcctgttcctgctaaaaccttcacaacctaagagaaagtaaacacatgagaaaattttaactattatttccatgtcagaatgacaagaagaaacaaaaatgggaggagaaaataatatccttctgtcctgaagttactccacgacaccagggctttggctgtatgtgccaacattgccactattttttttatgatgattcattcctcccatttaatgctgtggagacaccccaaccacactggcttcagatgttggtatgtggaggaggccagcccggtgacctgagcaggcacgtggttgttactgagtttgtaagagtccaggtgaagttcaacagttgcaattttgcattttaaagacatttgtttagttacttaactctcattctttctcaggtgccctcgctaaaatttcacctctttcatcgccctgctcctcacctctccaagggactcctgccagcagcctggtcagcaaaatttctgcagtgcagtttccagaatctgctgacacaactgccaaacaaagcctaggttctcacagggccttaacttacactcagagtgccccagacctatcccctcaaatcctgactccacctgttatatgtagcaggtaaggattttttatgaactgaagtttaataataaaaacgatgatagttttcccctagaaatacctaccaccagcccacgcagcttggggtaggtttgccaaagtattagacaaccaagtataggataatgtgatttg

SEQ ID NO: 57653 - DNA, 601 bp, Homo sapiens
tgagggtatgttcacaattctgaatccacaggttgccagagaaaaatgagcaggtaggtaaatagtcaagtatgtatgcatcttgcacttagtaaactgacactttaaacaagataaagtgaacatagagtacctactcctggagatatttaacctttatacctgtagctacctgcttaggaacaaaagaaaaagccgcttttggtgactcagcttcattttgtttcttttggcatagtaaattggggtcccaagtatttatttcctttcacagaattcacttgcaataatgttaaacaaggttccttttaactttgtccagggaacatagagtttgtttgttttctgagctatctggtaaagtctattgtgatgaaatatttgaataatatttcagcagaatggcaatcataaggaaaaagtattggctaatgcaagtgaattatcttctattgtctaagggtaatattaggcttaattatttttacttttaaatactgagtgttacagtgatttcactttcatgtgcatagcaaagtgacaacaaactggtggaagaaataagatttccagaataatcccttaaagcatatttggaata

SEQ ID NO: 57654 - DNA, 1061 bp, Homo sapiens
acttcaatttgtaatgaaattctaatgctttcaattcacccacagcatggcttttgacctggtatttcatgatacccttgtagggcataagaaaaatatgtgtaaataattcattccttttttcacttattagacagttatttagacaggatatgatgttcgatgaagaatatttcctagtaagtaaaaccaataaggtacttgttttctcacagcttagaaaatgacaagactgatgtgagacaaataagtataaaaataaacacataattacaaattgctgtttgtcttaataaggaaaaagactgccaattaaaggaataaaaagagaaactaaatttaggattaaagtaaggggatgtgaggggaaagactcccagagtacatctcaaaagaagtgacattatatctaaagatgtaaagaaaaagccaaatgaagggctttcagggagagggtctaggtgctgtttccttaagacaggaaagagctagaatttttgaggaatgaaaagaagccagtttattggaacacactgagtgagaggggtatggcagatgatgtttggagagttgaggggaagcagataatgtgtgccctactggccaaaataagcacacaatcacctaaaacgggaaacatgtaaagacatgcatgtagatcttaaaaatatacatgataagtagagtgacctggggtaacacctaattgtacttttaaaacctactagttgatcggaagttcatggccagccaacagcatgacatggtagaaaaaaaaaaagcaaccaacaatgtgttttaacttttgttaatatgaatataaacctgtaaactaagtcagtttacagttgttaaattttcaccctgcctgcaaattttcttaaattcataccataaatattccacaagtatagcttcatcttaatataaaatgtcaattcagaaggagaagccttctgtatttccaaattacagattcattaacttataaaaattcacttcataatttcatactagtttgcctctcaacatgttttagcttcttaattgaaaccttttca

SEQ ID NO: 57655 - DNA, 2813 bp, Homo sapiens
ttggagcctgacggttccctcttgaggtgtgcctgtggtacacacctgagaactctggggctaaaacctattggacataggttttacagatctacaggatacagatctcagagattttatttgtattcatttaatataaattaactgctctaaaatttataatatgcaaatatcatacaattaatctaattaggtgttgaatctataatgtgccaggcattatgtaaggcactttacatacactaaatctttattccaaatatagacttcttactttatagatgagtgcactgatgctcagaaatggtaaataacctactgatgtttatactgctggcaggtagcagagacatatcggcatttaagtctttcagacttcaaaggccatgatatttcatcagagctgtgatagccgttcctgaaaaaaatatcagctgattctttaaatcaatttttgtcatctaactgatgcgtggctgttagcataatattgatcttgaaagatgttttgcaacatctttcccctggtgtactcttgtttttccatgatcccacaaaatgagcagtctaattatttacacaattaggaagagaaaaggggcacagagaatgctctttgacctctgaaaatattggagaattttacaactggcacctttagctcaggattataaaggttgttagttagtttgtactgttttatcttcattgtatataatatatatattagtctccaaacatgttgatgtgttttcaatgaaatggatgtctgaggagaaaaccattagcctgagaaaacccaaactgtattcccattgtgaataaaaggaagtccataaaaatgatggaaaatgttctgcattcctgttatgatatcaaaatctggcagtacatgaaaatttttcaaagtgcttatttaacaggcataatctttggtctcctgagccagaatctgctgggtatgggactggattgctattttgacaactcgccagtagattcttactcagcagagtatttggaagccttactctaatattttggccttgggtctacatttctcagttctgcacagtcattcttcccctctacactactctttagtttgtctcatgattccaatactctcaataattaaccaagaatagaactaatcaatcagataactgtggcacagacatcaaatacattttgctgcaaccatatcaacaaatgtcccatgaatgataaggggtaaccatattctcatatatgcatcctcacattaccacatatatatatgtgcatatgtgtatacaggtaaaagtgtgtatatatgtatacatgtatgtttgtgtgtatatacatacatatatcttcacacttttctgaaatatatatatttatgtgagagaagggtctgtactttatttcagaagagagcttaatgtccaaggtataattgagagtctaaaatgtttgagttattgaattaattaaacttcatctctactcaagaaaacttttaactgagttaagctcttcctttctccacaagtcaagtcaataaaaggaaactgtgatattaataattctttcctgttttgatgtaaagaatctatcgcataaagcagtcttaattttcatcattcagaaaaatggtcttgcagttaattgggactctcttattccaggtggtatctccagtctccatacataccacgttagaaccatacttatgtaccaagcaaagagggtatattttaatttttaaatgccaatgtaacctgtaggcatattttttatttgtcttaaattatttcctatttggaagttttaaatacctggaataatttattgtactcatatttttaaagaaaaaaatcttatgccaccaacttaattgaataaacaagtaaaagccattcccaaaagtaaggtttacttgttaagattaacaaaaaataatgtgagaattctgagaaatataatctttaaatattggcaactggagtgaactcttaaaactaactaggttttatatgtttgactagagcaatgacataataaggtggttaatcatcactggacttgttttcaaaaagccaactactttaagaggaataaagggtggacttgttgcagttgctgtaggattctaaatccaggtaagaaccattgagattctctaatttttacatatattttatgtaagaaattttcacggaagaagattttgatggtcttgaaaaatattacgaattttatgctctgtgtcttccacacgcttacattctgagcccttaaaacatagtaaatattccttctgggagtagaagagcctcaggtttatatactgttaaaaataaagtagagaaaataatacctttatatatttaaatataaagtttcaaatcttggtcttattaatttccaaacaaataaaaatcaagtctcaaaaatgaagctctagttaccttcttaaaatatgctacaggataattatttttgtcaactacattgactgatcacactagactccttatttctttgatgtcttcttaactggatgaaggcagccaagggtgggagtagagggaagagttaattggcaaacataaaaaacaggtgtctcaaagtcacataaccacctcagtttccttgtttcaactcaagtttgatacagggtgaagggaaatatattttctagataatttatctccaattaaataagcaaaaagtcttctcagtacagtttttttctttttttatttcattattattatactttaagttttagggtacatgtgcacaacatgcaggtttgttacata

SEQ ID NO: 57656 - DNA, 942 bp, Homo sapiens
tgaagtcacatttacttagttatgatagtttcttttttatagtaattgcacaggggaagagctaaaggatagaactctgtcattgtgaaccctgaaagctcagaaaaaggggagggaaatgagcctcaaggtgatgaccagtaaccaataaatcacgtcactctgccctttgacaaacatttctttatccatggctccctcagtcccctgaatgcgaaattgctttgaggagattgttaactagtactgcagaaatactgaggggattacctgtagaagggaatgctcaaggctagtcagcctttcctcctttgctcagctgctctgattcagagctactctgattttactctggaggacacatgcaaccaatgtctgaacagtcatactcaatccctgcattgaggtagaaagcactgattcctagaggctgatctgaatcatgcaactgtattgaaggcaacaaaaaataataaaatagccatgtattttaatagggaaagtatatagtaattgaaaagaaaaaccaaaatcaatacaagtagtattgtgaccgagagacaaaggtaaatttgaagataggtttgtgatttcataatggagacctttgaatgctagaagctaccccctccctttgtaaagaacaacattaggtaaatgattaaaaaattatgtcaaagtctatgattttgaaactctaccatatttgaaaatattatattaaaataatgatactaaacaaagaatttatgacaaatgttcatcttttaagtaaaagaaccttaaaatttgtaagcagctaaatctaatgatataggcaactgctaggatatcacaaaagaatgggattttaatagtgaacttatacaatttgcctgaaattaatcaaatcagcacagaaatgcacagatgacaaacactgtaagatgtaagaggaattaa

SEQ ID NO: 57657 - DNA, 746 bp, Homo sapiens
gtgaaattagattgatttttattttaatagttttcttacatatatttctgggtttttttaataagcatatactgcgtaacttaaaatctcttgttacttagtgttataaatgaggaactagagattcagatatattaatttgctcacagcaacaacacagcctgtattccaacccagtttgtcagtctctaaagccctggctcttaaccatcacactgtaataacatggtgcctaaatgtgtacaaggcactatggggaggcactgagtaaataagaagttagcagcttggaagccaatagataagaaatatagacaaatacgtgacatggcaaaatgtgttttgtaacctgagaggtacaagcatggaggtcacaaagttcaatgtttgcttggaataaaaaacaagtcagttgtcctgttttactagtgcagtttctccaagtgtggtctatagtccacctgcaacatattcctaaacagacctgttaaagaaaaatctccatgcagctcaagaaagttcaaattacctccaggagcatcatacatttggtgccttgcattttttttagatgccttataatacttataaatactactagtaaaattttaggacaggcgcagtggcttgtgcctgtaatcccaacactttgggaggccaaggcgggtggatcacctgaggtcaggagttcgagacaagcctggccaaaatggtgaaactccatctctactaaaaaatacaaaaaa

SEQ ID NO: 57658 - DNA, 1854 bp, Homo sapiens
atttagcaatttcttaaaaacaattgaccacgaaaaaaattcacagtaaaaccgagactgggaatatttcattcaaccctcacacatgctgctattgactggaaatttaagaaatgttcatttgttttgacaaaatggaaagcaactgtacattcttcctggaaactttagctgaggtcaaagttgtaaatgaaaaggatgattttttagagaacaattcagtagtattgttttgccttgtcatgaagaatttttgtgcttccacaaacaaaaatcttggattgttaggtgaacggtggcaatcaagtggttttcagaagactcaagtttcttcatctacaaaaatgacaggagtggggtcaggatgttcccgaaggctccttctactcataagagcataaaatctgtgcctctaatttctcgcagaaacaaataatgagaacttcacaccaattcatttattatatgaatgttttgtcccgtgagaacactggtctatctttagatatgtaatttatcaaacttctttgggcaacccatcttctttacttttttatttttaattttttggttttctctttgtcaaattttcatggaataactacattcaggtgtagtaatagtaacgcaaagctctgaacaccacgagacaattcgttgcttccgaaacgcagccggcagcaggtactcgagatgagtagtgtgagctcccgagcacccgtaggtcggattatctggtaaggcaccggaagtgaccgcctcgcggctgcttcctctcctggagtccagagtcccgttgctccgccgcgatattcagtaaaccactgggagtccggcagcatggaggcagcgcgccctcccccgacggcagggaagttcgtggtggtcggcggcggcatcgcgggcgtcacttgtgcggagcaggtagggcggtgctcaggcggttccgcctctttccccgaccccaaaggggatagcactggaggccttcctcccaccccctccctttttcttcttccgggttccttttttgctgcgcccttttccgcacttattgctcccagattttagaaactgcttggtggtcctcagatgacctcactagctttctcttaggcgcagggaggagtgggaggcaaattatagccgagaaaccaaagctggctgatccgtgctcagatccttgtaatgtcagagcagacatgaggactttgtatttagacaaaaaattcagccccctttctttttatttttttttctttttctttgagacggagtctcactctgtcgcccagactggagggcagtggtgcgatcttggcttaatgcaagctttgcctcccgggttcaagcgattcttctgttgcgtcagcctgtagctgggattacaggcgccagccaccacgccccgctaatgtttgtatttttagtagagacgggctttcaccatgttggccaggctggtctcgaactcctgggctcaagcagtctgcccgcttccgcctaccgaagtgctggcattacaggcctgagccacagcacccggccctcagccccctttgttaattatcgtaggtgattgagtttagtttccagatagttgccaagtctttagtgcatcttaactaattaataaagaatcccatatgtaagttttctatacttcgaactcccaagatagaagaaactttatttctagtaaagttttgtaaaataatcagcgaaggattaaatgcatgtagggcttgctttcttgattatactgaatagccagaccatatatattcagatacatgtgtgtattccaaaaagttctacattattttgttgatataaagtaaacatgagcaatca

SEQ ID NO: 57659 - DNA, 1953 bp, Homo sapiens
tccatagactgtaaggtcctttagcagggctggggttcaatctcttcacctttgtatccgcacagcccaggaaaatgccttgatgtagtgagggctcaggtttgctaaggtagcaggggctgtttctacccttatgaaaagacacagtctatatccaattctcccccacgattttaaatgactcctttgattatgcggttaaaagactgctccttcccaaaatgatgtgatttaacagcaaaagatatctcaacataaaatgtatccagaaattgaactacagcaggtctgtcactcagcagtataagctaggcatccacaggaagaatgttacagggtgacagccagtcatcaatgttggaggaaacgccactgagataccataggctaaatcctctctctccccgccacctgcatttagaggcaatagtaatttaatattaataacgcccgcccttccgctactgtgaagcagggggtggaagaagcatccccagtagtatttaccaacaaatggcagctgctaataaacaggctttggtggccaatcctcctgcatggaaaagaatggggagatcagaagaccggtcagcaggcgaacgtgcccctaaaggcccgagttctcagagcagggcagtgattaactttccggtttctcctccgccaatgtgtgggcgaaaggaagtgatccgctacagaccggcctcgccctgcagcaggaaagggaaggatgaaacaaaaagcgcacacccttgacccttcaaagctgtaacagtagttatcccagagcctctccccaccgagaagcccggtctaactctccggtgtttgactgtccggtgtccgactgtcctgtgtccgactctccgatctccgactctcggatctccgacaccaaagcacccaggcctcgagcagatctttccgctactcgggagtaaaatcttcccgccagccagctgagagcatccacccttccgggtcggtccgttcagccaatcacagataactcccttctctaattggtcaaggggtgtggtcaccatgcgcgtcaccgaacaacattacgagttattggttgagattggaagcaggtttcgccaataggaagcgctcttaaagcggcagtgagggtggctgcgtgtttccggaagacgtggcggctctcgcctgggctgtttcccggcttcatttctcccgactcagcttcccaccctgggctttccgaggtgctgtcgccgctgtccccaccactgcagccatgatctccttaacggacacgcagagtaagcacctgctccggggcccccgcctcgagccgcgcacacccatcgcccggctgggtctcgcccctccgccggggtcaatgaatgaagctctgggttgggggcggtggcctgcgagacagagctagggctgctgggaccctaaggggctgccttcgggatgccggggctagacttggactggcggacctgacctgggagaagagtctgtggggcagggtgggacgccctatgttgggaggggagctttagcccagagtctgtctcattccagggtcgcgctgatctcctcatccccagtgagatgggcgctttgttctaggggcttgccacaagagaaagtttgcgtggtgcccgcggcccactctcgggatcgtttatgcgcatgacacacttcgggtcctctacaagtccctggctggctggttatttgggaggcggtattttaaatgtcacctacagtaggctctttttgaaaatgtccttacgcttaaatgtggcattttgaatattcgctttttgccagtactgtaagcaaccttttagaagtctcttgaaacattctcacttttctacctgctaaagtttcaagcagtagagaaaagccactttgtgtgccattaaaggatatatttcgttagtattgtatattgtgctttgtggcttg

SEQ ID NO: 57660 - DNA, 1493 bp, Homo sapiens
aacagaatattgcgagaagtaagggggtttataattgtccaggcgtcaaggaaggaagcagaagatcctattggcacagaaatgaccctttctggttgatcgcttcatatagggactcagaagtctggcagcaacaaccttggctcttttcctggtgtttgttttcctgggaaactccagctgcgctccgcaggtaatcaaatgcaaaataaaaaattttaaaacaatgcgcactgtgtgtccactctgctctttctttcttccttcttgttttattctcttctttttcctttattttgctgtaatagaggactgagctgcaatgttttattaactgctcttcccttcccccgggctatagagactgttggagagaaggaactggactcctcaagctatgctctacctgaaaggggcacgtaagttccaaatatttcgctcttcctacaataatggaagacccctaggagtcaggaacagatagatggagagttatggagagagaataatgtcgagtttattcccttaaatcatcgaggccatcaaagagaccggtaggtgagggaggggtgggagaggggaagagtccctgattattggaaatcctccatccttattagaaattctccatccaaaactggagggttgcttctcttggtccaaatggggactcgggttgcctgggaaatatctcagtaacccgacctccgctccaaagcgcccttgcggcgtccggtcaggcgcggggctttcctccagagctccagggcccctggctcagcccggggttgcgctgggagcgctggaaactcggcagccccgcgcgaccctatcctggagcaacctgccccctccccacgcccggggactgcgctgtgccgggaggagctgaggtttaagcccgggttgtcccgggccaggctgtcgctgagccccaggtctcgtttttgcagagggtcgccgcttcatctccgaccagagccggagaaaggacctctccgaccggccactgccgggtgagtgaccaagggtgcaagggcgctagtcctgcgcttttggaataggatggggcgggcagggcttgctccgcgctggtgccgaaagaaagcgtctcctcaccggaaagacgcggctctgaggcgccctcagatacagtccgcccgagggcagcccgggttggcagcagcagcagctggatgccgagcgccggagctgggagctcgcgcgtccagccccgcgccaatggtggcaagggcggcccaggctggcgctgcggctccccaagccttattggcttgcggctgttcagccagccctctggctgccagggtgtgcagaggtccccagggagttaggacctgaggtgcagctcagaggggtaaggcgagataggaagaactatgcaaatgcttctagaaatgtatctgcgcgtttgtgcaggaactttactcagcctcctcttaaacgctgttattattaaaataagaacttac

SEQ ID NO: 57661 - DNA, 672 bp, Homo sapiens
aaagccgtggtggtttgttctcctctctccattctgtagaagtgtctatgctgcatatttaactttccctcaggttccaaggcttaggttgaaggataaggagttagagtgctcatttttgctctcacactaaactatatcctccagtccagctttgacatgcaataaaccttatatttggttatctaattgctcttgtctttttatctatttgttcccaacttgagcagggaagagggggctgtgtaacagaccactcttacatgccttaagcatgagttattcaactgaaatggaactaagggacagggaagatgttctaggaatgccatctagattaaatcatgctagaggacttcgtgcaaacctccctcctctctcagctagagaccatcacctcctaacatacttgcctgcttctttctgtcccactggggtctctattcaacacaactagattgatcctttaaaaatgtcagtcattcccttgctcaaagttgttcagtggcttcccattttactcagagtaaaagccaaagtgtttaccatggcttctaagcagtggtatgctggtaaatatttaagaactgagacactgaagtataaatatatattaatacttaaatttgttgtaatttttaatgagataaatgatgtatatacagttaccaa

SEQ ID NO: 57662 - DNA, 1942 bp, Homo sapiens
attacattctttgaaattacaggtatcttttttatagtctcttctattattttactacttgccaattcagcttaagttgacatctccagagctgaggcaacagaacaccatggccagcacaaagagcttaaaatttttttgcttcatgatgattggaacaggatagagagcagagagggggagtagatgaaggtataggtgtaacaagacgggaattcgttgatcattgttgaatctgaactatgagtatacagggagtcatattactaagctttttacttgacatgttcttagaatttcacaatagaaagttaaaaaatgtttgactcatctttaaagatttctacagggccttgttccttcaatggtagctcattccaaaatttgtataacacctataatgttataaccattacgataacctaaaatagtagcacgatgaaaagagagtcaagtattatttgtctgtaataatcttaaggaaaaaacaaagttcaaggcgatacatgagatgtcattcacttaaaagaaatcttttcacatttattgctagagaacattcacaggttgtgagattaccacagctgttttcgcactgcttgtcctttcagggtttccacgttgaaattatttgtcttggcaggcataatgaaaaacaccatcactgtgatgtcacttttatgcatctgatgaggaattagaaaacacagagtcaactatcaaagatttttaaaaagtatgatagatggaacttaaacattgaaaagtagagttttaaaatatcagtagataaaaggtatagttatttatgtttcacagagagattatattcaccttcctgagactttttcagaaattttaattaaaatcaaaataaattttaaattttcagtctgtacttgccaataaacaaattgactttcaatcagtatttgtcagttaacaatttgaaaattcaaacaaaatattttcgtgcctttgaccatctagaatagataacaattgctattgatgacactgtgcttttctgtggttaaaaaaatagcatgaatgagagctaatattacaagaccaaaattagttctttaaaatttcagattggaagtttaatgaagatttaagctttggtaaaagctaaaataatatttcaatttttttgcttattcatgttgattgatgacagatagattatttttacttttccgctaaatgtcttgattctcatgatgttgtattttggtttttagccctaaagcaaagaaacaagcacatgacgagcacttttgggatagcagacactgtgctgggtgctttaaatatactactaataatcatgtacaataggcatttctctcctcattttattaatgtcaaaagaaaggaatgagaggttaaatattttctctgagtcctataacaggttagtgccaaagctgacatttaaactgctggcttagcatctctcaaaaggaaatgacttgttaagaagctgtaagaatgaaagcataaactcacttaaaatcatgaacctctatgaaggtttatgtgttctggaaatgactgactagctccagagtgtggggcactttaccgtctagtatgcagcctcggccctctagggcctgacattttattagggaaagctactgaaggcatacaataggaaactcaccctaggaacagccaaggtgctatcaaaaaataaatgtactatgtggaaagagaattccttcttttaacttctccaagtattgcagttatcttttatgtctagtataatagtaatcagtcttttcttcatatctataaataaagtgaatatttaataactatataaatgcatttattaataatgtccctaaagattgtatatgtgatatagttgtgagtccattataaagcttgttgaatgaatatatactaggaaatattaagtaaggtt

SEQ ID NO: 57663 - DNA, 1712 bp, Homo sapiens
ccttgaaaaatctccttttcacttccgttccataattttttcctttccctggaagcaacattggtcactaatttcttgctattgttcccaagtagaagacaatgttacccacctttctgatgttaacaacgccaacacaaaagaaaaacgttgactaaaggatggtattagctagagttcatagtaaggtattagcatgggctccaaaatcaataattgcaacactattaatgactatattaaagggaaaatgacaaatttttttaaagcaacataagatatttaaggcatatgttgtattcagttttgtatctgtaattggtaaatttatcatactgccttctctccaatatttttaagaaaatatcaccttttcaacatcttaaactattttgagtcaaatttatggcaaaagcataatgatatagtaataaatataagcttttgccaattattattatatagtgacattttgaaaaatatctggtcccatgcatgtttttcacccagccaattttcctcttgctctgtagttgcaccctcagcgttaaaagtaatggctgtagttaaacttttaatcggggaagacttcaagaaaaatcaaggaatacaaagtcatagttacactatgtgatctttttttttttttcagaatgctcttgggaaggtttatatgtttaatgatctactaaaagtccattgaccttcttgagccacaaaatgttcagagatttcacaatttccatcagagccaccacatgattctactgcaagtctgaagaagcccagattgcagtgtttatggtttctggtagaacttccagagaaagctagcttgtgggcactcagtaatagatgagaacttggggaaaatctagacagtgatccacacaaaataataatcgatattttctaaatctttacaatgtaccaggcactgagctgagttttttccatatgttaacgtttgaatcattgcaatgattctagataagagaaaggattatccacattatgcagataagacacagagagcttaagtaacttttataatgtcacacagctagtaacgtatactcaacataaaatcatttttggtactgaatacaggcagtttggcaaaaagctcatgctttgaccactactctgtagctatattcttaagaaaacaaaaatttaagaaaatagtatatagagaaagcaggacctagaatagaatcttggagaatgtccactttgaaaagtaaaagaaagtagaaaaatgattagaggcaccagaaaagattatactggaaagaaagtagaatgtgcagtgtcatgaaaaataatggaaacagatgttcaccgcctttaaatgctagagaatataaagaaaaataaaaaacattagatgaccctgaattcgatgatttttggaaacacaattttaggccagagttggaggtcggaagccagagtcccaggggctaatgagtaagtgaacctagcaattatggtttactcttataagatatttggcagcaggagaaaggaggagatggtatgatatttggcagggtagaaacctcaagagaaattttcattttagaataggcaaaaacaaagaaagtatttttgtgagctcagagaaagataactgtagacaggaaaaaggaagatccaagagagaaatgagcatattgatggaataaactcccaaaagaagaatgaga

SEQ ID NO: 57664 - DNA, 1883 bp, Homo sapiens
aatagtagaagaaaggtcttgaaatgttcctaacacatagaaacgataaatacttgaggtgatgaataccccaaatacctgacttgatcattatacattatatgcatgtaacaaaatgtcacatgtacctgatacatataaacacgtcatatatcaataaaagaaagtcgatctcatattggttgaggcctgattgtaagtaaatctttgtccctccagacatttccctgtactgtcttgctgtgaggagcttcttttactgctatttcttatattccaacaccattttagcccttttttgtcctccccatatttttacctcggtttttactgtttatatagcacactttgtgctatagtttacctcagtttttactatttataaagcacattttgccccaaacttctctcttaacaagctagaatataagtgaatgcaagagcatagagacagggtcattcctattttcatatttgaggtataaaccaaggagatttacatacacatatatatttttaaatctgcaaataaatggttttattctgacattaaaaaagaaaatacttaatatcattaatgaatgatcgttttaccacagcgtaggtcattgaatttgaacttaaccttcactttcaaacaagtactttgtattttattgatctctattttcctggaacaacatgggggctatgtttagcgtgaggacaaagtatcacaactttcacctgaaagaaaagatgagctaccatggtacatataacaatgaggtggttaaaactctaagtcgtcatctggcaacactgccaatttactaaaaatcactatttcaaagaagtatagaatagatatcagccaaaataaggatctctttctctgcctctctctcgctctctctctctctctcccccatctctctctgtctctctctctatatatatgtatacacacatatatacatattatacacatatggagaaatttcactattttgtatatgcttaaaaattacagactttggaagtcatatgactatttcagtgtgtgtggctactaatctcaccctcctgttccaaaacacagttgcagaagcagaggaagtcattatacacttagaacatcattttataaggcagcaggtctggtaggaaggagattaggtgctacttgtgacaaaggtcagcaaatatttgtgttcccagcacttttctagatcctcagttaaaatcaaagcagctgcagtcttggcagtgggaggtgatactcacactttgaacaagaccacctgcactacctacaatggcagctccaaatattttatatgaaaggggcctagacatagcatgctgaatgaaaaggaagtgagtagactagtgctttccttgaagctgtgcaaccaagcatagtttttacatagatcgtgtgtttcacatggtgtgataacagcttgagatgccattgacatggcccaccggcttatccacatcagtaattagggcaaagaaatcctaattactatgcatcccgtgattgaagtaacattgatgtatacatattttttcctattatttctctttttgtgtttaaaaatgcaattatggactcattcaaagtgaaagctggtatgacaatacatgagctaacttcctcattttatgaataaattttataaagaaataagctaatacctacagagtgtttattaaatgctaggcacagttctgagtgatttacaactggtatttcttttaattttcacaacattattacaggtagattttatatatggagaaactgaggcacagagatgctatgtaataaatctcaacattacccaggtgatggtggagttggaattccaaatcatgcagtctgactttagctg

SEQ ID NO: 57665 - DNA, 1221 bp, Homo sapiens
ctgagaaaaattttaaaacaaaaaatgtaaatattaactttttatttctatgttgtcataatatggattttaaattttaatttaaatgcacattccatggcaatggctaatattttcaactttctccctcttcaacacatacacaagtctgtattcatagcctgttgtaatagacaaggttaaatgtagcctaaatatatattccgtttaaatgctttcctcactcactagcaattggttatcactagagagttatctgtgaaatcttactctacattcctcagtcacctagtgaaggtgtactgatccaccttcaggagcagtacaaacctttattggtcacttcccaagcaacttcaaagagcagtaactcctccacaggaagttcttcgacttcccactggggaagcccacccagggatgttacagagagggatcggcctcgaagcattcttcttacagtcctccgagactcctttgaattcctgtttcaattagttgtaatcccaggagaagagaacttacaggcacaaaagttagagttggtagagttaccaggctttggtagcttctcttgggaataaactagtagcatgaaatcttatgtgcttcccacagaattcctggtggaaggaggaattcttcctcctctttctcgtctttctgggcaggtattgtgaggacggtatctgccctgtcagtatctacccaaacaatccagagctgtcaacagaaaaaccctctgattcaggacataggtaagcacttcctgggataggcagggcatgacccaagttcagccttttagcccttgtccttttgaccagactcctagattcatacagttaccaatgcttatttcatcatttccaaagtgatacaatattggcaactcccctcattaagtttgcaggcctccttagattacatgtagactgattgggacatatttttatgctttaaatccctttggatttcctaaatattcttctttcttttgattcctatttctagagcttttaaaaaatattcctagttattttattctacacttacaaattgaattttggtgatagccagagatcttgagcccccttttctcaattacttttcttaaaactttccctataaaaaagcataaatttgagtatgtctttgggtgtaacatgaaaaaaaacataattttgactggtcaataatcatcagtcaataattttaatg

SEQ ID NO: 57666 - DNA, 1583 bp, Homo sapiens
cttatgcttcggttaccctccttgcccatctctgcctgttgaaatagtgtccatcattcaagacccatctcaaagtcttttcattctttggacttaatctctaaaagctattctcacattaaaaatgttcacatagtcctttgtttgcacaacacctggtacggcccttgccaggttctgcttcgttatttttaaacttccattatcgcttccattactacgagaagaaaagtgtagttgagtcaacagctgataaattgaaaaaggattggccctaatgtggtcattattgagggggtgattactatgtgcagttcattatactaagctctccacttttgtatatgtttgaaattttctgtaacaaaaggctaaaaagagaaaagaatcacatttttcctcaataaaacacaattggtttaaagggtaatttgcaaaaggaattctggggcagaataattttactttgaataaccacacaggaaatcttttattcaaatgtcaaaaatttcatttaaatttgataagttccctcttgtttcttagttatatttaccatattcaccattccagcattccggattaagctttctatgtttccctgtagcttgtctccattacaacacacatttctacagctactgcaatgttctgaaaaacctagttccccgttcttgaaatgagttcaccttctctcccaaatccagggtaatactattgagctacaaagacaaaagtcatgctagaaatcctttctgcttacgagtagttccacctaaaatggaaatactgtaagttgaattatgtgtctgggtgattttttaaaaaagatttatggtgcatgtcaaattaggccctttagagagtgccaaaattgtgacctgtcaaagaaatatattcatataattataaacgtaaattgcaaccaaatgttaagaaacttcaaagcatgttgaataaaactttaattcaaatgctcaactccatccgtcttctttgtctatcacttgtggtagcccaagttatctgagggcccaaagtaccattggcattcctagaagtctcaggcactagttccccagttacttacagtgcaaattattgtctgtctgcagaccagtacagatctactacagctctgcaatgtcccgaaattgctgtctgctctggcttctgttcccagccactagctaccacctctgaactttggatagttcctgacttttgttgcaaaacccctgtttagcgactctataccttcttttgagtgaatctgggtaataggtctcagctgtgattggttttcccagcaactccattctatcctctttatcttttccaggaatttctaaaaatttcttttccactgataagcctttcttgtttacccaggctgcagtagattaagtgtgattttaattttttttttttgggggttatttcaaagataaggggatcagctgaagggatagcttaccattttgggctaaaaatccttctcaggctcactctgttttctaatgattctctggttctaaattacttaacctctgagtgtaccttcgtagcctctgctataaagc

SEQ ID NO: 57667 - DNA, 3158 bp, Homo sapiens
agcacaatattttttgttgatcagagatatttacctgtgggcactgaaactatggacaacagctttttcatactgaactcaatgtgtgcgcttttggagtaaagcactctgtgtaatcctttgaattacaatttttttttgataactggtataacattttcaaggctagtccaaaggactgaagctcaggttttcagagactcttctccataaagctgcatttaaaaaatacttactgtgttaggtgttgttctttattgtgcttttttgtttctgaagattctaaaacaaaccctttatttcactttcaattaaataacagaatgataagagaaagggcattttgacattttttctctactgttttcaacccctgcctcatcccactacattcttacctgacattagtcacacacacagtggactccaaaccacttttctccattccacttttctccatgtaagcatagatgtccccatgggcaaaggccaccagccaccacatgatagcgaagagcagccagctgcagaggaaggacatggtaaagatgaccagcgtgtggcgccatttcaggtccaccaaggtggtgaagatgtcctgtagaaagcgtccttgctcacggatgttcttatgcgccaggttgcaggccccgctcttggcgatgaagcgggctttggggaggcggtctcggatgcgcggcttgcgcaggttctctgcggcgatgcgcgccagcacatactcctccgggatgatactctttctggccaacatcgtcctgtcaccatagccagcttagccacctccctctcacctgcctctccgtccctggacacccgtcctcctgcacgagggaaacatttattaaaaacttaaaaacccaccctatcctcacctcttgggtccttgtattcaaggatatgtctgtacatgtgcgaggtgacatgcaaaaccaaaaatgtgatttttactaacccaaacatgaatctagcttgtgcttgagttctgggatctcagaaaaattacttggttttaataaaaagaactgtttcaatttttcttattctgagtacatatggacatagccttagttaaacaaaaccaggagccttccggtaaacagcaggctcaaagataattctctgcgattaaccgcgtctgtaaattagtgcaaggctacagcacgtggcgtcagtcatgaagattaagaccagttgggtgcacgatctacttattaaagtacttagatgatgtagcaatattaaaagtaaagagagaaaattcttcctccgttatttttagaagtaagcaaaggccatgactccttgcgcagtctaaataacgtgtaatctgacaaaattataataagtggtgtgctatagaatttataagttataagaattattttaaatgcgaaagaagtatgagttgcatctaaaaagagttaaaaaggttcctgtggaaatcataatattataaattgaaaacttttttttttttttttttttacaacgaaggaatcaaatatacaaggtgcgggggggaaaaaacccaagacaacagcctgcgggttgcagtagggagtgtgccccgaaaagtccatccatcactgcaagcctctgcggtgttttgcattttaaatcatttacgggaacacggacagcctcccccctccgctcccccggagcagctttgaaacttacagactccgggtagcgggcgcggcggctggacctccttgcacacgccggcgggccgcgggcaggtccctcgctctcccatgctggcgcgcgggaccaggggccgcccaggccggagggacaaattgggggctgcgtgtcctaaggagaagagttaaaataataaaaggtgcaactgaatctaaacgcagggagggctagaggaagggggatgggtgtagatcttcccctccccctgctcagctcaactcccttggccacttcagtggaaggaggagggactgggggggcgggggcgggggggcgatgctccacaaatcagcctcccagttagggctttgacgcacgccagacctcggaagccgacgttgtcgcggagtagggggcgggcggggagggggcgagcgcaagtccccgggaggtagggagcaggccagagggagggacgacccgggggagggcgggacctgcagagccagctcctttccagtagccgcgaccccctgccgccagcgtgacacacaagtctttaaaaggctctctgctcaggggagagaactttctgactccaagttcactgacgtaaggagatttaattttaattttattttgtaatctaggtagataactgggctacttcatgataactgggctacttcggactgaataaaagcagagaggtcagaaaatattcttccaaagcgttcaagctgtgggcacacacaattatttacattaaatttccacctgctaggagagatacaggtggaagatgttctgaaacccactatagtaaagtatttcttcaccagccaaagccagttctcagggaattaaacacacacacacctcaaaacagcgactgccccccaccacccccggccccttaaggaaaagaaagaaaaaaagaaaccactgactggctcccaatgaagaaattttaccccaaacagggacggccgttaacacttcagcgctgataaggccaggtcattcggtcctcagtaattggttgctttctgaaatgttgcagcttcttcctctgtctagatgggtctgaatgataaaacagcatttgcgcacaaaaaaggttatacaataaacatctatagctttttgaaaaggagccagcgaagacaaatgtgctttttcccacaggtcaagcctcctgattttggcacttgcgttaatggaaactttaattcttggaagttccacgtattttccaagactcgagccgaaagtgtatggagcataaacaatgtattcatttaattagccaaagacctaaaattagtctttaatgaaggcaaattaagaactttttttttctccttgtggttagatctccttaacccctgtaagcccaggatcctagtttgttagtggtagtcctcctttctactgtcattaatttttgcagtaatttatgtagtataatagttttacaagtctatgaa

SEQ ID NO: 57668 - DNA, 826 bp, Homo sapiens
ctctttatgccatctattttaactacctgcatttatctatgcattagtgatataaagtttcataccaactatagccttatttaaggcagcaagttaagctaaaatgtgagtgtatatgtgtgtgcatgcagtgcacacacacgtactgaggggttggaggataggtttaggttgtaacctataaaatagatttaacagacagtttaattgattcaaatagctggaaattctgtttacgtccaagttcaaataactgatgaacattttggctgtctgaaaaagtttaagaattttaaaaattactttttacttcatgagtgttgaaacagaaaactcaaactactgtgagtcaaggagctggcctagatatcaaagagctggcctaaatccacttggctctgataatattaaaggtcaatggcctttcacttaataataactgataatgttgtataaacagtacatactttaatcattcttttagagaaagatgggaatgaaatagcattaagctactgcatcaaagttgcactgttgatatatacgaacgagttacttatttttttttagttgatatctttcttttatttatttatttttttagagatagagtcttgttctggagtccaggcaccattatggctcactgcagtctctaactcctgcgctcaagggatccttttgcctgagctgcctgaatagctggaactacaggtgtgcaccacccagcccagctaattttttatttaaaaatttttattttcgtagagacaaggtcttgcctttttgcctaggttagtcttgaacttctggtttcgagcaatcc

SEQ ID NO: 57669 - DNA, 558 bp, Homo sapiens
tcatgtgtgacaccattgggcataaatgtctagaagaggtaaactctttcagctagaaatagacacttgttttatatatatataacttcaaagtgtaagatatctccagcctgccagtggactgtttcataggaaatatctcacacctgagaggaatgttcacctgccattattagcagtgccaaatgaagtcacttgcctgtgtaaatcttgagtaatgtggcatgttagggctcaagatcataaccacagctaatcattaaactatagaaagtttagctggcctgccactgaaagattgaacctaatcattctttgaacttcagtctggaaaaggtacatacattatgcctgatatcttaagaattctctctttacaggacaggaaaaaatgaaaattcgagtatagttttaaaaatatccaaactcttcatgatctttctagataaggctttggccttatagaataagtataagtgtgataacttcttggtgacaagaaacaaaagggaaaaaagaaggctcttaagaaaaataggtattactaatgttaatgaa

SEQ ID NO: 57670 - DNA, 833 bp, Homo sapiens
ttacctccttgtacttttttcctttgttggaaagagacatacatttagtctaaaggaagcaaggcagttgtcctccctctttctttctcttgaaattccacctccacctactgctattcaaagtgggtggccttgttttcattttacaagtttattaaaatgctttagcaataatgtatagacatgagtttaaggctcatcattttatttccccaattctatgtcttttatttacttttgagctgtttatttgggatatctgccttgaaccatgtgtagagcacaaagtccttataaatatttgcttttgatttctgcaggattaggtaaattgatgtttttttaaaggaaagcaccaagtggccacttaaaaaatttagttagcaactcaccatcaaatatatcaaccattctgaagaaagccagagataacgatgatttcccactgccagtgcgaccacatatgcccacctaggaaaacagctgtcactcaaagagaagaggactcagaaaaggacagaagattagcttaagttttgttttttaacttaagatattatgataaaactgtaattatgtttaaataattacattatagttatcattttttcttagatctacattatgaattattctcaagataaaaacaggctgggcacaatggctcacacctgtaaacccaacactttgggaggctgaggcgggtaggtcacttgaggccaggagtttgagaccagcctgggcaatattgcaaaaacctgtctctacaaaaaatacacaaattagctggatgtggtggtgtgtgcctgtagtcccagctactcagaaggctc

SEQ ID NO: 57671 - DNA, 2531 bp, Homo sapiens
cactaagagaatacacatcattccatgtgtgtcctgttaagtttcagaggaagaatacctaagatgtagaagaataatagcttgcaatattagagctggaatggagagtgagtccatgctctcactatatatatctatatctatatctatatctatctatatatatatctatatataactatatagatatatatatatgtgtgtgtgtgtgtgtgtgtgtgtgtgtgtgtgtgatatgggttcagagaagttacacatcttgccagaagttaagctacaattggtggcacaacaaggatcagatgtagggtttactttttttttttttttttttccgactttctactgcattatgttgccagacaagcagttatttttggacccggttttctagctcagatttcatgtgtgcttatgtcaggattatgattagctcctttgtgttgtgtagtgaggcccttgcagaaatttgtctgtggttaacttgttgggatttgtattaggttgatgcaacagtaatagcaaaacccacaattactttggctccaacctactatttgaactttttgtcaactacctggctcagagtctgggacactaaacctacagatttcatgtaaataagaataagcactatgcttgctcagacaatacaagtatggacatgtcttaatgtatttaaatagtgtatgattcaattataaactcttttccaaaattaaaacaattctttaataacagccatagattcaaataaaagatgggaacatctgtccatttcctaacgctttctttttatctcatttcccagcgttcttaggtattgttctgtctcatcattcaaaaaagaaattctaaaaacttctcatgttaatgtgtcacacatccccaaagcaggtagaatttcagatatgctcactttctagaattatctcaagtctcattccactgataaactccttctctagatagatttgtctctggtgcctcaaaaaaaatctcacaactagatgataacacattaatgacagtaatggaatgttgaacatgctgaagtcaaagaatgaagatgtttctcaaatgacctcacatgtgtacattcctgtctcttttaaaaacagctcgaaagatcaaactgttggagaacaaccaatgatcccagccttggaaacaaaatctgggttcagacactgaccttgcccgttactagttaatgagctcagacaagcaacttaaaaccctctgagactcaatttcttccttgaaaaatagaaatgatgtttaattcacaaggatttttaaaggaataaaaatgttaaataccagttagatttctccatctccacataccagaatgtctttttttttccctttggataattttcagatgtttaaagcaaacttaaaaatgtgtatgcatcataaaacatcaaaggttaaagcaggcactaaaatttaattccatattgatgctcatgatctttacaaagattaaaggaaaaaaaatcacatagagttaatcctttgaggcaataaattccacagaggtagtaaatacttttttgattgcctcttctgatgtatccttttgttaacaacttgccacacccctactagactgttctttctcttttcctctttatttgaattaactacatggatgcagagaataaccagtctgggctgttcttctgcagtttatacatgccaaagtgctcccaaatacttctaaaatatttacagcaatatgaattttttcctttcagccagtttgtgtaaagttaatactttcaaatttatgttatacatttggatttccatattattttttctaaaagtctcatagagtttctgtaataagttgcagaaagtaaattagtaccagaaaatccttccagcaaggtatgtctggcttgacattaaaaaaaatatgtcatctggcttctgagaaatttctgtgagtggtgtatatgttaagagtttgaggcaaggtacttctttcattaacttctattctctacctcctgccagctgacttcatccatccattcatacattctttaaaaaatgtaagtcaggtcatatcactcccctgtttagaattaacagtgccttcctattatacttacaatacattcaaactcagatgggtgacaaagccttatatatatagcctatatatatatataaaaccttatatataggctctcatctatatatatagccttatccagactatatgtctggattttgtaccctgtctactctgacctcatctgagattactttcctgctccttcactgtactccaaccacactagcctttttcctattcttgggaatacatcaactttgtttctgccagtgactgcctgaaatgcttgtcggtaggtctctgatacctggctccttcccatcatttgaggttcaactcaaacatcacctccttggaaaagtcttcctttcttggttcctaactccagccctgtggctcttctctttcccattgtcctgttttattttcctcaaag

SEQ ID NO: 57672 - DNA, 1495 bp, Homo sapiens
tagctgggtgtgatggcaggcacctgtagtcccagctattcgggaggctgaggcagaagaatcacttgaacccgggaggcagaggttgcagtaagctgagatcatgccactgcactctagcctgggcgacagagtgagactccgtctcaaaaaaaaaaaaaaaaaaagcttttgttaggtctccgatgttcacttcttttactgttaaacttaacaagtttaatgattcacaaagtgaccctacggttacatctttccattcctttgcaaatacgtgagaagcaaatggcttagaggcaataaactaagaaaggagaagcagatggtctgcataactttcacagaagacagctaatacttggggatcactaatagcatttattctactgctatagccttacacatcctaagcaatctactcagtgaaaaccaccttccatccaaatgatacaatgaaatgggagactcaacttaggaaacagaagttacaacacagatgaattatctacattcaaaagagggcttttatctgtagaatagtaaattacagcttccatcaattctgtgaattcaatactccccaccagaagattcccatgtcgaaagagaggtctcttttcagatttctagtgattcaaagacatctatctatatttggaattataatgaaaactgtaattctctataaggcagccttgtaaatagttaatagcaacccaaaagtatgtgatccctctccttcatatagcactcaggagcacattattgtaccactgggtatctgcaagaatatattagggccttcaaattacgagatcactgcatccctgtctgtcgttgaattgtgaacacacaaaaaagcagtgttgtctcacaaaatagactcttgtgcaagctcaccctaaagaccattttcactttagcctgttgactctaaagtatttatttttggcttcttcatgtgaattttcttttatccttccaccacacagcaagacaaagccttggaaagacagcctttagataaagttacaccatttttgcaactgaaaacaccaatgccaaagaactggaattgtttagtccaaagggatgaagagaaaagactgtgctgaacgagaggacgcaagcagcaatcagaggttaggctgtagtgacacattgcactcaaccgcggccggcttcacttggcacccagaggaaaaacagtccgctctgctgccaaagcaagtccggtggccagccacagtctagccgctttctaccagccaaattattttattcttttagtctcttgtccttttatgatttgagtgtgttatggcctttatttttttcccaattcaaaatgaatatgatatgaatatggtgggcaaggctagatcttccatagggaaaactatctgtgtagacaaagaggaaaaatcatgattgtcttaactcttatttaacatgacttggaaaagaaaagaaagcgctgtatttttttaaaaac

SEQ ID NO: 57673 - DNA, 1162 bp, Homo sapiens
cttatccatgttccggatcgcacagactacaaactatattccttgccttctggaatgtctttctcatctctcctacttgatactccagctcattggcttatgaaccccctaccagggcaggtacaattcattattcattcatgcatgcattcgaaagacatttcttgaatgcatttgccaatcagtgtagtaggggatttatgttacttttaatccaatgcccatacaaggtacaaggtacacattcttattttacagatgaggaactgggactaaaattaacttgctagaccaagtctgtgtgatgccaaagcttgtgcttgttcttctacattatgcaagacagaaggcaacagatgattaactgtagttttctacattttgcactaacatgaccctccactggcttaaaacgtagaaagttgccatccttccaggcaggaccaactcagtgaaggaaatgagtacatctgttcacttgccaaatgtgctcttttggaaaaaaaaatttgaagttatacaaatatttgccattccattaacttatgtgatctagaaactaatgaacacaaaatgaatttttgctttttgggctatttgtcttgtcattagctaaaacattatgacaaacttcatctgtaacataaacaaacctgagctattttaaagtccagaaaatgtgaagctagtgccgaatctcagtggaatactaatttttacaactgtctgcctctttgcagcaggcgtcttctctatttggtttccatttcgaaatcatgaaatgaacgtaccgtcctgacctccagccatctgttggcagctgagagaaataagtaggcaatgttgtttgtatccgtcagttccagcatacgttgtttaaatctggtttcatgcctgcagaaaacaaaaacacgatgttaaccacacaacaggagaggtaataagaaacagtcacacttattactacactatttactcaacacagtgacaaactgatggcatggaatgatcagtaaatagatttcttttttttttttttttttttttttttttcagatggagtctcgctctgttgcccaggctggagtgcagtggcgcgatctcggctcactgcaagctccgcctcccgggctcacaccattcttctgcctcagcctcctga

SEQ ID NO: 57674 - DNA, 1571 bp, Homo sapiens
aggaggtatgtatattggggatgaggtgactttgataggaaggagtatcaggcatacagggaaagaatgaattaaaatttaaaagcaggagccagatagacacaaaatgtcacctagtatatgattccatttatatgaaatatccagaacaggcaaatccattggttgctgcctggggcaaggcgagtgggaaatggggagcaattgcttaatggatttgagatttcctcttggggtgatgaaatagttttggaactaggtaaaggtggtggttgcacaacattgtgaatgtactaaatgccactggattgttgactttgaaatggttgtctgctaagtgaatttcacctcaatgaaaagaattttttttttttaaatttaaaggcagggcacacacagaccattgtccattttctcctgctgaaaataagtaacaatgctgaacaaaatttggtttgtaaaaaatctcactaaaagaagcagttaggaaattccaagtccaaaatataaggaaaaaatacaaattcaaaggtgtgagccccagaacacctaagcctctttcccccaagggtccaagtatagctaagaaggaaaaaaaatccagttataaagacttgttctaaaaggtgtcaatgttcgttagaaagctatagtaatcattacagcggagtactgaacacacataaatctgagaaaaataaatgaaggctatcagttgattcacacacatatagatccttgatgtgtaactgatatcacactgaagatcagtggggacagtgatcaataatacatggggctaggcaactagatatcacacttgaaaacattaaatcagaccttactgatttactactaaatttgggaaaatgactactactaaatgtactactgctacatttatgatttactaataaattattcatccctgatttacctactaaatcacatccctacttcatactaaacacaaaaattgatcttatgtgtattaaaggactaaagttaaaaagtgtagcttcaaagcttttaggagctaatatggaacgtcttcatggcctctgggtaggaaaagttttcttaaataagatgaaaaaccaaagcattaaccataaaggaaaagttgtatcctagactatattaaaattaagaacttctgttcaatgaaagatatcatagagtggaaagccaagttacacagagtgggagaagaattttgcaacatatgtgactgtcaaagtagtaccaaaaatttttaaagaggagaaggacaaacaacctggtaattcacaaaagagaaatccaaactcaaaccccagtggccattttcataaatatatcttatatcgaaagttgcttgaccttatttgtaatcagaaaaatgcaaataaaaaccacagcaagatacagttacacctctcccagcacacaacacgtggcaaaaaaatgagaagcatttttttggtgaagatgtagagcaacaggaactctcagtcacttctggtgaaattgtaaattggcaccatcactttggaaagcagtttgccattatctaggaaggttgaggatgc

SEQ ID NO: 57675 - DNA, 2301 bp, Homo sapiens
taaagagacaaaatctgcactggttggaaacactatagaagcatatttaaatgagcaaaatacaaaatggttttacaattcttaaccattttcagagactttaagcctggatttttttccagattaaactaaaattaaaatagtaaatgtgatgatgtgaacattctctgtcactattgttgccaatataaactggcacagctttagtggaaaacattatggctgtattcatttttaaaaatcttaaaaatgtgtgccctctttgacctaccaccacttcagtggaaagcaacatattcatcaaggacctcaaagatgtgcatattattagaactagtatccccacttctagaaatccaacctgagaaaatcatcagagaaaagtttacagataaacagagatgcgtgaacttcaatgttatttatgttagggagaaaatagaaacattctaaatgttcaattaaaaggtaattgttaaataaattagaatatttccaacatagaatattgcatagtcagtaaacatggggtattataaaacttaaatgaagggagaataataaaaaaaagtgtaatcaggagaaaaatgctagataaatttaaaatttttgttttgaaaaattatttttacatgaaataaataaaagactgaaaagtagcataccacaattttaacaatggttgtctcctggcagtgattttaatgttcttttttatattttttcaaatactcctattagcacacgtcatttctattatcaataagcaaaaaatgccagacacttcagtgcataccttatgatggctttgactgcaaatctgaccaccgtggagagcaggaacagtggtgtgaccaggatatggaagagagacagtgaagcaaaggcctctgcaggtttcagattgtttccactggcatacgcatgggtcacaaatgtctgtgcaaagaaaggagttctttagagaaagctggaaaaagtgtcacacatgcgtacattcagtcctagaaacctaacatattctgctatgccagtatgtccattgtaactatgataacaatgacttcatccaaaactccctaattaaaacaatacttgcttttggtaagtcctgaaaggcttacctgcaattatagtggcaaacttatgagaaagttagaaaaaaattctacttacaggttaggtaattgaccctgtcagattgctaagtagggggaataaagggatggagaacccagagttttcaacaaccagtcaagccctttccaagcaatactaaatactccgggagaaaaaagaatgttctgttgttttggggtcctcactgtggatctttactaaaactgtcagcattaatatccaaagaagacttacttccatttttttttttttgagacacggtatcacttcattgcccaggctagagtgtagtagcgtgatcatggctcactgcagcctcgacctccccaggctcaggtgatcctcccacctcagcctcccagttagccgggactacaggcatgcgccatcatgctcagctaattacatttctacaaataataccagttgccgattttgtcattttagtatgaaatataatgcaattatttaagattttctggttattgatctagctccatcttgttgtaagagtatctgggaaccagatcgttgagattagaacagttaattcccaaccgctgttcattttgcaatgtttgcaaatgtaccagcatacatttggcaatgttttgattgttgtaactgaggttgctactggcacctggtagctagaagccagggatgctgccaaacgtcctaacacagagggcagcccctagaacaaaatttatttggctcaaaatgtccatagtgtctttactgagaaaccctggattagaactcttgcaatggagactgccatagagagaagtcacagaggtgaggtaatatatattactacccacacattcttgctcataaatcatttataaacactgacttggtttcatttctaaaagagagaaaaagtgtcttacagcaagaacagctgctatgggaattgctgcattcatgaagactgtggaaagaaataaaatgcattagtttcattgaactgtgaaaacattttcagtaactttaatcatctattattgctttaactttctttgaagacaggaaggacaaagagtattaaatgtcattttgtctggagtccacaaacatttaccagttaatatctacttgtgtgcagttttatgagttcccatacattagtcttaaccagtttctgtttttctt

SEQ ID NO: 57676 - DNA, 2383 bp, Homo sapiens
aaactagaagatgtatagctagttagctagctaccatggctataactatgacagatccaagtgggaaaatcactggcaaaaatgaccactgacttctgacttagtgcctgatctgaatccacccatttactcttcagtggctgtgaagtaccatcccacaccaaaagaaatgttgaaattactcagtaggtattccttagatactgcaatgggattttaaaaaaaatcccaaactgaacaaataaagcaaaaaataaataccttgggcaatagcttcacgctgcttcaaacccctgccggtgcacttgagctaccttcaaaacaccgacttcctacactgtcttaagatgtaaatttcaaacccggacgcagaactcctaaaaaaaagtaaagagtaacaaaaattaagcagatagaaaactacttcttgaacatacaagaattgtctacaagaaaggcggtaataataactcctaataataataactcctttcactgtttccagttgatttgagtaggagacggcagttttgaagtaaaactggaaacctgatccccaccccttcacttctcgagccgggcctcgtcccttaattctagaaatagcgatcgcgaaagctaagtgccgagaagtgcgagagagtgcgagggcgtttttggatagcagaaatgttagctcaaaatcgacaacttacagttattcctaaaaatgtttaaatggcattcatgtaaaagacacggattcacttactccgatgacagttttcctcccctaggcgaagcacgcagtgcgccggaacggattatttttagggtggtgggagaccagctgctgcctcctatcgagtttctaaattgcacagactgctctgggccggggcagacaccgcggctgagaagcaggaaactgggcagaagccccgcgcgccgcgcctggggccggagaccttccccatccctgctctgctcagctttgacttggggcgggcgcgacgccgcgattttacaaacccaagtaataggcgtccccttaaacttcattagacactgaaacttggaatatgattccatgattctccggagtcgggttttcaaacgtcaaaacactcaaggtattcttgtttctttgttttgtttttccatgctctgtaagcacccctttattagccacgtaaggaagcggatttggggatttcgctgtttccccctgaacggatccgggaaatgaagggctcattctaggtagaggcacccactgctgggttatgagtgcacgaatgtctcacaggagcaaggctggctcaagtctaattttccgcttttccccggcgacctagaaaacttggtttctctggtggaccagccgccgcgctatcgaagggcgacccttgcccaccgtcccctaaagtgagacgctgattcccatggactgcgtaaacagtcaccctcttctcctgtttccaaccagagacataattaactctcgagataacgtgtttatattaagatcaccccacaaccactcccccgcgaaacacaagccgtgaattttgtccccgacaaccctctttaattaacaccggattttctcaagagccagttttgagtcagcttgagataagcattgttttcaggaactgtcgtattttaataaaggatggtcagccgggcggacttctgcccctgaggctccgcatgccgtcctcaaggggcgccgctgcaggactgcggtctgctggcgctggtccccagatctgaaccctaaacaccggtggcctcgtggcctgtgcgatgcaggccgactccagccctgccagtcccaggggatttctccgccggcgccccactcttgggaaggtcgctgcgcttccgggtgagtgcctgacctgcgtcagcggctgggacttgaacccgcggccgctaggaatctgcgaggccatatggggccgaaacctgggagggtccgaagactccgttcctgtggcctttgaacgcttgacaactttaccctggagctgtctgcagcggcgcagggaaataagagagcgtttcaacagtgaggatcctggtactatggatgcagcccagggtggccgggtgagcaagctggacgcgaggccagaggctctccagggcatctatggagagagaactggaaatagggggtgccaataatcccaagatgaaaactcttgagtgtgactacacaaaatgaagtttacttgaggattataaaagaatattacaattcattaaggtcatttacaatgtttaaaaatcatgcttattgtagaaactttggaagatgtgaaagtgtacagaggagatcaaggagccccccgtagatgcacctgtgcacacacacccataaaactactgaaaa

SEQ ID NO: 57677 - DNA, 2078 bp, Homo sapiens
gtggggaagttcttcagcaattataaatactttttttcttttttaattttagaaatttacagacacttgcaagcaccccaaaagccgcacttcctccaaatatctctggactcccactgcttgacttagttttggggtcacctcatcagagcctacttggcctactggccccagacgaggcggccgcggactacaattcccagcgagcaccgcgaggggcgggggagggggcggggcgagggacggccgcgcgcgccagctgccaggcggggatcgggcggcgccgagctgaggtggtgagggactagctcccggatgtggagaagctggggagaaggcgtgggaggaagatggactcggtggagaagggggccgccacctccgtctccaacccgcgggggcgaccgtcccggggccggccgccgaagctgcagcgcaactctcgcggcggccagggccgaggtgtggagaagcccccgcacctggcagccctaattctggcccggggaggcagcaaaggcatccccctgaagaacattaagcacctggcgggggtcccgctcattggctgggtcctgcgtgcggccctggattcaggggccttccagaggtgcgcatgtgcgagagtgggcggcgcggcctgggcgggggtcgggagagggagtcgggctgctggaggggctggggcctccggggccaccgctcttggaagggggccatctctcatgccagggatgtgcaagatccggggtgcctggggccgggctgagagcccaggaggaagggctccagctccttccttgttccgtagctgccaatggtcataacctgggacagttcctgtctccgcccttgagaatcatccgtaaaaggggagattacacctccccaaccgtcccctcctcccgggttgaccttacggggaaaagtaaaggaggccaccccggtgcaacatctgtgataatatgtgaacttctttggatgggggccatcgaagctcccctgttgctcagcctctgataactgcttggtgctgctcgattagggaggcatcaggttcatgaatggagttgagtgtcggggtgtcagagctgaatttcaagctcagcttggagatcttttcctaacctttgaaaaatactccagctatcttcctgtgagtcagcacaatctagaaaactccctacatttataaatacgtgagactcagtgggaaggtgtacaactgactgttttatgatatattaatacttacaaatcatttaatcatacctttggaacctcgcctgccctatggacagttttaattatgcgtaatttagatacattgccaaattggtcaggagttacaagctgatgttattcataaaagaagggagatcgaattctgtgccaagaatgaatttacacatatagcttcaacctaactacatttgaatgtgttgttattgtggaaattaatttatgttaaccttttgatgtttcgatttttaaagagatgactgtttttgaagtcatctctttttctttttgaacctatatttgcttacccatattaatatatgggtaaatgattttcatttaaccagtcttgttcaaaaacgggagatgccaaaaaagtataaatatactaattttcttaatgtttcaacccaaaagaagtcctggatggaccaaggcaaataggagccaccactcagaagataacactagtgcaataggaagtgtgcgaaggagagatagggaaggacctggggattttgttcaattcagtagctatttactgagccctaatttctgctatacatgtccaagggaataccaagatgattgggacacagtttttgtccttgtgaagctcacaaactttgggatatttttacattcttagaaagggtacaaactaaaaaggactgagagaagtaggtgcatccagactgcagtaatatagtgaaatatcatttttgtgaaatgaactagagatcaaaatcatattcacagtaaatggagaacaaaactgttaataccatttacaactcttaggttgtatatatcaggaaaccctgttcaaactggca

SEQ ID NO: 57678 - DNA, 1941 bp, Homo sapiens
ctctaatgctctggctcatcacgccaatttttattacaatctttacttggcttctttcagactctgggttattaccttccggccgtaggcctttactaatttgcatgacttttaaactaatcattagacttaaaaagcaattttgcaatttaagtccatggcaattaaatgacttcctacctcaaggcgctaaattaccctgaaacacctcatcagacctaccagcctatacaagagcaggaagtgttgcagttgtgttttagaacgtgcatggcagattcacaaaatgttaggcatgagagtggatttcctcgcactgtgggactccaagtgcccataaagggcttcatgcaccttcttaaacatgatgtccagcactctggccaccccttccaagggtgtgtgtgtgcctgtgtgtgtgtgtgtttcagtggctgcggggccacaccttgggatctcctgagtggcaggtggcctgttaatgagtcctgacatcagagtcattccggcatttgtgtgtgtgtgtgtgtatgtgtgtgagtgtgtcggtggctgcgcggccacgccttgggatctcctgagtggcaggtggcctgttaatgagtcctgacatcagggtcacccccgcatgcacaacagtacaagcctccccgcgcagcggactgtgccgcggacgcctgcaagccgtgcacccatcgcacacactgaggtctcggcggtcatccctcgtgggagagctggacaaccacggccgaagggagggcagtcgaggggggaataggctgaggggctgggggcgaggtgggtagatccttcacagggcttggcgctccctgtgttttgaggggcaggaccctgcaccaacctccacgaaggcatcagtcaggtcactagcacggtccatcactggcaaatggcgcccggccacgattttcaccttcagcttccctggcatggtctcggtttcggcctcttcttgggctcctgcagaaacaaacaaacgagtctgcgccgagcgcggggccggcgggagaggggcggaggcgcgcggggtaactgacagcgaaggagcgcgcgggggcgcgcgcgggcgcccggcagtcgcgccacgggtcgccactcactgtcgcaggaggaagggtgctgtcccgcgcgggtgctgagacctcattccggagaggcggcgggaggaagggctttgatgggttcttccgtcccggccccacaaggctgggacgaaaagcaaaacccagtcagcatcccgttgagcctctgccgcccctgcttgtctctcctcccccgctctcaaaaatggcggctctcggggcgcggaagaaagcatcgatcgttcggcgctctgcccacttggcggggcgaaactaaactcgccgaggaaagataagggggcggggctgacgttgagaaagctggagggcagggaaatgggccgagtcctgcatcatccaccgagtgggggctgtggataggtgcggcgctgcttccctggagggaaacgctccatcttgcgggccgaagcgcgagtgctgctctgtgacagcctccggccgcggccttcccagctgctaccgccgcttttcggatgggctgtgatagatggagtagcagcgaagactgctagaagagcgttttcagtcggcctttagtgattcgtaaaaccaaattagctggtttctacttggaaggggtacaggtgcgtgtggtggttccagttttctgtgaaatagagttagatggccaggcacagtggctcacgtctgtaatcccagcactttgggtggccgaggcgggcggatcacctgaggtcaggagttcaagaccagcctggacaacatggcgaaaccccgtctctactaaaaatacaaaaattagctgggcgtcgtggcgagcgcctctaattccagctactcaggaggctgaggc

SEQ ID NO: 57679 - DNA, 491 bp, Homo sapiens
taacaatgtttggtcaatgacagattgcatatatgatagtggtcccataagattattattccttttaaaaattgtacctttttcatatttagatgcacaaatacctgccattgtgttacaactgcctacatatccagtacaaaaacatgctgttcaggtttgtagcctaggagcattaagctataccatacagcctaggtgtatggtaggatagaccatggaggtttgtgtctatgatgtttgcacagttgtgaaatcacctaccagtgaatttctcagaatatatccgattgttaagcaacgcatgactctatatatgacttattcattaaataactcagtcacttattaactgactactacacgtcaggcattataccaggtagggaatacaaaaacaaataagatatcttcttatttttgaagaacacgtatctagtaatgggaaaaaaataaacagataattataatacaatgtgatatagaagtac

SEQ ID NO: 57680 - DNA, 2736 bp, Homo sapiens
aaacgtattcaccgtgtgctaagtgctgcagggaatcccagcccgttttcctccatctaaaaggaaaattaggaggtcccaatactttacttgtagattttccagtttctaccattccctgtaaggcactgagacgcaagatttcaaggcccactcggggtaccctggcatggacatcgagtcgttctagcgctgagcttcaaaactattcctttccttccctttcttcttcataccagactctaatctgttctccctagcttcgaattattcactgtatggtcgaacatcttactccacaaataacctctgaagtgttgcagttgtcttacccaaatacctgaactcagcttgtcccgagtactgcgatcccgcgtactgctaatgggaatatagttaacccaactagtatgaggtccccagtacacagcagctccaagatcaaggcgaccgagtaacactgcttgcctagactcaggccaagttcggagagtgatcctggggttattttagaacgtgtcccttgcttcccagaaaaattcagtcgttaactcaagtccagatgcccaatgaccattcggataaggtgagctaaagcttcaatgccttgaggggcttggcagggctcgggctcatcccggagaagcagccccgctttccagactagcagttcccagggatgggtgtgtgctaatcgcaggccaacaagcccagcgcggtacagaggtcccattgtgaccggaggcgagaaaccccgcctcggcaccctgacgcagcgcaggacccgccccgcgcgtgacgccagcgtcaggccagccccggcatgctctgcggccgcccgcggtccagctccgacaacaggaattttctccgagagcgggccgggctcagttcagctgctgtccagacccggatcggcaacagtgccgcctccagacgttctcctgccgctcgcccgcccgtcccagcgcccccagccctcccgcgagggcgccccgggacggaaggatccaccagtctgtcggcgcccgccgttctcgtggtcgccgtcgccgtcgtcgtggtggtagtctccgccgtcgcctgggccatggccaattacatccacgtccctcccggctccccggaggtgcccaagctgaacgtcaccgttcaggatcaggaggagcatcgctgccgggagggggccctgagcctcctgcaacacctgcggcctcactgggacccccaggaggtgaccctgcaggtaacgcccacacctcagctctgggtctcttatgcccctcacgcggctctgggggtcctcaccacaatcgcctctgtcccacgatgaccgaggaggacctagggcaacatctccttaagtctattgggaagtgaccctgtatttcccctcacacctaggagggtcactcccccttcccgtcgcagttgctctttgagattgacctgaggcacattttctctttctagaagccgctgcgtaagtgacggacccatccacggggggagattcctgctgatagttgcccctcctcccactccccagtccacggtcactgcaaaatgaacctttccactccccttgcacggggtcctcgtctacctcctcccctcccaccagtaatgcagtcattaatcctctctgatctttccttcctctcccctccccctgcgatgtgctttcattgatgcctcacactgcgttttgtcttcccaaaccctagcgtactcaattcccaaagtaatgaccacgaccatgcatcgctaggtcggttcttaggcagcaccacacacattgttttgtttgagtcgatatttctgaattattaaagtcgtcttactgaaattaatacctgatactagaaggagcagtggcttgtgactgtttccttttcatgagacaccgtgttgatagagaaaaaattgggaggaaaaaaatccctgagactctaggagttttctaataagttggaagttatgatttccactacgtgattttttttgaatactaatctgtttttagctttagtttcaggaactagatacaaaaatagatctctttttctccttttcccttgcaaacaaaaaaaaacagtaattttcaagattgggatatttgggatttgttctaaatctgagcaataatgtaagaacattcatttgaattagccaaatcatctgcctcgttttgatgactaatttattcaccaatatttgttgatttatttgctaaattcttcgctaaactagccagccacccacacaaagatgaataaaacatgagcagtgcctagggcccagaacagttcctgacacttgggttttcatgtgttagtttcagttcttattacctagaagagtttttaagcagattattttaaaggacccgtatgttttggagaagaaacttgttagacaacaaattttgaaatttaagggagtatttgttagccgagaatataggaaatagtgaatccaaagtgatttttatgtcatttaaaaaatatatttcctttaaaggaaatgtgtcttccaaattgaaattcagtacttgtttagtttatcaatttgtttgtattttattatataagactctaaaatttattaagatgatttgttttctggcagtcacttatacataaaacattattaattaaaaagtgctacttcctggtaaactctagtgttggcagatcagttacttttaagcagtgactttaaagtttaaagctt

SEQ ID NO: 57681 - DNA, 1517 bp, Homo sapiens
cttttccccaagcttggtcttgccatagtggcagattgattgaagagtgagtgaattagtgtttatgtctaagctgaagctttgactaaagattagctaccgtaagaagattaggaggggaggaatgaaatgcattccttcacagatggggatgttaggattttccagaggtgtctatttagggcgagccattttggctgtctgtcagtgcccagcacagggactgcccacccatgagacgcttgcataggtgcttcagaaaaatagcatcggcatgtccctaagtaacattactgtagcattattaccaagcatgagggtataatgagcagcctatgaggctgacagaacatagaggattatgggcatttgtaaaatgcctccccggtgacgacctctccctttcttacaggatgggggagtgcttcaaccagtagtatactggtaaatgtttaacaactggctctggggagtggggagagccctgatttttagtgtttgccaatttccatggtttaaatattattgctatggccaattttaagcttccaacatattgtcagttggctcacaaaattcctgaagatttaggttggctctcaaaagctggtgaaagctggctccagagcaatactggatccaacaaaccagcgggcgaggcccacccattaagtaaaggatagagccattctctatatcttgctcccagctctaccctggacactcagggcatgaagaaatgcctgttacggttcatgaattgcctaaggtaacacaagctctcagagatagaaatgaaactttaaaaatgaaagcatggatgtgatactgtctttttccttctcatcctttttgattggccatcagtgtgtcttgtacagtttgagtcataccaaagaagatttctcaactagcaggatcaaagttctttttaaagagttgattttttttttttttccggagctaaaatggtctccccagctgctaagaaaagaggaaactgtggtgttttctctggaactttccccaagcactctagttttcagtggggtcagtgtgataccattccctaagaatgttttggaaattcactgggaagatgtttaatcatcccagtgattttaggtttcacaatggcttggctattaacaatagcatgcgagaaggcaggaatgctaaggatcttgtggagcataggacagtctcacacaaagaaatgtcctgtgttctgtacaacttcaaatgttccccccagccattcttgcaggtgaaaaaagccacttacaattttctaagcttgcaatataacttcattttacctatggacatgataggcccttgtaccgcctaaacatacatgaaattttttaagaatgcagctgccgtgtaaactgaagggaaactacctgacactttgttgagaacattattgagcatgacatcatgtttaagggttatcccccagtttggaaaagcatatcattgccaataagatgacccagcattggtagctgtta

SEQ ID NO: 57682 - DNA, 713 bp, Homo sapiens
tttgaagtcaaaatctgtaactgatttgagtttaggtctcttgatcaatatcagataatacaaaaaacctgattttcttatcttatgggaatttatggcatctcccctagtctcgagatcacttcctagcatgtatttcaagatagttttttgtatatgatcttataccattttgtatatgatcttattccaccattttgcttttcccagaactgaatactgatatagttactaacacagcactcaatgaaatttccaatattttggcttctcttcagtagtttttgccttctttgacttttactgcctttgttggctagagttttagctggcaccgtgctgacccagcaggtcacttcagtttggaaaagagtgagtagcatttgtgttgcttactcagcatgttatttctctttggagcaaagtgcaatggcttctggtcaatttttgaattgattttaggatggttttaatgatttataaaggagcatttaatcccatacatctaggctttatttgcctcatgaaatcagctactacatgaaattgtctaaggttatatagttcatcccctaaaaacaaacacacaaaattactccttggagaagagttggtgtcaatttctgcttataatcaaagcttcatatgtggtcatttgacttttcaaaaattgaatttcaggcatttcatctttcaaaaataatatatttcaa

SEQ ID NO: 57683 - DNA, 435 bp, Homo sapiens
tcttgttttgcccacttatattttaagaagaaatactatatatagaatggtgtgggtttcctctactgttctatatgtaagatatttttcccattaagtccctctaataactggtgattctatgtgaagtacagtggaatggggtgagtcatgtcctttagtggaatggggtgagtcatgtcctttagaagacttcactttagaatgagtgggcaaaagctcttattgacaagttaaggactctccaaattctagaactacagctactccaagaatgaatatcttcacttgaatcctcagctttcttctggcattttctaccacttattttcaggaccccttacccaccctgccctccccactcccaataaccttttttttttgtttttttttttttggcctaggagtaaatgccaattgcctgatgcaataaag

SEQ ID NO: 57684 - DNA, 489 bp, Homo sapiens
ttttatcattaatatttgcaacatataataatgctgaaagaacattacatgaaaatctctatccctaccatctaggttctacctttaatactttactatactggatttttcacatatctatgcatctatacatccctcaatccattttattttatttctttttgtatttcagagtgtagacacagcagaccagtctggctcaacttttacataacaaagttgtgagtcaattgccctagaccagcaggctgaaggtcatgtaaacagagcatgcccagatgaaccaagttcacaaccacaggtggaatctaagtgtcagaccaaggactggggactgaattaagaagtggacctcacatgacaggatccatgatccaatcagattgaactgtggcattaccctatggcaggatccagtcagattatgcctcctggcatcacctcattgtaagatccaatcacatcacgcctcattaccctcctctgcct

SEQ ID NO: 57685 - DNA, 566 bp, Homo sapiens
gcaatacgaattgtctaattcatgaactttcttatttactctaactgctatgaaaataagagcttgattggagttgttctcttcagtcagtgtatatatacacacacttacgtgtgtgtgttattgtatgtgcagatatttgtgtaaacacgtgtgcatgtatgtgtatatacacatatatatacatacacacatgtgtatgtttgtctagtgtgtggattgctgtatgattccttatttcttactgtttatctttttcctctttatttgtgctgtgttaactgtgtacgtattgttaaggcacatcaaattttgaaaatggataaatgagcctatgaattgacataagctaatacaatgacctaaggtaccagtgactcatcaactttggcaagaattaggcttttgattgtcagacagaccaggttagcagcgttcatgtaatatttgccaaatattgaatcattaagacaagagaaagacaaaccacaaaatctcttagggttctttattcttaccactcattttccctgacttgcattttttatttataaaaatgtctaaat

SEQ ID NO: 57686 - DNA, 1463 bp, Homo sapiens
agattattataaatttcttcatacatatcgtattctaatcagggactaccaagtttcaattcttatctagaaggagcttttatatcaatttttaagtttacttaacacatactttcccaaaaatggagcaaaaaaaaaaaaaaaaagaaagaaagaaaaactaataactccacattaaattactaagagaaaagctacagtaagccccttttcctattttcttatatttgtgtagctgttagacattttgcaaaggaggggagtaccagccagcctttcacaacaaaagacctactgtcactgagccagtcccagacatggtggaaaccagcccacaggaaaaggcctggctccaatgttaggccccggccgagtacagtcactatattcactcaaattggcaacaggtctcagtgttcctggctttgagctgtgaacaagggtcgggattgaataaccaattatacaaccgctgactgagtttatccaaggtttgcaaactgctataatagcccagtattcaaccaactgttttatccttttccagatatagtgtcatatctccccttgtgctccatttacatgtcactttattacatacatccattaaaaaggttaatacagtgtcacactcaatgcctaaatgttgccttacaggagttctgcttctctcggggcatttcatatagacacctttctctgtctttcactttctctctgcaagttaaaccaagtttctgtcaagactacaaaacagtgcctgaaagaccagtagccaaatgtcaacagtttcaaaaatattccttatacaaagaggctgctttaacccaccttggtatataaaaaatgtgaaaactctgaagtttggcagttcagactagcacccaaatttgaggtgctcatataaattcatagaaatatgtgccttcttcctctgccaaaatggacgtctctctcaaagttcaagaagacatgaaatttctcccagcatatttgcatgcctgctcttatactaagtggttaccatggaattaaaaaaataaattttcaagtacttttcctaaatatctacaaatgtgaaattcttgaatgaacaccttccaattcaataaagcataagagaaatggtagaaatatcaggtagctgtgaagacgttggcaattttttgatgtcttcatctttggccctttatttttattccatgctttgtgttaacaggtgttttacacataacttatcttctccactgacgctatttatctttaaaatcaataatacagattccttttagaaacatgatatccaatggattatatgaaaagtacaccaacattaaataacaaagctggctaaaaatgagaatgaccaacattatggaaaatcacttacatcttctgtaaatatttgaaatacgtgtatgtcttttgtttatctgtaattaaaataaaagaaaaagttctct

SEQ ID NO: 57687 - DNA, 2557 bp, Homo sapiens
taagagagtgaatgagaaagacagaagcagcgagttggggagagagagagagatgcttaaggttcatttaatttgctgttataggacgcaacctaaaaacattagcagaaatctcggagactttgcaaatcagttcagtttggtccgggcaatcacaacaaaaaatcagctaacaagattgcagaagccctagctaaaggcttctctaacaaacacgttttgggggagcatcttccaatgattcagagactactgtaaaatgggagagttgtacttcaatatattagggggaaaaaactgtactcacctttcaaactcctgaggtaaatcagggtcagtaagcatgctggaaaagcacaatttccctttgtcacagcagccacctatgatcgtctccaactgaacctgtcaagtgagtccaaaccttctaaaccaattgattttctctctgtctcttccccccctccctccctccctctctctctctctctctctccctctctctctctgtctctctctctctctctctctctctctttctccccccctccttcccctcctctctctcctaggactccttgaccagtctcttaaaggggtagtgcacttccagcagcggagtctggctgctcccccctccgcggagccacacgctccggctgcaaggctctagacaacctcagggtgcctgtcctttccttttaattctctcttctagacatcactgaatgtgagaagtcaactcatttaacacgtctcccatactctgtcttctaaatcataaaactcacacacacacatacacacgcagaacagtatgattttgtaaaacgtatttgctgctgattaaaaacctagtctatataataacagaagctcgattaaactgcatttattaactaattaagcaaaaaatttaatgttagtaatagcatttttacacaaagaattgttattccttctcacccttttctaggctctctccgttcacacacggaaatacacgcacacacacacacacacactcacacacacacaacaatcaggcattgttctgagggaagaaaagcaactttgacagattgaaatatagcagaggccccttcaaggaaacctgtaaacaacttgtcactcactctgtcggtctcactgttagctcgtgctttccgcaaagtggtgcgaacgtcctggcaacccgaccaaagtttcctcagctctaaactccataaaacacgatgtgcgatgtggaggggaataggtatccacatgccaaaataacatacacgagcgaacaaaaacccaaaacgaaatcaaaacataaaaacaaaaagacggtactaacaaactgtcctgtttgggatcgctggggaggtcaggagtaggaagcgcccccctggctgtggatctctttaatttcctctgcccaggcagccacagataacaaggtggacaaactatggctttacagattctaagctggctggcaaggcacagcctccatagcagttccaattatctagataaaaatctggcagccgagaaaggtaatcaggtaatgtacctttgacacgaaatgacagaggcacatacacacagagagagagacacttacacagacatgcatgcagagatggtggctgccccgtgcaccgcagcatctggtcagggagtaagcacacacttaccaacaggagatagtgtgcattcttcacacacgcatgcacacacacacacacacacacacacactcactcacgcacgctctccactcctactgggagggttcattctgcacaaaaggctacattacagagcccgccccaataagggaaagagaggaaaaaaaagccttccattgttgagagggcaggtcagttgattagattttctgtggagaattccacgaggaaattcccttcaaagccgaagtgattaactgggggctattctggaaatggagcagacaatggctcaatagtctgtacagccaatgtccaggctggcactgaactcacttaaaaaaaaaataaaagccagactccctgttcttttccacacattcctcccccccaaccccctccactccttccaacttcccctcccaattccttttattttgcagctggacaacattaagggcctttaaaaccacaagggttgaccccacggcagtttgattaggtcccacttttttttctggagacaggcaaacagtaagtttacttttttagacattcacagtgatacatcatacacatattccaaagagaaaaaaatcaattatgaacttatattagtaaatttatttttcattcaaagcttataaatttttagacaagttgataataacttaatatttaattctatcatcaggagatgttctaaaaatatatatatacacacacacacactacaaaatcaatgtggaataagatttaagcatgtcactatggagttaagacactaacaaaacatagaactatgacccaccctgaaaaagctgttaacaagggatgtggcaaaaatgacttgatgctgacatgattttcactttcag

SEQ ID NO: 57688 - DNA, 2189 bp, Homo sapiens
tcccagtcttaaacttatttctattccaaaagttaaatataaaattttaggaaaagatgttacatgtcatgaatgtgcactcatacacatctacaaatacaaaattatttattcatttttactaaaatatttgctcaaaatagagactaactgatgtctgtctagcaacttacaacaccacttccccacttaacttgcactacatgctggagtcctaatggtactattaccgggccagttgcaattttttacacagaacactgatgaagatagtaaccgaaacttgacacttgaacgcattaaaaaatcatgcatgaatcatgcatgtaaatatttttaggttgctttctgaagccactcagttacctatttccccagaaagacatacaaaaggggaaaagagtagaaaccaagatttaaaatatgacaaaattatcctctataaatcgtacagtttctagactcaaaagcaaaatcctaccaaaattaacacaggaagatagagataaaagagtcccaaataaacctttcttccagccagaaaccatgtgaatgtggaagtttcttcagagtaaaacgtgtatcttgggttcccaggaagctctgtcagtggcagggatgtggaattcactggccctgcaaactcatccctcccaggctttcctgctaccttctggagcagtgacaataccaattctagaaaccaggagtaaagagggaattgctctattgtgattcccagtgacccatagaacaggatttcactagtcctatgacatgtgactgggcttgggaagttcccgtgtcagttccaaaaatcctaaggtgggatcttcgctttgtgaagcaaattaattacacaaccaaatattgccacattcttgaggtctattgacacaatgggaacttcaacccctacttagcttagcattttttttttcaagagtgaaaagtggtccacgtagagcacaatataatttaagtaaaggaagattaaaacatatttttatccatttcttatggtgggaaattacatgttttagatttgaggtccccctctcaggaaaccctttcaacttcgtattattcactcctgagtagtatgtggtagaaaatgagtggaaatcagtttgtccactatttccgagtcttctgcactgcaatactttcatcaatatttacaatatctcagtcctgtttacagatgtgtatcacatcaggctcaaccaagttacagaattctctgtggtttttatctggacatctaattaaaaactaaaagttattattctcacaattatcactgctttttaaaaccagtatattcactacatgttcttcttagtttcgaaatgagaaaataaccagtattttatgtataggatatccaataataattttattaagaaagagacttaagaaactctccccctttcccatatccctggcaggataaaatagcatttctaatggtaaatactaaagtaaaaaaatgtgaacagtcatggaaactgtgagttttcccaacacatgtgagtcacttaatatccccagaagtaatgtagccacccgaaaaaacacacagattcaaaaggagatgatgatttgatggtttttcctgtgtctaagtaagattggctatgactaaataatttctcaattgctggactaaaacaagccaaaacaaacagtgtttaaaactttaaagtatattgtgtggtggtgactgtccaaggtcttgctaaagtcaacattgatagataatactgagatgagttagatgcaaagggctgttcttcaattcattgattataaaaacaaaaaactctgcagcattgttgcaaccagaaaaaaataaaaataaaacattctcacctatatattaacaaatccaacatgattcacatttaataataagaggggaaacatatatacctgaggtagttaaagttcaaatggttgcaaaatggtaaaatatttttcttagtataacaatggtagaataattctcagcattttcaaatcaataaaaattttgtccatatcctacagtatatacatattcattttccctagcccttttgtaatcattcacatttctttaaatgaaaaaagtaccaggagtatagtttaaaatattaaatggaaacactgaaacctaatcaaggaaaagtcattcatttaatcaa

SEQ ID NO: 57689 - DNA, 2070 bp, Homo sapiens
tgttaagtcgtattttatcctattgagttaaaaaattcctggctatctccaaatataaattagtgtttgtctttgagaatgtcactgtcttcataaggatttctacaatgcatattccatatcgaactgaacctaaaatgcatccctgattggccttgtcagccagaaggctattctattatccatcatagtgcctgacatgtagcaagcactcaagaatacatatttgttaaagcaacaaatgagtgaatgaaggaattaactctcagtcccttaccatcttagaagagccttggacaaaagcaaaataatcagcattacaataaatgtagcatgttctaactgtttttaaaatatttcttttggatctgaggtgaacattcagaagtctggatatgcttctgaaacaaagagtgggttccaaaaaaatctgagcagggtttgcaaacaactaagatcagtcaaatctcccactaggaggttatggccatgcatagcctcaaaatatccagcaaaagcatagtaagtaagtaagatagtggactctggactccactgcttgggttcagatcaagtctccacccctgactagccatgtgacctctggtaagttacttcacctcccagtgctttaggttattcatttataaaataagaacacaataatgcttccctcataggattgtttcaaggaccaaagggattaaatatttgaagtaactttaaatagcatctgtacgtattaggtactctattggtgtttaataaatcagtagtcacttaaaagacctcccaggctcaagaaaccctcccactcagcctcccgagtagctgggactacaggtgtgtgccactacgcccagctaatttttaaatttttttgtagaggtgggggtcttactatgttgcccaggctggtctcagacacctgggctcaagcagtcctcttgcctcagcctcccaaactgctgggattacaagtgtgagccatcttgccggccagaagacaaccttcttaaagacagggccaatgagaaactgctatgtacttccgttgaattgtcatggagttccttcccatggctatttgtaaatttcaatgtgtagcccaccattatgcagaaaccagtatgtatggtggcagctacacaggtgtgtttctttataaaattatccctctgtacaggggaatcctttacacatttcagtgtaggattccctccttgaacaattcaaacatgttgtttctatggccagggagctgcatggttctcctctgtctcacatgttttggtttattccatagctcttatgtgtctcctgtcactctggctgtttttggttttgttgtctgtattcaacggaggcttgtggtcatgtctatcccaagcgtctgtgttgccagttgcgcggtttgccccctctgtctctcatcattgcttttggctcagtcccttgacaggaaatgagagatttattttatctggcttgaactacattgttccttcctgactactggtgttacttcactctaaataacgtgactttgtgctcacagtctgcccaaggtcaaagcctgagggtaatagacacatttaagagaggggaggagactataaccacagtggggtgggcaagaagagaatttctaaaaggtagtgatgtaaaagcgaaacttggggcgggtctaaattttctggtgaactcgaaatggaatctgttctgaagagctgaaaggagagccttttttttccctttccagatgttataaatttaaaatgacactgcgaagtaatttaggcttgaaatttaaatttagctttaaaaagaaagcatgagttatctggcagaagaatttacaaagcttattaatatctgtgatatcctaattgtatgatattaaattgacatcattatcagaattcaaatattcctctttggtttgacataaaaatataagagaattataagagtgcataaatcagtaaagacaacttaattatgaaaaagtaaaacaaaagacatgctacctagcctcagaacttgtagctatagaaaaggttttaaaat

SEQ ID NO: 57690 - DNA, 682 bp, Homo sapiens
aacttgctgaaataaaaccatatctggtataaaatgtagcagtggttaaaagttcacaatcattcttaaaaatgttttaaggaacataagcaggaaaatattacacctatttataactaagcaatgggggaaaaggtgaagagtaagtaaaagtccaaactggcacaaagttgaaccaacaagatgaacacaggtggtcagagattttatttcacctttcacctaaaagttgccatcttttcgagagaactaactctaccagtggctcaattctgattcaaaaggaaaagagtcactttctgagtcataacatcactctggttttcctttcaatcctctgttccaagccctaccaaatcccaacccattttaatttgtctaaaggtggcctggccagcaccagaatttaatgcttccataaatgaactctgattgacatgaaagatgactcactcgcagagaaacttgtattgctgccatttggtcagtttggggtttgtttttaaaatgaatgccagtggaggctaagcagaagccagggtgtgtttttattttatgtctcaaataaaaataaagagctgggtatgaataatcaaaggggcaggcgcctccctggatacttctaaaccttccaaaagcagtcccaaggctcagcaaaacgtaatatagtcaaaacaaccat

SEQ ID NO: 57691 - DNA, 856 bp, Homo sapiens
attagagtgtaataactgcatagcaaagcaactgtgtaattaaaatagtcatataattttaaagatatatcattataaaaattattatgagaagaacagacttcagcattacaagtggagaaccaatatcggaaagagtctcccaaaatgacatagcagtgattacacagtgacagatcagtgtatctgcacagggaaaatcccctagttagagatcacagcaggatcccatccatcatattacacattagttcagagaactaaaactcttgaagcatttttggcagcagggagaacttctagcatcctaatgcttttacaaggctggatttttcttttctccccaatgtgcttcaagatttcataacacgagagacataggagcaaaagttaaaatgctttaatggtccccataggctatttaaataaacactgtgattgcaatttagacaatctggagtccattcaatattaaatccccaccccaatctacagctactacacaaatggggaattcatggtatactccacatagccatttactactgcacctattgcttcttgacaatcatggggaggagctagccaggcctaacattacaccagttaaatctgtcaacaaccggggagagcgctctgctgagcaaacatactgatccctctcacacagcccgtctttgtcctgagtttgccgcaacaacactaatcttctcatactatcttcagcagtgcaagcagaaacttctcctgcgaccagctgtaacaaaagatgcctttctttattttcacacactacatgtatatatttatgctgtcccttccgctccctccccctccatttccaccccttcctaca

SEQ ID NO: 57692 - DNA, 563 bp, Homo sapiens
ccatagtacttaattcataacaggtggtcaataaatacgtggcaaatcacagaattaaagaatgacgaaaaatgcttgaggaggggtagattatgttttgaaaatgctaggcaaagttgtttatcacttccatgatagcatctgcagaaacaaaattataaaaattgaaagttagatggaatcttagacattagttgatcccttttcctcattttaaagatgagtaaaccgaagcacaaagtaacctgttcaagggaacatagccagataatgttgaaacttggactggaattcaggtttcccaattctcattcaagtgttagctatgttctatttctatggttctgaatcaaacatactgcatgggttctaaataagtttgcaattgaatttgataagtttatcaacacttcaaatagctgtgacaactattctgtaatgtgttaaaaggagaaggggaaaaaagaagaaatatagagcaaagtttctttccttgagatgcgtggatatttcattggcaagataagaattaaccttatgagacagtgaatattattaaaatg

SEQ ID NO: 57693 - DNA, 1215 bp, Homo sapiens
atgctgtgtttgatggtggatatttttaaaaacagttttaaaaaaaggtgactaagaagtaacactagctatggaagaggggagagagagagaactttgtgaagtgggcgtgataatacagtttgtacgaggaggaggaggtacctgaaaaaggaaagcttgacagaagatacgatgtttgttgtggcttttgaatatgagccacagttattgaacctgtgattacctggacaagggtaagcaactacatagagtgaaggctggaaagctctattggagtgagagagataagggtcctgtttgcctggcttaggtgtttagactttagcctgtaggcaactgaaagtcattgaaggctttcaatcaggaggatgacataaccagatttgcatttttaaaagataactggcatcatcagtgagataaatggatctgtaacaagagacaggaggcagggagtctgcttgggagaactctgtgatacactgtgactcatggtaagaacctcaagtaaggtaaaggcactgatatttgagagcaattatctctatgctctccacaaagcctcaacttcacatattcaatgtgttaatttccaggaactacaagggttttcgaaaactttatttagcatttctagaatatgtatctttacagagcactttttaaggcatttctgaaccaaacctctcaacttccttagcaatgaaagaatgttttattgtcattatagaattttttaatagaaatatggttattatgacttagtgtctttcatcaatgtcgtgaaaccatcaactgccctccttctctgcttaccattaattttttacacctgatgatacagcaaaaattacaactctgcccaggtgcaatttctgtctcccttcccccatgagttttgctctgttcaacatcacctcacgtagcagccaaaatgatgaaaagacatggcatttgtttaaattaagagaaaaaaaagtagggtggatagaaatgctctaacaataaaattaaaaaaaaaaaaccagcttcagaatttacgcaatattttcattttaaagataaagtaaacttgacccagccaggttaaatgacttgcccaagataagatcaactggtgaaagggtttttctgccaagaccacagggaaccatctaactgttaacccatacttccaaagttgttcatgtcataaattataacaaagttgtt

SEQ ID NO: 57694 - DNA, 1141 bp, Homo sapiens
taaccatttctatgattgcaatgctaacatataggaactcaataaataaatgttgaatatcaaattaaaatttgacattaactaagtgccacaatgttatctcctacaatgatatatctcttaaattttcccacatttcaagaaagtaacatcacgctcttaaaaagatcaaaatgaaatttggcttagttgactttaatttttgtgtgcatttatgtagacaaatataatttttatctgcatttgaaacttttattgccaatgctggtttctattgtctgtctatttacttcacccaggactatggactgtgtgttgaaacttccaatgtttgaagatctgcttctttgccctctgaactgtaagtcactttggttccaaaatattgtttgctgcattctgattgatctgtgtgtttttgcatcttccccaggattctacagctatggcacattgcttaaaccatgcagagtgagcacaaatatttgataagcaaagctgaatttttaaaaagtcttttagggggaagaaatggcattgtagctactgtatgattttaatacatctcattggaatggctaagttaaaaaacaacaacaacaatgaagattgccaaaaaagtaaacaaaaaacaaactttaaggacaaattccatgtacttgcacttatgtgagttagaattattttagcctgctctctgtaattattagcagtaatacgcttattaacttgtgaatttaatacatatggcatcagtgtaaaatccaatgatgatatcaagagaaatcacaaaatgatcgttttctctctttatcctaagctgagcaaggaacctttccaaacagtgtgaactcattggcttccccataactctacagagctcgcgctgccatataactgggaatcagagaggtgaggtcatttcatcactccttgcaaaaaaatgcaaaacgtctgctaaaatctgacttcatttgatttactctccaagactgttttttattaaatatgtttgactgctatctctaattaaatgtagaattaattttggcaaactaaccacagatgcagtttatgttcaattttatcagacagatttatttataagctgtcaacttcttgaaagacttcattttggagc

SEQ ID NO: 57695 - DNA, 841 bp, Homo sapiens
tcccaagtccagcaaaagtatttccactccatgttgtgcgctcatgtggaaagaaaattttatattttgttatgttttaggtcacagactcctttgaaaatctgataaaatcacatgatttgtatccttttctcaggaaaaaaaaaaatgcacctgcatagtcttatacacaaacatttcatgtacttctagggagtttcctgatgctaaaaggttcaaggactcaaatgaataccctggtctacagtgcaagtccattctctactagcagtataatttgagaaactctgaatttcagtttcctcatctataaaatatagttaatgatgtcaatctctctgctgacatcttgtaactattttgaacacaaaaaaactttaacatcaatgtgtgtgaaaacaagctggtgttgcacagaactctgctaactctcaagttgctatcgatcctttaccctagtcctttaatgttgtcacagagtattagtgagtactacccccatctcactggcaccatcaagctttgggaggtgtgagtcatcagacattgtttttaacttaacctgggcccttggagactgactggatggctgcaccgatactgtgccccttacttcctttccagcttttgtttgattactgatctcttaacacacatcgatggaacttaatgtactagctctgctttccctctatgaaaacatttgtatagctggagttttacatctaccagaatacacttggctcttcattggcattaaaccttgatcttcacttgagtgcttcttaaaattattgtttgtgggctccatacttgacatctctgctctcctccattggtg

SEQ ID NO: 57696 - DNA, 700 bp, Homo sapiens
atgtacatccaaagactactttcaggaatcaattctaccatatgttacaagagaaatgtggatgaaattgtagagcagaaacaattaggtgcacaggtatgtagcatcaggagcctttatttgtgaaacctaaaatctgtgccttctttattaaagtaataaccaggatttttatttcagagggtcattggatttggccaaggtctttcattcttgttaattattatgtgttcagagtaatgcacatttttatctacaggtggcagaccttttaaaaatcaatttcagtcatattcagtattttgttttggtgtgtgcatattttttagctgccatccccattaaaatgtaacagtgtgctattcagagttctcattaatgttgcacaatttagatgatagatttgtcaacaaagtggctcattctcaaaggccagtgaaccctgtcgggataaatgccttaaaaattgtatattgcagggtaatctttaattatatagaactcacttgacaatttacagtatattgggattattttcctttttcaagcaataaagcattttactttatagattagggtgactgagggaaaaaagtgattggatttgataaatagttaaagcaaagagcttgcttatttgcaagtaaaagagaaaggtgaccaaaaggcgtgtacaaatgacaaccacttaggatcacaa

SEQ ID NO: 57697 - DNA, 1560 bp, Homo sapiens
aggtcatagggagaaaatgaagaggattagtggaattgtatagagaaagaaaaggaagaaaagaaaaaggatggcagggacggagggaagggagaagctgaataaaataagggaaggagacagaatctttttgttatccacagcctttggtaaagttacttagaagtttgctttaaaacaaaattgcctctttcagtactcagtgatattttatttctgtgtaacttcctcctcaaataggttaattacagaggcaattagtctagctacacacaggatgtcactattcccttatataaatagaaccagcacacatgtttcaggcagagaaaaatatctgtaaagaccaaatttcaaaatgttatggaattctgtgcagtgagatgcacttttgcccagtttgggtgaaatttcgtgttttcatcattcttatttgatgaatagtccttatgttttattattctcatggaaattctttatgtcaactaggaaaatcagctcaaattatcataaaaagtccaaaaagtagagggatcatggcactaggtaactgaacaggagtaaggccttgttagcaaggcaaatagataggaaaaggagagctagaactaaaaaagctaatcttattattagtttaagcaaatattctgacctatgcagcctcgaggttttttgtctgagtacttcattttacatattgaaagtgtggaaattagtaactactgtagttctgagatcttagtggttcatagcgcaagaggcttttaaagtgagctgttctaaaaactggatatatgtatccctgggtcgcaagatccagactgagtgatacacatggaattcacaggaaaacttgttaaatcactaataatggcatccattttcgcctgaaacccctaactactgattattgtttatacatttatcaaaaccaaaatgataaagtgctcttcaaaagaataaattgctatatctagtactaaatacatattcatagagggcactccgtccttcttgatggtagctacccaggatgacaaaattgaaagacgctgatgacacactaaacatctatggttcattaactcgcttgtttactgtggttacagtgaaagcaaggtcttaggtcagctcctcgtatcgaccagcacattcctttctcttctgtggccatagaatattccatgcagttttgactggctctctcaaaaaaaagtttgccattggtcacaccatggcctgagagaggaaattacatgaccattacaacaacaaaaacaatgcagatcccatttcttgctcagtgatggccccagtgcattcttctcatacatgaaacactgcatgttgcttataaatcaacctagaaaaatgtatgctcgagccctgagattactctgcctgggtgtgaatcccgccccacctcttactagctattgaaccatggcaagttattcaatttctctgtctccatttcctcagctgaaaaagtgggtataataatactacctgtttcatggggtactgtaggaggcttaaattatataatacaagcaaagc

SEQ ID NO: 57698 - DNA, 795 bp, Homo sapiens
gcatctgaggacagctgccattctatttacagcattatctaaaaatggcaacattaaatccatcttccatctctttgagatctttttcaactacagaatcatctcagatgttctgcttttagagcaaaatatatgaggtgtgaatgtgtgtaacagtaaaagactaacaggcagaaatccacgacggtggaaatatctaccagcgcttgataaaactttcctcctttccccatctcaagaaaagctagggcaaggaagctagaaaacatcagggggcaaattaaaaaggtagaaaaccctgcccttatacccccattcagaagtctaagaacctaaatattgatttttcagggcttttgttgctgactgtagagattttgagcctagactgaaaaacaaacagcagaggtgtgtgctgacaaacctcccaaatactatactgcattccagattttttttgagaaagttaaaattcatctttcagcttttttaaggtgaaaaagctgtgaccgtgctaattatttattgtaagtctccatattctacatcttaacacaaattcactgttaacttcactgaagatcgttaaaagaagaggtaaaacaaacccaaaaaccaaaaaaaaaaaaaacctgagtttacagtaagaacatacagaaatgaccttgctggccagtctgaacgacttgggaaaatgtgcactctttcaattgctcttctcttcaaatttccagactctacctcttctgtttcaccaagcttcaagtccatttttaaattcaatgtgccaactag

SEQ ID NO: 57699 - DNA, 1067 bp, Homo sapiens
tccatgaaaagaacaataattagagaaagtgtcattgacttaaaaatgtcattttttagttgaaaattaaaacacttcccccaaattcttccttagcatccccaaattatccaacttcactcttaggtctaaggaagtgaaaattccaggtattttgactgtctggctcagcttaccctaacttcgcaatttccaggtaacttatgtaatgttactgggagtagcagaagagaaacaaaacaactatacaaaaaagcctagagggatttttctatttggctggttaaaatgttcagaattatttaagagttggaaaagaaacaataaaccacaccctcaatgggctctagtctgaattccaccattcgtttataccgtgttttccaatccaagatttcagcgtattaatgagaataaaagagcacccaaagaatgcattggtgtcagctaagcttgcttgaaatcaaacttctaaaacataacttggtttaagaacacagcctgaatttattacttacaccttgctctttatgaatatacaagttctactggcttcttcccaagaacaaaagctcatctccccactatttgtggtttctacaagcgccactaagcatggaatctgttatgacacagagctgtcctagactttgtacaggaggaatttgttagaaaatgatctcacttataacacagtcctccaacaaagacactgaatgatgaggctgcaaggtatatttacaaatgtataaaatgaaagttataggtcactgtacaatctacagctaggctatggtttctcatataattttacagttgaatcaatcatgaaggaaaattaataagatgtatctagattgttactgtttaccaaatggctgcatctctctctccaaaaatactatttgctgaataaatggctacaaggggaaaaaaagcagaaatttttgtttgagtatgtttatttttaaaaaagtatgttcctgagtttcaccttattaactgttaatggaaccttcctaagatgccaggcagagtgtcaaagaggtcaaggatggattttagag

SEQ ID NO: 57700 - DNA, 2204 bp, Homo sapiens
atagggacatagtgcttgccgtttacctcttctcctagattttccacagttggctccttctttgcattcaagtgatggtgtaatactgccttctcaaagaagcccaccctaactcactcaatctacatgggctcatgctctccctgcacccttcaggtatagctctatcatagttctctcactgtattcacagcatgcatcgccatcagaaattaagtgtttttaaattgtatttgcttgctcatcgtctgttcccttatcctcagtcagagggcatggcccgtgaaaccagatgttcatttttgtgtccatccccatcgtcccccctgcctggcgctaagaatatttccaggcacacaggagatatgaaatacatatttcttgggtgaaatagggctgtagggcttaagaggaatgtcttgcatctcctggacaagaaaggttttactaagtcaacagcatgaggtgtggactttgaaaaagatgtggcaattcagcaaagatgggtgctatgcgcaccgcaaggaaaggggataatatgagcaaatacaaaagggaaggaacctggagcatgctcaggaaggatggaataattcagtctgaatggtacacatccaatgtgggacaagtagattgagctaacattatggagggtcttcaacaacagaaggaagaatgctctgggcattggggaaccaccagaatgtttattagcaaggaagtgactcaggcaaagcctagcattggaaagatgaaaggctgatttaatagtcctagtccaggcgaaggatgctaataacactttaaagtcactctgataaaacactaaaaatctgcctttttttttttttttttaaatagaaaactcccaaaagagaacaggaagagaagaactatgaacttagtgctgttaactattggaacagaaagtacaatgttacaaagtataaagttgaacatgatgatgaaatttgtttctctaatatctgttcaaaagccctttgcaaaataaacacagattttattatatcaaaccacccaatgtgactcatctctttggaaatgtgtctctggcatattctttcctcaggcctcaaattctttcagaaaatcaagcagattagtggcctgatgacaggacagaagtcagaactcaaaatcctaaatccagttctgccaccgacttgctgcctgacatagagctttgtgtcatttttgtatttataaaccatctttatgtggtgagtgttttacaaagtaacgaatctctgactaggaagtcatataaattttcaaaataatcacatacatatattgaaatgaacataaatttttaatggagtcccttattaagtattcttgaattagcccgttcttgtttatttctcaatcaggcagagaaaaatagaaatattcagaagaatacatatatgtgtgagtgtgtgtgtctcagaaaccatggctgtgtccttaaaaattcccagataacagaattgaaagaaaaaaaagtttctttttaaacgacatgatgatgtaaacactaggaagtttaaaataacacttgtataaactgtttgaattgaagagaaaaaaacacaccccaaaagagttttgtcagaataaaaagaaaataaatcccaaatcctgacagcaacataaaagccaacttctcccccttcctttcataatggcttttctattgagcttcattttgacctttcattactttcccaacattgaagaatattgcctttcaaaacgctccatttctctgcctgttgtactattattccttctcccattgttgagagttcttagctaccgctgttccaacatgcaatgcacaatctttggcttctcccaaacaaatataaaccggcatttttacacactttccacttcaaattcatgccctgtataaaaaggaaagacaataataaagctataaacatgccaagaaactggaaacagaaaagttggttatctattttctagaaaagaaaccatcggtcttataatcaatctataaccaatgcaccctcccctcctcagcagcaacaggatgtgctgtgtatgaaagaactcaaacagcctgcattcattagtcagagcctggagggtggggcggacccactgcatgatctgattgataaagtttcattacaaattagcccatctctttgataaaaacaagcaaggcagag

SEQ ID NO: 57701 - DNA, 1379 bp, Homo sapiens
gggctggccacttggggaagcagcaagccaagaaaaaccctgcactctcagaaaacatgcaagagcaaaatgtcgaagtgagaactggagttaaaattctgggatggagttcttgtcaatttgcccagctccatgaggttttcccatccctttaccaggtacaacaaccagacccagccaaggcaaaggcccaaactggaagccaccatggagcccaaggcatgaaatgcataaccacctccatcactgaattctaaaatgcaggtcatttaccatcccatatttgggctaaaatcggctcttggcttagctttactgggaatttagcctatgtgctgtgaatagagggctcactggaagaccccttctgcaaaataatactgtcatagttttcccgtctctcctcacccacataggcagaaatactaactgtaaacattgatgaaaaacaacccttcataagtttctatttaaagtacaaatactcctgggtatagcttagaaaaatcatgataaatttgtttgtttttaatttgctttcttttgtgagaagaactaggacaatagaggatgtcttagtatgtttggggtagttaccaagcgatctgaaaagagggtaaaaggttagagaagacaggacacactgacagattaactttgcttgcttttccaattgcagtagcccagccaaggattttgtgatgaggaattaagagttttaacagactcttaaggttgaaaactttctggacactatatcattatttttgtatttacagctgggtaagcgcagtcactgttgctagagcatgaagtatgaaaatcatacagaaaaataaggtatctgttgaaactgcttctgctgttttcctcgttctaaaatttgcctcatatcaagtgcaatagaacaaagttcagttcctgatagaaccattccataaagctattctgcctctgaaaaccattctctaccacggctggtcccagctccactataagcggctgacaattgcttcccccgccccaccaccctgtgttccttcaccccctcccagatgccaccaaaagaatcacagaaagtctctcagtagcactttgcttctcagcaggaagctgtactgtttgtgatatccattttgattcaaacctaaattaggcctctggaaataggtaatgcacaaaaagaagcattttgtgtcaccaaattattattataggttactgttaacccttggaagatagaggtgagctccgtagctccccactgaggtgactatttgtcatgaaatcataggccctacctcaaaagatgtttcaggtgagcttgcaataaggcaaactgtctagttgacctataggattctgaaagctagtttaag

SEQ ID NO: 57702 - DNA, 936 bp, Homo sapiens
tattctgaagttttcgatgtaagacaaacaggaataccaccttctaaaattactactatcctaccatcctccgatggaacattaacgggaagcaatattctccaaagctatgaagcatacactgccctaaattacattgcagtcgctgccctgagctcacacatttttgaatagaaaggctcccagggatctctctgtactgactgcatttactgctttaaaatatttttaacccagacgctgaagtgccagccttgcagttcctcatgctaatcccagcttgggtggctgttcttaagggaaagcattcaaaacattgtaacagtgcatcaactttgacccttttcacttaaacatgagactcttaaaaaaaagtttgaattccagagggaatcactgaactttgacctgcttaaaattagttttgttttagtgccttcacggtgactcaacaggccaattttccagacacttaagacgtttctgcccctgaagatttcagttcaagtctacagctatgttcgccggtcagatcagaacactttgtcccagggtttcaagcaacaaattcccagatctccatctctctgccagatgttggcattacttggtattaagctggatctaaacacacacacacacacacacacacacacacacacacacactacacgataagaagacagactctaatatttttttcttccacttagagccttttaagaaacaaagttttccactcaaaattcagtcatggggaaatgtttatcagaattgtataaacattacttactagcataactcctacaacactaaaactcttaactttcggttagcagtactatgacatatttaaaatatggtctttctaaatctatctttatcaatggggaaaaaacacgctgggattttgttttctaatctattacagatttt

SEQ ID NO: 57703 - DNA, 1079 bp, Homo sapiens
cagccatttttctactaaaactctggttaggtttagaattactttttaccttccctccccctgaatatatttttcagatcaaatgagtagttgcctcttccaacaatgctgaacccacttttgcagtcattaccttagcaaacattcttcccctcaagattccaataaccaggccttgacctgtatgggaaatctgcctgcttaaagatctctggatcgcatgtcactctgggaattctaactgaatgagggcaactctcttttcaggctgctttcaagttcccatctccccccagccccaaaccaatactcctcattcattcattgaattattcaccaaatacttattaaatagctaatattagcaagacactgtgctgggcacgctggtggattttcataacagtaaaatgaaagtggaattgtccataaagcactgcttggtgacagacaatcagatgtagacctcactgaacgttaaatagattgtctaagaatgtgcagttttatgaagatttattattttcacgatcaccagtctattggctagcatctgtaaagatttagcttctctctttacaagatatttttgtataacgtaaatgcttttttcccctgtccatgtggaagcgctgtcgtttgttcaataaatatttgctgagtgctacaatcatacggagaacaaaacagatcacacggagaacaaatagacaaggtccctatcctcatgcggtaactgttatcccaagataatagacacagaggactcatgttttgatcccatacaaaccttgggttagtgtttttcattgtttatttgtttgtataaaaggcactttcctgtaaggaccatattagcctaattaaaaccctgtcctcgtcttatctcaccaggactccttttcagcctactctttctccccttctctagccatagtaatcataatcaaactcttctagtctgttttctacatgctgctctctccttctgtgtgtttttattcattgattaaacaaacatctttaggcacccactatgtcccagacattgtcttatttgggatacaggactggataaa

SEQ ID NO: 57704 - DNA, 3758 bp, Homo sapiens
ttcctttaaaattagacagatcaaaatttagcagttctgtaaaggctctaagaaatcgtcctccttttaaatgctataaaagtcaaacttgaaaaacatttccgtatactttaaagccatctggcccttaacctaatcactcttggccatcgagcctcactcccgtaatcctgatcaaaaattttcctctggtttttctgatggaaatgtccattgcctacaaatctcacatgtgcctacttcattggcctgtttgtgtctgtgtgtgtgttttcagggtactaggggccattatttatgaaaagcaaggaaacaaatcactgtccagtccctttgcagattcccacacttactgccccaaatcccacagatttcccttggtcctgcccttggctaaagaactctgctgagccagaaggcagtccctggggacacctccttatgccttccttgacaaagtcctttggctatctgggtatgtgaggatctcaagtgggttccagcaaatccctaaacttttgtaagaaagtacagttgactgccacccagagtgcctggactgcctggcaccgagtgtagggctctgcatattcacaggattcctcgtcttgacctgctttagctgagaagggaacacattaaaatgaattcacattcatcatcacattctgaatttagtcacagaaaccagcgtcttcagatattcaccagggtcaatctatttattaatatagtcgctttgcaaagtgtagggaaaatgactaataaaatatgtaaacagtgcttcgtgtgcatccgatcaatactcaacaaactgctgctctccaacgcaaacatttccaaatccaatttgatttcaactcgtataacctcttttcattgcttcttattgctgtagccccaaagtgcaagcgagatttcccaaacccgcgcttaaagtgacacaacacgtgagtggtcttcacttggtacactgagtgaggtggggggaaaaagtagttgcaattagaattaaagcttccggtctctgaaatccctagaatcctgaaggatgagacttgtttcagaaattccgggcgggagggagggggagtggtagggagaaggattgcagaaagcgaaacaaaaagacgaaagagtcgggaggtgggggtgactaaggttagggggtgggccaggggtcgctctgatatcctagaagggttaaggggctttgtccaacttttagggtctggccttggacattggccgcgatgcccagcacagcccagggttctccccgcactctcctctcgcatcaaccacctccaccgccaccacttacaaaacaataccagcaacagtacgcaggcttcccaacaaaaatagaaagttatcccgtctccgggtcggggtccaagccggcgctccagggtcccccggccagccgcccccggggatgacagggccactccgcgcctcgggccgcctcccacctctccgccacccccagcccagtccccctccctctgtacttgaggaaactccggcggcggccccctccctcctccgcggctctccagctggagccgggaaggagtgctgagtggcgggcccggcgagcggcagaggggagctctgcgccttggaggtctgcccacaacaacatcgggacgaacaacaaagttaaaacgcagcgattcacgcaccttacccggtctcgttaatgcctcctccggcgtgggatgcaaagtggcacagaggcgggctgggggcccccgggaggagactggagatgggttttggtggctcgcctttttcactctgtgtgtgtgtgtctgtgtgtgtgcgtgtgtgccggtgtgtgtgtgtgtgcgcgcgcgtgtccctctctctccccccgtctctcgctcgcccgctcgctcgcgctccccgtgttgctctcaaggacgaggtgaaatccctttgctggtcatgaggcggcttcagagacaaacaacacaatgcgagtgcaaataacaaaaggcaaaaagacagtaggaacaatgggggaggcgagggcagcgcaccagccggcggtcaccgcggcccggcgcccgccccggggggtgcggcgggggcggggggggggcgcgggggcggtgccgggggctcccgctccctccaggtcgcccccgagctcccgcaagcccaccctgacctccttcttgcagctcgccgcccggccgccctctctatccatccgaagggaaggagccccagagttttcttccccgtctgctgcagagtaactagattgtaaataacgcggcgattacccacaccgtgcaggaattttttttttatctgccctccacttaaaggagcgataaaaatgaaatggcaggagtggaaggagccagggagagcgggatatctctagatctcgatggagctcgcatctataaatacgcattcatgtttagtcaagtccctttgtcaacttcttcccggcgcctgagcctcagccgctgctctgcgcccaggacctggcccctcccggccccctagtccagtggtcaggcggtcgggccggcagggagggcgcgcgcggggggctgcggggtccgtggaacctttccgggaggcgagccgcgggctgctgggcgcggaggctggagccgcgagaggttcggctgctgaagcggccactgcctcccagagccaggctccgcgccgcgcgtccccgccgccgccggcactgtgcacccacctactcctcggagattggggtaggggaaaaaagttttgaggcgctctcatctctgcctccggggtggttgaactggtttggttttgtgttaagcgaagccaaaaaaaaaaaaaaaatcaccacacacacacacacacacacacacacacacacacacagacacacacacacaccccaacccaatgcccaagaaccagggaatgaaatttagtgatatttagggagaaataaggctgggcgctgggctccgactctttctgccgcgacacttgagtgggcgcgtggagccgagagagaccctcagagtcccatccccatcagaagaaactccgtcggtgatgccctgagcagaagctgtggggctgatttaagtgtgtgctctgacagctcccgggctgctccggcgcttatctcttctaatcttactttcattgacttaaaacagctgccggtttgccaggggaaaaaaatcctattaaatctcaaaccagggtggggcgggggcgggggttcctgacagtgatcttcccagagctagtgtccagaaaagagcagggggaagggagagcattcacgggggtggctgcgtgttgggaagggggtgatggaaaggggactaaggaaacaattcgagcaacacgtttcttttcctcgctgtagccttctctccttttgcttttatgccgaggtgcgtgttctctgtccccatctctgtaattctctgcagacgcgcaaccatggactgcgccgcgtccctgggcacccccagcattacccagagtgcaacaacaccatcaggagatcaatgaccagactctatttattcttcacgcgcctagaagagcaggactccggaggagcttgggagcgaggctcggggcttggctgtctctgggcgatctctcccagactttttcgggctgatttctaaacggcagttagtaagcaaatgtaatttctcaatgcatgccacacataccaatcacaatatattcacctaggaaagtgagacatcctttctacccct

SEQ ID NO: 57705 - DNA, 759 bp, Homo sapiens
tagaaatgtcatccaggagcgagggtctggaatgggggcttcaggagtctgaatgttgtactatcctactgtggctgagcttgtatccaagttgcaagacatagtcctcttaactctcccttctcctctcttcaagtgggaagaaggaatccctttcagagccatgagctgtgctgcctggggttgagggagggtggtgcaagcactcccttggccgcccaggctggtgtctcactaggtcatgccccgcaagtccactggctctgagcccagaacagcagtagaatttgcctaggtgttgcaatccttgtggcctagactgcctttcaagtttatttaggaccccagagccctttagctcgtggtagtgaggtttaccagaactcaagttgcaactgctggggtgggtgattttcctatggctaaacctggtctaaatgctccctccattggcgttggctgagttctacccagtgttgctttctgctgtgacacgttagtgctgagttccaatgcaaaattgcacaatcactgtgctctccttccctcaaatgcacagattctgtctcagcaccacactgccactgctgtgggatggagaggagtggcactggcaataaaagactgtctttctttgctccttcagtgcctctttcagtgatatgaagttaaaaccaggtactgtgatcactcacctgtttttttgttcttataaaggtgcttttttctgtagatagttgttaaatttagtattcctgc

SEQ ID NO: 57706 - DNA, 1333 bp, Homo sapiens
gctgtaaaatatgactggctcttgattacattatttaacactggtgaagcagaatcagtggtcgcccctccacctgtctgcctcatttgccttgctcaccattaagagtcaagctccactgcagtagtccgcagagtcggagcagaaattgtgtggacaaacgctcccgggttgcccggacgacaggccccgcccacttgagctccaggaaaagagcgcagccgcgcggaggctcttccggccggcgccccgccccctttactgacaggttgcccacctcccccaacgccaccccgcttcgcagtagacggacagaggagtcgtagcggtcgaggcttttgcggctccggcgtgccggaaagtgcgtgagtgccgccgccggggagttttgttccatttcccggatcctggggtctggaggcgaaatatgctctgggcgaggaccaccgggtgtgggaagagggttctgagcgtctcctgacgttgacggtttatttcctagagtgtgttgggtctttctgtgagggtttcgagaaggaaacaggcatgcgactggttcatgcagcggacacccggtgggaggcctgggcctctgcggtttaatccagcagggggatggggctcattccgcaatttaaagagagaaataagttggctccagagggttggttattttaagattaatgaccttcggattcttctttctgctctattgtttactttctgtgcagcgtacgcgtcctttttcctaagagcgccctaaacaagaattgaaaatgaagcaattcctggctaaaatattccttaacatgaagatcgctgaggccccaaagactcattagtttcccgaggtcacagactaattttactaaccacacaacctttagaatttcagtctcctcccacatgaagaaacgccggcaccttacaccgacaggaaaactacaattaagtgaggctgttctcctcaagcccgactgagttctctgtaattgtagggcatacctacaccctgttttagcattatgagacctgaaatacttttaaattactggcaccatttctcatctctgaattataagtttataatgctctatcccttccagtgttattgactacatgcattattcatagataagtagtaggactaagctagtctttgtgggttaaagtgttattatccctattgtaacctgtaactattataggttgtgtaatagttattagcattttacatccatatcctggtagcaagataaaaacattttaatagcgacttcgtacagagttcttactcagtttaccatagctgtttgatatgaaagttaaggct

SEQ ID NO: 57707 - DNA, 902 bp, Homo sapiens
ttaagagaactagccaaacctagagattgtaaaactttttcacttcattgtttaaaaaaaaaattaatgtcttggcacaccaccaccccaaaatctcaacttttgagttaatatttaaaagtaatttttaaaaaagagtttgttttcttaagaaacaaaagcaatgctcttgatttgtcagcaggaccaccacagagtgagattgtatcttgttgagctatccaaactgccctagtccctccccattttgactaaccaatgcatgacaacactggatgaccgtggggacacagtccatgctgtgaaactctctatgaaagctcaaaggttcacacagggcctggccttgcaaccttggtctcttcaacacctaataagctataactggcccaaataatcttttaatgtcacaagcagaattaaaactatcttcaaagactcaagttgaagaaaagatttaaagttatactatgaaagagcagtctgacacagggagactacatttaattcctatgagaattttttatacttgttaaaatcttttcaattattataaaaatttagtagcatgtaaatatagccccaaaatggttgctataataatccccatttcatactgggtctgccttaacaggaaaagctattaggagtctttatagtaatttatctaatgtgaaaaggaaatggccttataatagtttccattgccttgtaatttttttccatttttttctttttatagaaaaaatataatattttggggagagtgaccatgactaatagcagtggaaaggagacaaaacctttgtgaacagtgtaactttacattcatcagggatgacaaactataggacatgatgcctagaagaatcatcatcaggaagcccataaatttgtgttcc

SEQ ID NO: 57708 - DNA, 1253 bp, Homo sapiens
aagatagctaattttcagttttaaaaagttatacaagagtacagtgcaaattctacttaacttggtctcagagaatttaaattgaaatcctaccacttattagctacgtatccttagatgagttacaacctctcagagacattattgaaagaaacaatagccaccctccttactatctcttagtgtaaattttgaaaaatctaaatcaccaaaaaatacagtattacttgatttaaatttttaaaaaatttatttccattttaaatgtagaaaaactgctaataattccaaaatgtgcagtcatatcctttctaattttctctctgacccacacggattggtaaataccaatcaaaacctgcaatggcagtgaaatccccatatcctcctaaatttttaactttttacaataacatggagtcagcatttccatttaaccaactatttaactactaagttctcctgcctttcttacagtttaactacaccaagaacttaatgtaatgtgtcagttccctcagagactcactgtaacttgggagataagagataatctcagataccttttcccaggtgactaaactacgtcagggaccgtcagtttcaaagttcacaggtaaccaatgcttcccagagtcaagtcttctggtttggcagaaatcataagcagagttataggtttaagtttataaactttttcagccttccgcccaaataaaggcttaactgttagctttatttcttcaacatttatattgcattttaacaatcattagcaaaaggtttcctaacccactttatcacattcatgacgtcatgctgtatatactcatatagcactcatgacctctgattggaaacaaagtgtaatggaatttctcagattttcagggaagacagacagcatttccagtaaaatcaccttccaaaatcccaggaaaactttcaggcataaagtgaattatattaaaacttccttttacatctgatttaaatagtagagtctgccaagtaaccctgaatttgcaatacagattaaaatgggtgcactattcaaacctcttcaaagaaacaaaactatagtacacattgaattaacttgtcaaaagtaaatatacagagactattgcataggcagtctacttcaattagactgttcccctttactgctgtaaattcttaaaattggaagccaaataaagttgtttctatgtttaaatcaaatctttgcaaataggcattatttctccact

SEQ ID NO: 57709 - DNA, 1912 bp, Homo sapiens
tgctctgcgggttttcttcgggtttaacttgaccaagcaaaacagaccatctgggattaactttttccttttcactgtaggtcacaggctctacgtgtagggtgttggccacctgttcttccaccatctctacctccacctcctcctttgtggccacagcaatgtcacagcccatacatgggggaggggagcattcaggaactcggaggcagatgcatttttttccaaacacaataacctcaaacagtggtctctaagcactttcctatgctcttccaaaacgtgacctcccctcttactcacacatcccctacacacggaaaaggaccactatccgtccagcctgcgctcgagggagaagtttataccttcgtcctagagatgccaaatgcagcagggaaggctggaccgaggcagccgagtgctggaaagggaggcaagaggtgcgggagcggggagagggggaggggaggccggggcgccgcgggagtaacctccaccgcaccccaccgctccgaggggcagccggcccggcccgagtttctccccagaagcctccagccgcggctctcggggaggaggaaggaaggggttccccgtccaggaagcagcaccagcggcgaccgcctccagcctcaccctcctcagccccgcaccgcccattcctcactccccgcgccgccgcgtccgcgcgcctcccccctgcagacccctctcacccagcccgccccgaccccgcgcccgcgccccccacccgcccctccggggacccctaattcattcactcgccgccggccccgcccggcgccggcaaagagggtcgggacccgggcaggggcccaggaggggtggtccgctccgtacctctctcccgcacctgggagccgctgagcctctggccccgccgccgccttcagtgcctgcgccgcgctcgctcccagtccgaaatggcgggggccgggagtactggccgagccgccgccaccttcgccgccgccactgccgccgccgctgctgcctccgccgccgcggccgccgcctaggaaaatcgagctccgagcacaccgatgagttcggggccgggcggccgcagagggcagagctatcgatgcgttccgcgctcgattcttcttcagacgggcgtacgagagggagcggctgagggcggtgtgggaagagggaagagggggaggcagcgagcgccggcggggagaaggagggggccgggccgggccggcgggggaggagcgggggccgggccggcggaggaaggggtggctggggcggtctagggtggcgagccgggccggctggagagcgggtctgggcggcgccttggcgggaggagggactgccggacccacgcggcggcccgccccctgcctagccgcaaggctgtccccgcagccgccaattctgacccggagcgggaccggaccgcggcgggctgtgcggatgccaccagggagacgccgcgagcggccacgccgccccgctgaccggtctccacagagaagctgcgaagagcaccccgccaccctcagggtcggcctatactggcgcgcatccatttactatcattgactgcatgtaaataaacaagcagtcaccaaaagtgggaggcgacttcggggacttagggagaccgggcggacgatttcccacaccggggctgtctgatcgccgccccgattattatcagcctcagcacttgggctgggaatttagccccaggcccaaacaaacacgacagaccctttcaacgctaatcttctcgggtcaggaggcttgtgatattttgctatctttcttgatattttgaacccatcacaaggtctctaaacagggacttcgcttatacccagggcccctgaaatcacaaacaaaagacaactgtttttaagtagagatg

SEQ ID NO: 57710 - DNA, 724 bp, Homo sapiens
agtcaatttagatctcttggctttgcttctatctacataatacaatagtacttcatttaggccaggcatggtggctcatgcctataatcccagcactttgggaggccaaggcaagagaatcgctggagtccaggagtttgagaccaacctggcaatgtggtaacatggcaaaacgccatctctacaaaaaatacaaaaattaaccaggcatggtagcatgcgcctgtagtcccagctttgggggaggggggattgcttgagcccaggaggtcaaggctaaagtgagctgagatcacgctactgcattccagcctgggcgatgaatgagacctagtttgaaaaaaaaaaaaaagtgctttagtgcttggttttgtttttaaggatatcagaaatcagaagtatttttaaaaatcatttccttctaattccccaagcatgtgctaattggactccctgctgattacaagcctgattttcctactttctgtctcttctctctaatcacagttgttggatatgttgtcaggtgcttctagttcattcatggtgatatgtattcaaatagagctttatttgtgcacatcagtttaacattatggagtctaggggcattaaccctttgggcccagacatctcatttaggatccacatgtcctcagttgaataaggcaagtcacctttgaggtaaattctttttggaagattgttctgccttgtcaataat

SEQ ID NO: 57711 - DNA, 964 bp, Homo sapiens
ctgggtttatttcaggcccaatgatttttttttcagattctatgttttagaaatttattttattttatttatttattttttttgagacagagtctccctctgttgcgcagactggagtgcaatggcgtgatcttggctcactgcaacctccgcctcccgggttttaagcgattctcctgcctcagcctccttagaaattcattttttaaccaaatttttcttctaagaatttccatttacaaagaaaacatttttatttttaaaataagctttatattttacagcagttttacatttacataaaaattgtgaaaacaatactgtcctgtgattttagttatgtgaacttttgagagaagactcaacctatttaagcctcagttttcttatctgtgaaatgggaaatatagatttgttttcataggttttgttttcagaattagaaatactatatataaaacatctgtattgggtaagtgttcagtcaatgttagctcttccctattgccctccagccgtattgctgggttctgctaaagcctgttgtcattcctggatgtacaggtcagtcatttatggactttcaatctctgtgtcatctgcccaagggacacttgggcagtggccacatttagtgacctgattatactctgtttaggatcagagtcatgccagtgttaaaaaaagaaaaatcctactctaggaattaatgactatgtaaccgttaaatcacagtcattcttttaaatgactgacgtacttattaggcagaaagaatgtagaatcacaaaccttcatattctccagcatgctgctccacagccagctgaattcatccagaaatgagtaagatcaaatggggagaatggccaatgagccggctggggggaaaacacagagttttttttgtttttttttttttgagacagagtctcgctctgtggccaggctggagtgcagtggc

SEQ ID NO: 57712 - DNA, 1438 bp, Homo sapiens
tctttcagagtgcaaagaacagagaaatgaccacttggctcaattaatgcaggtttattaagaaggatataatgaccgggcgtggtagttcacgcctgtaatcccagcactttgggaggccaaggcgggcctgaggtcacctgaggtcaggagttcgagtccagcctgaccaacatggagaaaccccgtctctactaaaaatacaaaattagctaggcgtgctggcgcatgcctgtaatcccagctacttgggaggctaaggcaggagaattgtttgaacccaggaggcggaggttgcagtgagccgagatcacaccattgcgctccagcctgggcaacaagagcgaaactccatctcaaaaaaataaaataaaataaaataaagaatataatgtggagaagtaaaaaaatatataaaggtctcattaacaggactagaattgcgctatagtcactaagccacaactgagtaatagctctgatctagtagtataacttatcccctggtgacctcacacaaactcttggctccttgccatgcacatgactcagctcttctgtctccatttctctgtacctgcttatttttccaaccattgctactgactgtactcactcactttctctctgcctcatggctttgctacatggctgtcttccctctctccacttctgcatttacccaatgctgacccctccttggatgtttcctactcagaccctataagacagaagaaagggctctcctcttgcgccaggcttcatcataggccattggtcatcaggtcatgtttaattagtagggtgacagggcaaacaacaacaacaacaacaacaacggggaacctctctcaaaaaaccactctgatgcttttcagtttcagaagagagcaatgaagctggctaggagccataaaggcctgcacatagtttgttatttaactttgaaactaaacaaatgtgcagtgtttacatagagtaaactgtaccatcattatcattgtcatcaccacagccatatctaccttatataatatctacagcctcacaaacgttatcttacaaaaatgtgtcactctggtttgtcaagtattcttgtttatagagaatggtttggtacactaaatgaggattgttgattttagaaaaactaggacaagacggcatgaaggcaaaacgcagtcattttcaaatgggggggtattgcagggcagagggaggcagagacagagagggaagtgaagcagcaaagccagccacacaagcagaacatccaggagtttatctgttttatacttttcatatgaacagaaggttttcctattggaaaagattccatagcttaacaaaaagtttgaaaactcttgttagagatacgtgttcaaatcccaggtgcccctctttcttgccatgtcaaaatgcctaagttaattacttt

SEQ ID NO: 57713 - DNA, 876 bp, Homo sapiens
ttcataaattatttcgtttttctttcactttctccctcatggctagtttatttccatctgcatacaaatatgccttaatatcatcccaagttaaaattaatgaataaaacaaatcctttgattcaatctttctctgcagattcaggacaaaatttttgaacttatttatgttacctgtctccttttgcaccttgtaatcactcctgtatccactatgatcagacttttgtgaataccactctactgaaatggcttttattaggtcactagataattccatcttggaaaacttctgcaggtcaactttccacccatcatttgatttgatctcttacctagtctttctttgttgaaacattttctttttcttctctaggcttccttcatatcataggctcctggctttatcctatcataatagtttcttttttccagtctcctttgttcctcagtcctcttttcttctttagtgatctcatccatgcccatggttttggatacttgccatatgcttatgactcccaggtacatccagttctgacctttgtcctgaattccagactcatatatccaattatctagtcaacatctcatcttgaatatttaacagacacctcaaacttaacatttccaaaatggaactcctgatccttggcctctcttccttcccactccctctgcccaaatgtgctcctccttcttatctcagtaaatggccccatcatgcacccagtccagaaaaagtggtaaccacctttgatcttgttctcctcatatatcttattcaatccataaacaagacctgtctatgctacctccaatatagcccatagattaccaccatttatccattccaccgaggaactctggaccaag

SEQ ID NO: 57714 - DNA, 968 bp, Homo sapiens
tctccaaataaataaataaataaataaataaataaataaataaataaatgtattaaagaaaaagagaatagttttttaaagttttaaaattgtaactatgctaatgttaatgaactgccatgagagggactgtataaaacataatatgtacactccagactcctgctctagcatagagttgtccactacagcacattttctcttgagttcaacaagccagtaaatcatgctcaatgtaatgattccattttcctaccactttcctctattcaaatcgctgggaacctttgcttgcttgtgcaacaaagcatgatgtcatttggcttgctattaacctgctcagaagcagaaatgcaaacgaggacaccaaaaccacgtgacactactcagctataagatagttattctgatgattcacagcatgcttatcttaattgttttagattaaaaacaacaacaataaaaatgcacaaaattaaaaaacaattatctttggacttctgtactcctgagaagacaaacatggaaacaaacataggttctcttagatattagtagacgtgctgtaaacaaaacaaaatttaaaaacttccattgttgaatatgtccaggaaacccattaccatattaaaggctttgagaaattccagttaactttgttttgctcagttcaaactagaatgtattttggcgaatgccaatgtaaacaacaatacactaggtactagaatcaatacatctagagagaaccacataacttcagagacaaatcatctcaaaatgttgactggcaaattgctttcagctcagattttctaaaatttgtttttctttttttccacagctcagtcttcaaaggtctacagaaatcggatgtctgtttgtacgatattaagcacacatagtaatatctgtattcaatttaactctcatcttaaaaagaggaattgtatttttagtttgaatat

SEQ ID NO: 57715 - DNA, 1019 bp, Homo sapiens
tggaggctgcagtgagccaagatcatgccattgcacttcagcctgggcaacaagaacaaaactcagtctcaaaaaaaaaaaaaaaaaaaaaaaagccatttgaacatctcagaagccaaagaaatataaaatccaatccactcaaatgagaaagcttcaaaagtgagtgttacagatcccaatatgatttgaaaattaggtaataagatgactcacatctaaggacttttgtttcaaatgatgaaatctctgtttcaggctataaatagggctcaatacgccagtatgccctttcagtgtcataaacaccgatcgagtgtcgtctcagcctgtatcacctggcacccacaaagcttcagcaagtcaatccataaattacacagggaggtaatcctccaaactgtgaaggatgacatcatcacttccttgatgactaagcctcttccaactctacgaagatttagaaagtttttcatggtattaacatattttgtgttaggaaatctatgtatgcttagtatttttggttctttctttttcttcctttttttttttttttttgagacagtctcactctgtcgcccaggctggagtgcagtggcacaatctcagctcactgcagtctccacctcccaggttcaagtgattctcatgcctcagcttcccgagtggctgggattacaagagtccaccaccatgcccagctaatttttgtattttttagtagagacagggtttcaccatgtgtactttcaatgtttataatttagcctattacagttaacagatcagttcttagtttctattttaaacatgtatgttatacgtaatggatttagacttttgatttaagttgaaattttattgagctgatctatgtattaaaatagtgaaaagatcctaaagctcattgtatttataagcttattagagtcatggtttatttggtaccaggaaagtttgtttgttagaacagacaattacagtgttgaaaagaaaatgaatgtttaaatctatag

SEQ ID NO: 57716 - DNA, 3473 bp, Homo sapiens
cacacaaaaaaacatgtcacctgacaccttccgtgtttaaccgggactaggtttatcgaagttgacaggatagcaggattgaatgaaagtctttgccttcctggtatgaggtgagcctggaaggtccccacccagacctctccccactgtgataatgcgagaagttaagaggctttggagtcagactgcctgggctcaccttctctcagctggtggacacacggatcctcagagtctgtttgcttatctgtaaagtggggtaacagtactggcttcaaccagctactatgagaattaaatgtgataatgactgacaaagcaggcagcatgctgcctagagcgtaacagtccataatcattagctattatcgtcaccttcgtgtgtgttaagctttgcctaggggtggagtggggcaggaccctagaactggttactaaggttaccttctaatgaccctgaatgtaggagtgagggaacgacggagcaggtgaagctagtgtcaaactcttgaacgtgttccaagaggtcattggtactaaatcacaacattctgtttcacgtttgtccctaagggatttttaacagcagcgacaaaacctcaagagaagggtccctgatagggaacaatcttgtgatcacatccttaaataccgagaaatgagacccttcacaacgtgttaagaaatcgtccagtcctgcatgctgctaggatctctaaccactcaccacttgtattcctggggtggacgtgagctcgcgctaaactaaggacaccagccgagcattcagcgcggttccctacgccctccaggaattttggaaagctatccaagctcggcgctatctttaaaaggaatgagttgtggctcctaactagcttgccgaggagagcgtagagtgacacgggacgggggcccagggcactgaggccaagagttcccgagtcacgccagtgctcgcccctttggcctttgcctaaaatcctgcgatgcctcgctgacaaagcacccagtgccagagcctgcggcccagcgaagctgctccctggaaacacacacacacacacacacacacacacacacacacacacacacacacacaaaagggggtggggagagggaaaggtttaggtttaggagaggaagccagccagccagccctgcagatgcaaccgttgcaatttgggtctcttctgtcttctgacgtaatgccagtttcctgctttcgcgctgcagtgtgcagttcgctgctgggaagtcagatcaatcgattgaacgccaagatcatcactgccactatcttgcgatttattttccacgaatacactttaattggcccgagccccgcccccaaattccacgacttttggcttttcaggaagcattgttctcccctccccccaggaaggccgcctctacgcacagccagcatcaggaaacggcgccgctcggggctccgatggagagccggggtggggtcggctcaaaccttctgccccccgctcttttgagattcctgatccctggctttgtcttaagcaaaagtactgtagaagctgcagcgtttcctccccctttccagaaaccgagcgaggacgtgggggaaaagccaccctggaacgtgtaaggacgctcccccacgcccaacacgccacagggccgggatgcgcggctgccgccccgccacctcacgcgcgcagcgctaactgcagctccgcagccaccgccgtcgccgccgccctgccgagcccggggagactcccaagggctctttaaatacgagctataaatactacaggcgctcggcgcgtgcgtcacgacacatccggctcccgattgggcggcgtaacctcgcttatttgcataggccgattgcacaaccgggcggcgacctcagcccggtgctcgtgccacgccttccccacttctgcgggcacgcggggccgcgggcgggacagcggggtggcgattgcggcgtccagagtcccttgaactcgggaacctttcaagtcctgagtcaggcggcggtcctccgggacgccagtgcctctcagaaggctcagttttggccagccaagggcttaccgtttaaactgggtcttttttatttctacagaaaaggatagttttcagagtgacaccccagcaaacgctctgggtggctcgcagaggctgagtttaaaccacgtgagacctggccgcggcgagagtcctgtccaatgacttgcgacttggggtgttcaaaaagggcttttcgcatgatctctaataagacctcgttatcttgaaaacgaaacagggagggttcgaaaacgcaagatgtgtaatgccttgtggtttaaacctagtttttaaaaaatgcaccaatgagccaatatgaaacagcgacatggagactttcccccattgcggctctgggggtagagaatctcttgtagcaatggaaaatgttcagctccttgatccagacccgagtggattctctccagggagcgggtgggtggcgaaggtcagagagaggggaaaaaagaccacgctttggaattagggaagcaacccagtgttgtgggtgtagaggcaccgaggattctgttgcagggggtgccagtgattgccctgtataaatacgtagatactattatatattaatattaggttgttacaaaatcgtctgtgtcttcaggatgcaaactgagaatagtagctgtttctgctatttgctccaaacaccgctatattatagtgaactctttacttttgagtgggattaaatacagtgacttttaatgccttcgctttgctttacaatgttcttcccttaaaatgctcgtgtcatattctaaagttctaagccttcctgtagcgatacggggatgactgcttaagtatatatgttggtgtcttacacagtgggtcctcagcaaatattagtggaatgaatcagacataaacatttattcagaagagttaactaagcatgtactaataacaaagaccttattaaattatatttcataattgttctactttgacatcccccccaccgccccgaataaaacttaaagctcagacggactcttgttatttgaagacaatactttcaactactgctgaaggttggatgtgtagcgaatatgctgtcctaacagctttttaaaaagaactgcggattttaacagaagagctccccctgctgtcaaatggtttatgggcaacgcgcctggaacgtctagaacacctggcatgggcccactgcaaagctggaaagctgaccttcaagatagttttcactgagactcatctcttaaagttacttttaatcatttattgacaagcaagtgtgatcattcagtagggaatactacctgaaatatctttctcatatccatagcaatcgaaaccggtttaaaaccaatcttgatgatattaaagtaaaacatggatttgtttcacagtcattattctctgcgtta

SEQ ID NO: 57717 - DNA, 866 bp, Homo sapiens
acagagtgctgttgctaacttgcagagggcgatgatgaagtggcaaatttctgacaccataagataaagcccattgctatctaaggctgttgaaacctaaaaatcaatcttttagcttttattcatagaaacttaggaaaataaaatgctgcaaaaacacattctttctttataatgcctgaatagtcctgcatgaacatcaacatttaggcagttaattatttataccatcagagatgagtctatcttccctcacctatgccttactagacagttcctgagcagcaagatagtggaggcattgtgctggaatgccctgtggtgatgtaactgacaaggaatctaccacaaatcccagtgctgagcattcatttctctctttcttgcaagggcaaaggttatatactttctaagagcacacttcacaaaataaatacttaaatataccacatttttggctactcatggaggaaataattgtgtagaagagctccaaggagatgctttattgatgaagatcaatgaatcagagatatgtagatgaaattttcctgagataacaccatcttcaaaaataaggaaaaccctttgagctgaaacatgttttggatccaggaaacctctgttcataggagggaaataattgaaaacacctgaaccttacataccacttgtttcacgtgttcctattacaaatctttgaggaaaagaggttgggagggaagtctgttaggggtgagatggcttattggccatagtcaccagagcccttttggttgtatgtttatactcccaatgtgaacatgataatcatcacaaatggagacagctggaagaaattttaaaccatgaaataagttaacttt

SEQ ID NO: 57718 - DNA, 1106 bp, Homo sapiens
cttagtttcctgttctgaaaattacaagcagcataatctcaggtaggtaagttactttctaacttgaactgtgacttcatgtgtaaaactgagagggtggtattgggaactgctttattgaagtgttgtaaaattcatccagctattgaatttcacaactctaaagaaccgagcaaaaagtaatggtaacatgaaaaagttaagattttaaacatttaagacactgtgtgtgtgagtgtatcttatctgagatgggaaaatggacagtagagctagagacatggacaagaaaacacgttcttcaggctagaatcctaggtgagagtattaaggagacccataagcactgaagctggagtttgtttggatttcctgaatatgtgacatgtgcacaacatacacgtgcaaaaattattcaggaaaatcctgtatagacactaacagttatatttctattcaacatgaaaaacgtgccctaacattctacttgttctagtgatctgtttttagtttaccaaattagaggtttggacttcacactgtaacctttgaacatccctctgcttggcttgacaaataacatagacataaagacaacacaaggtcagttcagctaggctaagcttctagcagagaaagaagatgaattcttttttaaaaagtttattttcatagattatggcaaaaaaatggacttttgctacagatcattagttacgaatcctccctttttagtagctcaaacatattatattttgaaaatatgttcatgatctttttagtgtgatctcccttattgaggtgtgtgcctttcctagacaaggcaatattttattttcccctgtattgtaggaacttgagagaattttcgatgacaatgatgataatgtgataaaatttagcctcagctctagaatgtcggccacatgaaacttacaaactatttttagtgcaatagaaaaattattgagagttagaagatatggttttattttagttctatcacattacttatcatgtgaccttaagcaagccatttaactttccaagccccattttttttccccaagatactgaaacattactgagaatcaactgtaataagg

SEQ ID NO: 57719 - DNA, 374 bp, Homo sapiens
aaccgataaatacaggggggcacaatccagcctgtaatagtggccaaacaaaatgaggctcagctaaaagggagaaatttaggtagcagaacaagcttcttgctcacgagatgagagatggggatgggtgaatgcagaagatgaggtcattgtgggtcacatgctgaccatgagtcagcaacatggtgcagtaaaacacatgagcacaattcctggatatagaaataggagaagcagagtagagtgtgtgaggtaattcagttccctttgcagtaattggaagcacctttccaattctgaactccaagccagagaaggttgtgaagattctggacaacgttcagaagagagccatatagcagaaccatatcctt

SEQ ID NO: 57720 - DNA, 3028 bp, Homo sapiens
ggagtgaaaggctgagaagggaatgagaggttaggaaacattcaccttaaggctaggcaactcctttgaaaagagtcaagtagggttaagggaggatccatgccctccaggttgacttttaaatcatattccctttggttttgcatttgaatcacagtgaactttctcctctccaaatgttgatttgacaaatttgagtcttaccatggctctcttctcagtccacctgcaggtcaaggaactaatgaggtgtggagtaactaaaggtcaaaaaacaagaggaagaaacaaagggccaaaaaaccccaaaccttaaatcaggtcctgagtcagatacgctgtaacaaattctgcttcaagtttaatattcttgttttgatgatgtttaaaaaaagaaaaataaaagcaagtgtctggaaaattaaaaggcggggtgggggggggcattttaattggaatgctttcttgtatctcatccactatccgcaccccatcgccctgcaaattaatagctgttgcggagttggggtatgtgtgaccacaaaatccaaaggctgaattttgcccagtgcctgagtaattgcatgccacacacaaaaaaacagtagaatattgaaaacaacatacacatctgtatttccatatgaaagcacccgtttcctttcttgattatctgctatttttaaaggggttgggagtgcagcggggcggggggatgaggcgttttttctgaatacgagcccagctctttctaaacttttgttactcacgtccgtttgattcatttgctgtgttttttctttctttctttttttttttcccctctcctgcctctgtcattgcctgctgctaagagggacgctgaatcacagccactgcagatgaaaagcaattcaaacccagtccttggaggggggatggaacggctctttttgatttttttcccctctgcagaaaaagcctcctactttccgggtgaccgtagagggcagtttgacaagtctcagccccgggcgatggaagattttgcccgtgggaccgtcacgagccaccggtcatctccccgcgcccggctttcgggtcctcaggcctcggtgcgtcgcgggccaggcgacagcgggggggcgtcgcgggccgggcgagcgtggcccggtgggcccgagggtcgcgccgagctccccgccgctttaaaagctcccacaatgcagcgctggcgtcccagttccgttacgaggtctctcccggcgccggcgagcgggccaggcgcgggcggggcgcggaggagcggcggctgaaacccgagcgcccggccgaggggggcgcccccgcgccgctcctctcgcgcgctcagccgctgcccggcgaaggggcggagccgcctggccgcccggcccggcccggcccggcccggcccccagcccggcccccagcccagaggcaccggccgcgggagcgagcgggtcgccgactcctacgcccgcgctcctcctacgcccgcgctcgtccggcgccccgcgccgcgccccgctcagcgtctgccgcccagctcctcgcccagcctcgccgagcctcgcccttcccgcccgcggcggcgttggcgctgggggcggctcccgcggcgtctctgccgctggccgagcgctcgcgcaccgcggcacccccgccagtggcgtccacactcacctagcgcgggccgggaggtgcgcggagagggaacgccggggggccggggcctccagccggtgcggggcgcgcggcgcggggagcgccggggagtgccggggagtgcggcgcggggacgggcgctgggcggccgcggagctccgggtgccgccgcgtccccagcgccccggccggcccctctgggcggcctgcgggggcggcgcagttgcgaaactgagtaagtattaactttacttagcggcggcgatccgggctgcgccggggaccccgcccgtcccgcctgcagcctcggagctgccctccgcccggttgcccctctctccgcaccttgggtacctcgtccgttccgcccccaccctgccccgccgcgggctcccgctccctctgcgttcacctttcctggtgtgtcaccctttgcgcctctcctcgcggcacacaagccgcggactgaaaagtacgagcttggtctttgcttttctgcttcctcccagtgtccttggcaagggagtttagaggccacttttcttgcaaagggaattttatgtctggtttttaaaatattttttcctccggatggaaatcggatgctcgcttgccgggtggcggtttggtgaacgcttttctcctctaaaaaaatattggtttataggtttttaaatttcatttgaactattaaccatctgcattctattctcctttgccgccagtccctttggggaggggagtccagaagaggggacgttcaaagtaattctgacttgcaaactagaaagtttgagagggtaaatcgcacaaagccggaagattcaacttgaagggacgcgagctttgaatgtgggtcctggtgcggcactgggttttaaaagatgagtacttgggttcggaatccagtgttgcgttgttattttagcatcatagagccgcctggtgttgctaaaccactactttcccagcctcaaatggcatcttgaacagtgcaacgtaggatatataattgcgggtcaatattgttgctgatctttagggatttagaagcgaaatgaatgcaaatcacgtctcatagctgacttaaacctgtcaggttagccctgtcaggttagcattaaagcatttcattaaaaaaaaaaatcctctagccctgtgacagcagggacgaacatttatggattttccagtagattgtggctcagcaattcattagatctgctttgtccccaggaagcattttaaaatatgtataaatctctgcttttctctccattagattaaccactcattctggtagggggccccaggtagtttttattttcttttttgcctttcatcttggagttgccaggagttg

SEQ ID NO: 57721 - DNA, 645 bp, Homo sapiens
tctctgccctcaagaagaggcaaacatttcaaacagttgttgaagaacatgggctctgaggtcaatttgcttgagttcagttcttgcctctcctgtttagctctatgaccctgggccagttatttaaccttttgattcttttctaattattcccttattacatattacctgcctcacagggttgttgtgagaattcgatgaacagtaccagtgagtactaagtgtcagccacttgagaatacctggagtgactagttttgataaggggagtttccagggagtgatgagatcatatttgagtggagtcttggagagtgagttggagtttggccagcacaaaaatttggtaaggcccgcacctgggatgccaacttgaaggagaggcagggaaactgaagtggggtgaggtaatgcatgctacatggtggcttcaggggaggcactggaggtgggcctggacagccacgggaagggatgtgaaggggtttgtggaaaaaacacagtgcctgcagtttcctgagaccgttttcacttaagcctcttgtttctcattgccttcctaggtactcgcacacctgccagagctcatgtttgtatttatggttaggaacattttgtcactgcagttacctgacaaaagaaggt

SEQ ID NO: 57722 - DNA, 646 bp, Homo sapiens
ggaattatttttatatgcttatacctgtttttacgggtttacataggggcatttttgaataaaacttgtaacgaggtgtttattgttacagataatttgtgcatgcaagttttagaaggcttgaaatgatcttgcagagaaaactacttggtaggaggggggtgacattttctgtaatttaagttgtcatagtaacctgcatcaagacgcatacttggaatccaggcctgaagaatttcagtgacaataaacattccaattgcattcatcatcctttttttggccaagaaaggagccatccattgtgacctaattattttatttccgtttttagaagatgagtaataatttgcatgtttcagtgctttgaaacttccctagtagaataaaaatgaaaaaagttcagctgtttatatttgagattgacattttctgataatgtatcgcaaactagttatttcagattttgagacaggtttggtgtgatgattacttaatgaaatatgaaagaaacaggatttgatactgattgaagaaattgccatatccattggttaacgtgcaagtctaatattaagaatattggaatttggttttcatgaagctctgattcgagaatgttatgacttccctattatcagtttgc

SEQ ID NO: 57723 - DNA, 1677 bp, Homo sapiens
gtaaaataagcctgtgtacttcagtaagattatgatatgttaaaatttgttttgtgtaatacttacatacttactagaagaaatgttgattcattttattacaagtgattttttgcccttttttagctgactacacagacttagtcttctccactccgtgttcctgcagctagagacatgacctaacaccctgatgaccactctcagggaccttgagtgactggccggtgcaccatggaacttaaagtatgggtggatggagttcagaggattgtttgtggagtcactgaagtcacaacttgccaggaggttgtcatagccttagctcaagcaataggtgagtgaactctgtgggtatctgagaaaagtacattgtgctttctttcgttgtatgtgtttgttttaaatatagatttctaggggattttgttcatttggttccataataagtctcacaggcactcttgtacttattacagtttgcctgtgtttaggtacatctgtgatgatgcttgttctctgacacccctagattttactaaccctgagttaacatctacactgccttctcctctcctgttgttcagcctaaacagtgacttctgaaactaaagatgtttccatgagccaaaatttagacccagattaagaatttagattcttagttcccagaatccctcattaggaaaaatcccacctattgtttatttctccatactttcagaaaatacaacaaatgaaataacatcgttcttcactggaaagataatgtatacttttaaaatcttatgattggctgggcatggtggctcacgcctgtaatcccagcactttgggaggctgaggcaggcagatcacttgaggtcaggagttcgagaccagcctggcaaacatggtcaaacccgtctttaataaaactacaaaaattagccgggcgtggtggtgcgcacctgtaatcccagctactatggaggctgaggaaggagaatggcttcaacccaggagacagaggttgcagtgagccaagatcatgccactgcactacagcttgggtgacagcgaaactcggtctcaataaataaaataaaataaaatcttattatacagtgaaaatgaagcacagctcttggcttcatgttattctcccaccatgttttaccctttcttcttatttattttaagcttatcttcatcatagtttatgtatatttagttgccttaaatgatgagggcataaacacctgcatcagaaaaaccagcaatatgggtccaagtttatatttgcatcttaagtctttcatttaacaaacatgtactaagaggaagctgtgtggccagcaccatgctaagtgttcagggcctctttgtctttgagctccttatcaaaagttgattttatgtctcgccagtttatattggaagcatgtcaattagctcagcattgaaatgagtcatactgttgccaaggcactttagcatttggtagagatgattgtgccacctgtgatgtggcagatgcactgttagaggtttacagtgccctatacaagacagagactttctggtaatattgacatcttttgatttttccttaaacactattgcacaagaatatattgcagcaatgctgaaaattctgggctttcacatccggtgaaactctttttgcatttgaga

SEQ ID NO: 57724 - DNA, 950 bp, Homo sapiens
agaaaatgatgagaaaattaaacttgaagcaatgacagaaaaacattaaacgactatttctgcagggagtcagcaaaaagtgttctaactattcattctgaaagaataatatactataactttctcaattacctctatcatttaaacaaagcacattaatttacttcccattcacttggccctgggggtagggagagtccctggttatttcaagaatccaatgtctgcagtaacaacgagtcttacactagggggcagcagctaccgtccagccaccttccagggctccaaagctgcgccttaggtgaatccttacttgaagagatcctgaaaaaatgaaggaaaacacattactaaagaagttttctttttatctttatattaatttgctttgctgcagtgtttctgaaagagaatgggccgctcgttctgaagatttaaggtgtttctttgccaataaagaaatagcaattgaacatattttatctgctcacactccatggctcatttctgaagtgacaaagtaacatggtctgaaagatctttttaaacttagtttctctgtacagcctagtagtaattggtaatttttatctactatggatttgatcaaaaggaacaactcattgcactgagaacactaagctatcgagtgataccaagtgttaattttgtaattcatgaagagtacagattttagagggaaactgctgagtcaagggattactcagtctttacaaatccacactcactcagcttggcttgaattattaaagaatcaggttgtcctaactatgaacaagaatccagaagtccagactttatttaaaaaaaaaaaaaccagaatgtgtgaagatgggtatatttgcaaagatgtggagagttattcagtttgtgctaaaataagaatagcattgtcctacaactgagttggctcaaatatagtttgc

SEQ ID NO: 57725 - DNA, 2041 bp, Homo sapiens
caaacaacaaacaaaggatgccttgtgctttgttaatgtctgttagcttccagcagcctgtctccagggtggcactcactgtgccatttagactggagagattacaaccattctgtaatgtcttagcaaatactggcacctgacctgtccagatatttctggcaacgtctgagatctttttccatcacatgaccaaagccatatttgcagagggtagtggtacttctctacttttgcaacacccttgggtatactcagttatctaaaagacaccatgaactccaaattactccaaagtaattgttcattttaggctgtttataaacaggcatgtttcagaaagtgttacaaaatcaacgtggtcacttccaagagtgaaagtgttagatgaccaatttgcccaaaaggggtttgtaaataactagatggtaatttaccaaaaaaaacccaaccaaacaaacaaacaaaaaaaaaacaacaaatccatcccccggcccctggctacattagtttccttcattttactgcaccatgcaaaatccgttcgtgccataaaatcacttctcttactttacaccttgaacggaaagtcccagtgtatttcatcacaattaaacaaatcgcctagtacttaattagtgggaattcaatttgcaaaactccacgtgagcccagtgaaaagatgtaatgcctcagacagccggtactgcgacacctcgtttgcccagaactctcctctggcactttctccccacccccacccaccacctggggttttccccgcaagtcctggcccggggcctggacctgctgaggtcccgcccggccgcggcccgctctagaccggagttcccgccccaaggcccttctgaggcgggtgtcgaccttcgcgtaacccgcgcccaggagggccgctcggaaactgctgtgtcagaatggtttgaggagtcccgagtcagagccagctttaattcgggagggatgactacccagggctggcccgcggagacgcagccgggaagggtgtggtgcagctgtcgggagagcgcgcccgggcccggccgcctcggctccgccctcggccccacggtcccccatcccgccgcccgccagcgccccggggccagcgtctggagaactgtggacgcgcacgcgcgtaggacggcgagcaggccccgcccctccccggccccctctcacgtgctgctcagcgtgcgcccagacatgtgcgggcacacgtgacagcgccgcgtccggccccggttccctaaccccgcgcggctgtactttgaacccaggcgtgggagactggagcagggaagggaggaaggaaaaccaggcggggaggccggcctcggggagaatgatatcatctgcagctttatcgctaggcaacctaagaatgcttttcctctctctccaatcctagagccccttgaagagctcaaggctgatgacattattcccccctcctttccctccaaccccccatgcagcgctcaaacggtgattcaaggagcaagggttggtttactagttttaaaatgaggatcttagcaggcacagttcagaaatcgatccattatcgcgcccacttgggtctgcagaggccttcgggggtgcctgcagtcaggtgcctctctggtcatacgcggtttacacaaccacgatatggctaggcagatagataagccttgttcaagataatatgtatttgaaaactaagtcctgcttaaggtgtcttagaatcctgtgtctttataatactataagggtttttctggttgctctgagttacaggtcgccaggagttgggtcagactgaagtccccctgttacagctaattttcgaatcacagtgaggaagccgcaaggccgcatatggaagcaacatgtattaaactatctggcagatactcaatatctctgttgtgcagcacataatattctgtgtgcacacccatatggaaaaggctccaaaattgaaaccttagctaaagttcacagtgccctaaaaatactctatataaaaactgtagca

SEQ ID NO: 57726 - DNA, 2787 bp, Homo sapiens
tggaatatatttgcgggcagagcttcactgtgaaatcaatggctctaattaactacccatgcaggttatgaggaatatcgggaacttacacttaccttggtgtcgtctcgtttcatgctccttttgggtttacacatatacaaagaggaatagtccagtctgcaaaacagaaatcagcatcaggcacccattcggggaggggctctgccctcgccagctccataccactttctggagaagaaaaaaatcaaaccaaagcctagacagatattcgcaagggtgcgtgcaccttaccctataaaatctctatgttccagtaactgtctctcttgcaaatgaggaattccttcgtccatgttcaactgctgttcgtttcctctgtttcgatttttggggctctgtacaataatctgtgggacggtaggcttgggagaccttggggggatctgtgcgtctccagtctctctctcgctctccctcttcagtgcagtgttgaaagtgtgaagcagttggtcccccccctccaccgcgctcgcacacacacacgcacacacacgcacactcgcgccggccccactgcgctggtagtttgctctcactccaggcagtgtttggccacagggcacgcgcgtcgccggccagaccagcacccagctcacgtgcggaacgtaccatccgcggtccagcccggaggggggcgggggaggaggggccgggccgggcgggggcgtcgggagaaggcggcgagagaaggcgaacggcaggagggggcggggacacctgatcagggccaccggaaaggaaaaacaacttcggccaagctattcatcttcccaaaggcgatgcagtcggcaggaggaggggggagtgggggtgcaggggtgcggggcagcctgagcttccttggctccaaaatgcgactccctgggttcgtccgttgttacggtgcaggaatgtgaacgtggctttttgcttttccaccgattgtgctgttggtttgaaccatagaaaggaagtgaaaagagaattcgcggtgggtaaacttgagtcccaaaggaaattttggagacttgtttgctcactgatcagtggcctggagggactccttggcgctgggtggagaggttgcctcgagaagaagcaacttgcaatccgctccttgaaggatttaagatacatgaaaacgttgtcactgggtccgaatgtcgcaatccaagtgtctttcggtgacacggcgtccctgggccaactaaacttccccgcagcagccggaattgcggtgccactaatcacagcagcagatgacgacgtttggggccgcgtgtgctcctggaggaacgcggcggggagcgagccggggttgagtgggggctgggaagggagaagggggtggcacgagagggggtggcacgagaggggctaccacagaaaagctatgcagcatttatcacccgcccgctcaactctgccgcgttctgagcctccggtgacgctacgtgctttccccatccccccgcccccccgcgcgataagagacgcccggagtgtgcagagcccacgtttactaccgctggcacctccaaagcctccctccttaatccggtctcaaacgggtaccagcacagggccagcaacgtgatccgacctgccgctgctgccacatcactgctcggggaacccgtgcgcgcgcgcgctcgccctgcagccgcggcgctcggcgccgggaatcacaggccagcaagagccgggttacctttccccagagccaccctgggagcatgactcactgctagtgagagttaccgggaggtgcccggggatgcgcactgcccacgccgccctgccagcccaggggaaggcatgtcctgagggactcccaggggtgggatggaggctatatatatatttctctagatatacataaagacatagagaaaaaaaccaaggtttttcctgcacagagagggatatttacattctccccggggtgatctctgaaacgttgattattgccggtgataagtgaaccgaggggagaagaacgccaaaggtacatgcaccagggcgcagcagggactggggcgcccgctacgtgtcccccggcccgccccgccgggcacgggttccggggacggatctgggtcgcgggaagcggcggctgggaggaggtcacgtgtctgcgggagtcgcgtctcctccccgactccaggagcagcccgggccgcggcggccgctcgcgctgctgcagtctccggagtcctgggcggagacgcgcactgcgtctggcttcgtgactcgggcggcggcggcggcccaggatcaccccggcgtgaggagacgctcgcggtccgttcagttcatctgtttagagggccttttaaggtctctcgacttcctcaaatagaggaacgtattttgcaccaaacaggcaatttaatcacgatggttcttaatttaaaaagtatttttaaaatgctgactttattttaaatctcggtccgacctctctcctatttccaaaaggttaggtaattaagacccttcgatggggagggcacgttggagccctaaaagcgacctattcctgcagtactgtatcatttttacctctttttaattgactaaaaatgggaatgccgttaggtgaataatttaaaaattaaaacaccaggtccccttctagatttctgaatgtttggagtagaaaggggatgtaaatatttgctccagagctaaatttcacttgaaaaggatgactggttagggaaaatgaaataaagacaagat

SEQ ID NO: 57727 - DNA, 2629 bp, Homo sapiens
tttgcctaatataatttatttaattataaatttataacatttaatttttaataatggctatgtttagcaactgtcttgcaaaattcctgaaaatttaagaactggctcttagaagtcactatgtcagggtaaaaccatagtaattataaatgccatctctctttcccttatcactgtattttaatccaacagccaatcatgcagactctacctccaaaacatatcttgaccacttccctactgcaacaattgttctcatcaccctcactgctcacctgtatccctgcaatagcctctagttgttctccctggttcattccttatctgtgtctcatagtccactctccacacaggaggcagtcatatttttaaaatgtatgtaccatatcacttcccatcttaaacccttcaacgtcttcctgttgttcctagaagaagactcaagctcttaccatgcccagtaagggcctatcttatctggctgcagcctcccttccaacttcatcttgccattgtctgacttagcacttcattccagccatgctggccatctttattttcctaaaacacacctgttgtgtagctgcctctgggccgtagcacttgttccctctgccaggagtgctcttcccccacagcattccaaggctggctccttctcattgttcaggttctagctgaagtatcatcccctaaaagaagtctgtcctgttttatctaaagtaagccccattgcccatatcaccactctccgtcatattcccttgttctcagaaactcaggcaaattacttagcctctaaacctcagttttctcatttgttaaatggaagtgctgtagtacacatttctcatagggttgtgaggatcaaacgagttaatatatgtaaagcactttgaaccctacttggatcttattaagcactatctatgtaagtttcgctgctaatattatcatcatcatttttattgaagtattattataatcttcattattattggagtattcaaagtacctatcactgtctaagagtattttatctatttgttttcttatttcctttctcctctcctggaatttgagctccatgagagcagtgaccttgaatgactcatgccctgctgtgttccatcacctagaatagtgcctgccacacactaagtacttaaatattttttgaatgaatgtgtgcataaatgaataatgaataaacagaagaactggcggtgacaccattctgagccttggtttatttttagaaaatgtgattacagaggcttgcagtcagtgtggttggaagggcacaaccgtttttgtaggtggtggaacttctggactcttgttgcatgtctgcaaggtcttccacgaattctgggttctggtccttcttgagtgctgagtagctgatatcccagtggtcccaatcatcaggaatattgtgggtgtgcttagctctcatagtaaagtctaagttgggagaactagtaccttatggtccctcctgatggatgagcccagaaacagaactatgagctacgattcctgaagcagccaaaggcaaggaagtccagtgcctctgaacatttgttctgctcaatgaaagaactcagtcatggggtaccccttgtggaaaaacttggagtagcctcagaaagactttcatcctttgcttttgtagtggttacatttagagcagatatgtgcaaaaaaacctatggcaaaaaccttatcttgggcatatttctcttgaacccgagcagttgctcaaaaaggtactatgaaaaggcccatttctatatttttcacttttcatttaggtccctgatatgtcaaaagatgacagggttcatgaagattttctgtaactcaccctcggttgatctggaataccaagctgctttactctacagtgagctttttgaggacagaccatgtgtgttattcaccattgcacagagtacctagctcagagccttgcactgagcaacaacctatagatgcaagatagatttccatgttcagatcaacactgcattagagtatgacacctgaaatcttagcagcagggccttggtgaaactctgtagagtttcagggggatcctccctgcctccttcaccaattcctcttaaggggcactaagcagaaaggagacaggctttggaatcagacaaatgtggcttcaggttctggcactagttaaatgacttagggaatgactaattaagggactttggggaagttacttaacctttctaatttataaaatgggaataaaatggtacctataaagattaactgagataagtaggtaaacatttcagctgagaacccagtatctactgtacattcgattattgttaatatgaatcttctggagtgttttctgtttgtgtatgatcagaatgcagattaaggggcagagaggtctagggcagagtagaattgggcccagtaacatggtgccacatcagatcctggaccagaattatatgagaaagtagtggggtttgggcccagggtttgagggatggtgatggtagtgtatggtgaggaagctgggcatgacagtgtaatgacagagaaaacaatctgtggagctcaggatagattaatttttataatggga

SEQ ID NO: 57728 - DNA, 1212 bp, Homo sapiens
aagatgatcgttcctgggtggtccttcttgggtgggtccctgggcacagaaaccccaggccacgtttcctcctctgctcagcacgctgggcagattctgcctcccgcagctcagctctggctcatcaggagataagatcagagacactacggaagggccaggttttaacaaggcagaaaatacaagctattccaaacatgaggcctactgtgcaaaaaacaaaccccctggctttgggggccctctcctggagagggtttctctgctcataaagattggtatcaaggggtgaggagggagtcatgccatcccagcaggacctccagttgagggcttcactttcaattacccaagagcagctgtagactgctgcttatgtaatgggctctgcgcctccttctcgggaggaggatgtggaaccgttttgtgtttgctgaataatgagtcatggtcagagttagggagcagaaacagtgactctctcccctgcattgcttcatccggaacttctagtaaagaatgataagccctgagtcagtgcccagtggggcctgccctggaaggggaagcaccacaggaggctctgaaatgcaggccccacagagcccacgcaccaggctgaaggagactctgggggcatttgaagcccagatgggctgcttgcaagaagattcactgtttatttaggcctgtagctgagctgccagggttttcctatctcgggtaatcacagctcctccagccaggatccaggagtgttggggtgaagactgaggcttcaaaatgaacagagctttctccaaacctcattttagctctaagaaatgaaacaagtcagccgtacacggtggccctgctgtaatcccagcattttgggaggctgaggcgggcggatcacgaggtcaggagtttgagaccagactggccaacatggtgaaacaccatctctactaaagatacaaaaaaattagccaggcatggtggcgagcgcctataatcccagctactccgtaggctgaggcaggagaatcacttgaacccaggaggcggaggttgcagtgagtcaagattgcgccattgcactccagcctgggtgacagggtgagactccatcttaaaaaaaaaaaaaaagaaagaacaagtctgaggggcgggagaaagggcacgtttatatcaactgagaagtcaaaaggtttggttttagccagaaag

SEQ ID NO: 57729 - DNA, 1070 bp, Homo sapiens
tttaagatacttcatttattcaatcatttaacaaacatctgctttgaatatctattaccaagttctgtgctaggaacagaaaatacaaaatttcataagaaatgatttctacccttcaattgctcattaaaagagctgctaccacttcttcaaatttggtagtagttatttctgtgaggtcactgggttcagaccttaacctatcaactggagtgtctgctctagagctaagtgctttgctgtggacacttgctattttggggataagaagtatgatctcatcttctcttcgatgtttagcctaaggtgattcacttcattcagctttaacatcactaaaatgtgaattcatactattagcgtacttctagtacaagctataaaacccattacccatgtgtaaggcataattctgacagcctaagctggagaatatcattagctaaagtagagtaagattgggtgaggtggttgttaagaggtttctgaatgagtctgagtcaggcctccagggctaaatttattaatgagtcattttccttgcctagcagacactgtggcagaaagtgaaagaggaagaagccattcgacgtctgtttttaaaaatgtgttctgtccctcagtccgccaaagtaggtttcaacatattttagcattttaggctaatacttgtaaccaaaatgttttcctggttcctctcagtttgcaaaaaacaagtgaggtcttttttccaggaatggggagactggttttcatctcctcccagagggggcagattgtaaattcctagtggccagatatagcatctactaccttgctctgtgcagaacctgaaattcaaatctgattattccaggctttactaaaagcatcttgatgacaatgatggtgacattcctcacattctcttgccttatgtaattttaacagctttcatctcggatctataccaactttccacctgcatagctttatcctgggtcttttcatgggagatgtcccaatcaagatctcaaatttgtcctttcatctttctcttgaaacctccccatctgttctctcttccactc

SEQ ID NO: 57730 - DNA, 2495 bp, Homo sapiens
gctgaccttcagagtgtcagagcagtgccgaagcccaggacatggctgtcatcccttattcctcctagctcaaatcaccctcaatatcctgataggaaccaaataccaggccatcccgccatttcagtctctgtcccaaggactcctcattaaattccatcatcatccttcagctaacaaccaaaagccttcctgaaacacagcctcatgcaaataggtactgagaaaacttcctagcccctagttctgcaaacactcacctacgcagtttagaatcagctaggttacgtgcctgtgcatttatatatgcagataaataatacagcagctatactacaagtaggtgtctcttcagcctgtttactttaatttttacatattaggctcatctctgaatgcccaaaagaggatgtaactgatatattctcctggcaaaagagtcaggagtcatttcccagctgaggggatgggttgatgctcttccattttctcttaaccctgtgcaaatggtgctgggccataagaggacatctgggattcaactcccactgtgtatggctaagaatcagaacaaagtatgatgtccacagaggaccttgagctcacaggctccattccagagagtaatacagggatagtaaaccactggaagcaaagactccctgtggaatagctgcagtcatcccccatgctggcccagccacctgagaagagacagtcttgttaggttgacttaactattggtcacctgaatttaatttggcttactgaattatggatgaaggagacaataatccccaagagttggccaatctttgtcatcaggggttttcttatgttggtgagagtgttctagtaccttaataggcagcttgagtttgatgcatgagtcataatgaatcagatgtaccagagttgttgttttgattcagctcagcagttatgtctttgaatctgagtctcagatgggcacctgaatagactcatcacaaagcttcattgcaaattatacagtgcagggaagctcaacaaattattctgattgtttccagaaagaaaaaggaaggcaggattatacagcatttagtgtcaccaattaacaaggtcatggggctgaaccactcattccaaaaacttaatatctacaaactcaagcacaaggagcctcttttaattatttggaaactgtgggctgcagggaaagcgagtgctctcagccttgtgatctgagcaaggttcaggagctggagtgggtttggctgagtcaccactggctgcatgaccccacacacatcacctgacctccacatgcttcagctggcccggctgtagagatgagaaaatgcagccggaaggccccaaggggcaaaaacagccttctgcacacagctgccctggggcagcttcctgcggcacagtttagctctatcagaggcagggggaccctagtctgggccaccaaagcagccttacctaaaagccacctttgggaaagggcctgtttcatgccgcaagtgtaggagtataagtaagtaaaaccttttttaagccttgaaaatactcatatgttttggttgcatgatttcatttgaatgaatttattcttagtcaggaatcagaggcgtacacaaatatgtatgttcaatcatgctcatcatagtgttaactttagtaacgaaaaactgaaaattatctaaatgttcaactgtaaagcattgtacaacaaactatggtacatttttattttggaaggttgtatggccattaaaaaatcactagaacagaataatcaatgacctgggaaaatgtccaccgtaggatagtatatagagaaggaccgtaaaacaacattgttagaataatccaatttgttttacactatatgtactcccaggtggatagacaaaagcctggaaggtgagacaagaaattattaatgatgtttaatctctgcgtttggggattatcagctctttttaaaatttatggtgcttgcctgtatgttccaatattttctatcacaatggtcatgtgttctttttgccataaaaatcaattttgaaattccccgagttgctgttaacttggcctgtctgttgcatatggggccaaactacacgcctacctgtggagcaaatgaatacagtgactcatctgtgagctgaggcttgagcaattccagcccaggaggctctccggcctgggaacagagtgggattttttgtctgaggaggctgagtctggaagaaggatgactctgtgggtggtttcctagatcctcaatgcacgtggcttccggccttgactcctcccttaaattctgggttgctggccaaggctgaagaacaaatttgcctcagcagccaactcctctatgtaagcctgacatttactctgtatctacataatatctattaagcaacacctgatcctgttcaccaggatgtatgttcccagggaaaccttcctttcaaagttaagcaggcattcttggt

SEQ ID NO: 57731 - DNA, 530 bp, Homo sapiens
gtagaatgatagtagctgatgcaatgtatggtgtaaattttctacccaccaaatcccactttgaatacataagtcttctgttattctctaattcacaataacaccaccttattgtgtagaatcccattgcaataaatacacttatgatgactggatcaaagtaattttgtgatatgcccagcttgcaagtggcttgtggttcaggggctggagggtgctgtattcccaggcttcaagctggggtcaaagtgctaaagctccgttaagcaggatggaatcacttgcagattgacattccacaaggcagtgtgtcacctgccctagttcaacctgcacttcctcagaggtgggcactagcaatttacttccagcctgagcttaaggtcaaacccagaactagcaaggatgtttcttaccaaaattaaaacttccataggccttctgagacctaagcaccagcagaacattttagaaaacatctttccaccattccctgggtcacatgcatctgagggccactcagatttttc

SEQ ID NO: 57732 - DNA, 1129 bp, Homo sapiens
gagaagggctaactttcagttaagatttaaaatttctttccaattaagtgcttaaattaaaaagcaacaaatgaatgtgcagaaaaatgcagtacacctgatgtataataaagacttatactagttttgtccctgattcttgggagggagattctaaaacccctggagtttcccaaatgacagaagtttctgtgttattcatgagcccttggatcacatctgagtttaggctaagagatgggatgactcagcaggagagaggctggtcaccagaaagaccaactgcatgattagagagctttgagtcagcccggctctggagagtacaagggggctgagactgagctcaattatacggcagatgattaggtcaatcatgcctacgtaatgaaacccctgtgaaaactttggacattgaagctcagtggagcttcctggttggtaaacacatcaccgtaccagaagggtgatgtacccagattccacaaagacagggcacagaagccctgtgttcaaaacccactcagatcttgccccatgtgtctcttcatttggctgttgctgatctgtgtcctttataataaaactgtaatggcaagtactgtgctcctgtgaattctgtgagtcattctagtgaattatcaaactgaagggatgatggtaacccctgaatttgtacctatttggtccaaagtatgagtggcctggggtcacccaaaaagcagttggcgtatgaagtaagggcatctttttgaggactatgccctggaacttgtgtggtctgtgctgactctgggtggttagcccgggaattatactgcagtatgttaccagttggtgtcaggatagcattacaggtcattgtcactgcataagatgggatggacctggggagaaatttttatccacagccaggtcctaatgagaagggagtgttttagttccactgccactctctcctaaacaatgagcaaatccatgtaaatattacatgataaaatggacttacctgctaaaatctcttaccattttcttttgggttattttcccccatgcggaattttcactaaaatataactagctccactaacagtttcaaataaatcagtctgttactactagttggcaa

SEQ ID NO: 57733 - DNA, 844 bp, Homo sapiens
agttactgcctgcaatgtaagtgtcttggggattatataatgaggtcatgaattatctataagtaaaacaatgttattaatagtttcagatacatgaagtgctttatatgcaatattaacataacataaagacccacttctcttattcaatactaagacagaattctcctatgacctaagccatcatgagctaaatacaataattaatatatgccttgtatgttcattctttcagaggcatttgaaccagagtaactccatcttaaacgggggctggataaaatgagactgagatctactgggctacattcccaggagattaggcattcttagtcacaggatgagataggaggttggcacaaggtacaggtcacaaagaccttgctgataaaacaggctgcagtaaagaagctggccaaaacccaccaaaaccaagatggcaatgaaagtgacctctggttgtccttactgctcattatacactaattatattgcattggcatgcttaaagacactcctagcagcgccatgacagtttacacatgccagggcaatgtcaggaacttaccctatgtggtctaaaaaggggaggaaccttcacttccaggaattgcccagcccttttctagaaaactcacaaataatccaccctttgtttagcatataatcaagaaataaccataaaaacagccaaccagctgccctcggtgctgctctgtttatggagtagccattctttattccattactttcttaataaacttgcttccactttactctatggacttgccccaaattctttcttgcatgaggtccaagaaccctctaatggggtctggatcag

SEQ ID NO: 57734 - DNA, 555 bp, Homo sapiens
gtacacatgtatcaaaatatcacactgtaccctataaatatgtacaattattattatttaaccataatgataaatgaaaaaaaaagactggaggacaatgtctgtcatctgggaacactccccagcactcgggctcatgcagcatgttttgcttttgggtgtcgtcaaccctacgggccacttggcagaagtttcaaaagaaaacatgtgccttctggaaatagtggcctaatctcctgtgtgcaggtgagcatattgctcactgttgtggaattcctggaataatgtcagaaggaagtttcagaggaatgttctgcttgactgaataaattgtgaagctctgtagtttctacagcaaacaaatttaagaaaagtgtgatacatggatttttttttttttagatagtaataagagctaaaagaaacacattacttttccttggtttctgtgacaagtaaacaagaaataccaataataaatgtaatccccatgattgatgaacaagtacctgtgtttgtgtatttcctccttcaagcaaggcaatgccgaggaaa

SEQ ID NO: 57735 - DNA, 589 bp, Homo sapiens
tcccccacccctacattatttatccaggttatataatgcttaaactcagctcttcaggggcatgatgatgtatacataatgcaaatatccttgctggaattacaaaggcaatttatcaatttatgtgcagctaatcaacccatttgctttctactgtagagcagtaaaagcttatctcatgcagactcacggatcgttcaaagcaatctaattgaatttcagggccaagagcattgcacaacacgtgacgtgtctccagtggagcacagtgccagacactgcaggcgttacataatcacatgctgttgttggcagagccgcctcagtggcttggcagtctgtgtctcctccaatcatgccccgcagctttaatctgcacggagtgtgcacatgtactgtcacatgctttgggactttcatagcagcaaataaaacagggaccatttccctactggtagaaacagttcattaaaaccagtcacacagtacacaagattataacgggatagaaggcatatgtaacacacatgcttctaaccaagcaacagagaaagcaaatttcaaatactccatttttcaaacgaataag

SEQ ID NO: 57736 - DNA, 3042 bp, Homo sapiens
ataccacctgtgtcccatccctccctcctcctacgccccttctctcatcctctctccggttctaacagcactggagtgcctgcacttccgctcttgcctccgcacaggtgctcacagtgtccactttactttgaatattctcctccacttcataataattacattttaagatatcctctctcaggggcagtggctcatggctgtaatcccagcactttgggaggctgagacaaagggatcgcttgacctcacgaattcaagaccagcctgggcaacatggcgaagtcccatctctacaaaaacacaacaaattagccaggcatggtggtgcgtgcctgtaatcccagctaccatggatgctgaggtgggagaacatttgaacccacgacctcaaggctgcagtgagccaagactgtgccactgcatttctgcctgggtgacacagcaagaccctgtctcaaaaaaaaaaaaaatcctccaagttccagtttaaattcttttttaacgcagctttcactggttccccagtcacaatctgaatcaatctccctcctttcctccctccctccctttctctgtcctcgtctgtctcagtctctctctttctctttctctttttctctctctctctctctcctcccccgacccacccagcctttgctagacttttatgctttttatggacacatcctccatgtcagctgtactcagctggttaattcaccagacatgcgttaaacaaggcattgaggaaggcactaagggcataaaaaggtgccaaggatctcaatcctgcctttgaagaacttacagtctagaggggaaaacaaacaccagagactcttaagaacgtgtggtgagggctggaacacatattgattgaactgattcttggtagcaaagggatttgcagggcaggagacagctcatgggaaaagaggactgagaaagggcatgggatttggtaaccatgagcagaaggcagggggcagagctggactgcagatgcttcacatggaagggtgtttaaaatcctattttttaaagtaaaggataaatcataaacaaatgaaactaactttcagttgacaatgtttacatgcagcattgtattccataaatacaatcaaaattaaaactttcatttctctaatacgcctaatcaggaaaaacaagtggaaagtagaaagaaaggaggaaagggaaggataaaaacaaaggcagagaaaaagaattaagagagggccaggaagagagagagagaatgagagagaaatgaaaagagagaggctgagagagatacacaaagtgatgggggggaaaaaaaaaaagaagacccagggggaagagaggagctggcacaaggcacaggaccttgaagtccttgtagcaccaaggagtagggctacaaagaaattcctgaagagccattccaagaaagacacattcagaaacagtactcagacacatacgcacggtggagccggcccagacacagggatagaaaatcagagtgaatagcggttcaaggagacgctgcagaaatgaatcagccccggactgctgagccgtagaagctccatctcatccttttttagctgttggagattgtttttctaatgctttttttctgtaaatgtgggctaaaatgaggtcacgtattttagagtttgtcccatgagtcaggtgatggtaagctggggatcagtaggtccatgggtcaggtgatcgctatctttctcagtttaagaacaggaaaactttaaacgatttttcagggtcatgaacacagcattgggaggcctgccaatatttctcaggattcagcctttggaattcctagaggaactgtgaaaccttttatgattataaatctaattactttaaatgaacaatgtacagacccttaaaggactactaacccacttctggtagctcagtctatattaaattatgatgaaagacacagtaaactgtacctagattcctaataggtacttgaaaacttcaaactccattctccaaatctggaataaatgctataattaaggtatcacaaaaggtattttcaaacttaaaaactgctaagaatttatagctctcgtaatgggaagtctattcactaaaccaatgggcatgaaataataatttatctcctttaaattcttaaaattaggcattagactaggttattttttctagttattcctttgtcctttagaaacaaaaacagagagggattgtcacatataaaataccaaaaccaatgattaataatttttgttaataagaaataaaattttatttgtctttcttgctaaaacaataaatctagatatatggaatcacatgttcaattcaattaaaaataggaaaagagctggaaactaatcaataactttgcttgctctgaaatccttctcaaatgaaggtaaagttccatcagggacaatactaattttttttaatacacatgaaagcagtttatcaacctcaaagcaccccacaattgttagatatgatcattagtatatttaatgggaatggacaaatgtgattcatatgttaaatagcgtctgtgtgatattttttaccaggtttgtcattaacttaaaaaaataaaattatattgatagcatttcagaatatttacacagtgatttggaacaaaaagggtaagaagttaaatcaataagcaaaattacatctttgtcacctagcttctgttaggcaacacacctgcaaaatctcaatgatcttcagcttggtgtccatcacagtcacatcctcgtgctcggtggggctcccttgcttgctcgggtggatgctgggtggcacatccggcacgctcatggggaagatggagcctctactgagtaccatctgggtcatcatctctcccaccccatgaatggttctcatcacattgtttcctggcatgagaaaatgccgtaagtcaacacacacaacccctggagatcatgtaactataaaactcagttagtcacaaccacactgaaaagcagccaggaaaaggattca

SEQ ID NO: 57737 - DNA, 1344 bp, Homo sapiens
aatgacttattgtaataaggtttatataaaaagttgggtctcattaaaggtacttcatctttcatcaagttgagtttttgcttactttcctttatacttctcccttttttcaaaaagcatacataatttcacattacttaaaaatttattaaaaggaaaaaattaataaaatagataccaatgagataagggaaaataatgaaacctgtctttatcaggggcttatcatattgtgtgtaccttgctagaccacaggccacatatacccttcacctcattggatcctcacagcacggtgggggttgggagacgaattccagtttacatagctaggaagtggcagagtctcaagtacacatcaactgatctcagcatgaatcatgttttcccacaccaggttggttcactaacagactttacaaagttccaaaatttttatactagaattcagaaagccctaatgcaattacagaagaaaagattccaattaaaactgtgtactgaaaatgtagaatttccattaatcatatgataaatttgctcacattattctgaagtgatcttacccaaccagcttttattacatatcatgtgccacatactaccagtggtattttgcttatattatacaatttaattttagaagcagcccttgttcagaaagtattcataaagtacctaatgttcatctggctctataccagggacatctcaggtgggaagatataagaaaggaagaagaatttacaatatggtcaggaaaacataaaatgtgcccataaaaaaattaagaacaagtacaagacagatatgatggtagtagtatagcatggacagcacacaaaattgcttaggaattttttttaactgggaaattatcttagagtgagggcagtgaaagacagtttcacaaaggatatacaatttttaacgaggttttgaacgaagtgaaagatttagattacagaagtgtgatatttgtcaaatcatgtcatcatcctatgttcaaaatcttaatcctataaaataggttgggccttcttgtaagaataaaattatataatatgtgcaaaaaaagccatgaacaataaaaaagtaccatataattgtaaggtattatttcaaaaatgaaaagtagaggacatctgcatgctttcgctacacctctgaaaaacaactcttctccatttaattatgttccattatagtggtcaccaccttactaatgaatatgtggtttcatcatataattatagttcataatgtcttataatacggcatgatcaaaacacaatattgactctaaatggagatgtccttcagaagagtgtttaataaagaata

SEQ ID NO: 57738 - DNA, 2151 bp, Homo sapiens
gctcttaattattagtagaaatagaaagctttgggttgtatatcctttagcaagtataaaacagatgtatgcttctaaaagtgaaatgtttgcaaagaatatggaaaatatccagttcatcagcttgtatgtgcatttgcttttaacttctataagtgacaaagaagaacatggcttgccataatccttctactcaaaagatcaattacactgaatggtgcctgtgcatttaaaatcactgagagcaaatcgtaagtattaggcaaagcaaattgactcaaccacacagcctcctgggagcaagtacatttgtttgaaaacaatatttcttaagtaaatgtatagccaatgaaaggtattggattgatagtcctgaagatctgatcttctatttcactacagtgaaggccacagcagtgccagctccctgtgtctccatatgagcaagcctcaatcattttctgaacggaccacctttagggtacaaagataaaaagctgcttctgagcctagcaatttctgctgagcgtgccaactataagccattgtgacagggagcagccacagcctggaagctagacgcagacccccaaccagatctaggatgaggacaacttacaatgacactgaggtgggctgctgtgtgaccaaggatgcagaagaaaaaaacttctgtaattgccactttccaagccagccatctctacaacctcaaacactcatcactggcatctaaagctacaggatttcccagaaaaaacaaatgaatgctgtgcgtgcacatcctatttaagcctggcgccactgaggctggcaaaaaatggaactccaggaactgtaaagccttttccttctagatatgcctcctcttctgctctcctgcgtctgacctgccaaacacatttttctgcatgtccaaccccaactgtgctggagaaaaattagtaagtgggaagtaaggataaaaaagatgtagttctagtacacaaaattttcctgacatgatatgagcatacagaactgtatcatttacttaaaggaactggtctatctagcaacaatgtttataaaaccactttcttttttttttttttttaattgtactttgcaaatgacttcccattgaagataaagtttcattaaaagagaaaaatacttacagtatgagaggagtccatatgaaaaaaaaaagaagaaaatacaatccaaatcatttagatatcaaagagccaagatgatgatacagagtattgtaatgtggtaacattgctatgactcctaacagttgatctttaaaataatatttctttttttttctctaggtactttccacaatctgggatttcctctctggcatcgacctttgtctcaccctgcaccacaggaatttttcccatgcttgacaatcctatctccatatttggagattccagaaaagtgtttcttcttgcttcttctgttaagaatttatacagtctaacagaacttttgttaggaatttatagtctaagagagaacccagctataatattaataacacatctcctagtagagttgtaagatcattcttgaagtttgaattgtcaccttgcataacataaatcgttttcctaccagattaattatttaagttcttaacttttttgttttaaaaaactttcaaatttatagaaagagttgcaagaatagtacaaagaactcccacatagactttgctcagattgattagattcacaaatcctgccacatttgcatctgtctccacacacacccacacacacacacacacacacactcacacacacacatctttcctgctctatttgaaagttggttctagacatcatgccctttcaactttcaattcttcagcatgtatttgctaaaaacaagtacattagcttagctaagcacagtgcaattacaaaagtcaagaaatctaactgacataatcaatattcaaatataacctgcaatccatatttctacaatccattttcaaattgtatcacttgtgccaataatatcttctatagataatatttctcctaatccaggatccagtactgaattgcatattgcatttagttgtcatgtctctttaatctcctttaatctgaaacagtttctcagccttcgacatttttgccc

SEQ ID NO: 57739 - DNA, 530 bp, Homo sapiens
aaaaaatctgagagataaaaattataggctgagcacagtggctcatgcctgtaatcccagcattttgggaggttgaggcagggggattgcttgagcccgagttcaaaatcagccagggcaacatagtgaaacccgtttgcacaaaacaattaaaaaattagttggtgaggtggcatgcgcctatggtcccagctactcaggcagctgaggcaagaggaattgctgaaacctgggaggtcaaggctgcagtgagctgtgtgattgcaccactgcattccagcttgggtgacagggcaagatcctgtctcaaaaaaaaaattattattattataattatttaaataaaaatttaactgaagaaggaaaattattctacatacattctaaaaatattattaatctataaggcagtatcaaaaattgatccagatactagcaaagagaactattaaaaggcaaataataaaagggaagttaagagagaaagaagaggaattaagaggatccaacatatatctcataaaagttcc

SEQ ID NO: 57740 - DNA, 721 bp, Homo sapiens
ctgtcaaggctattgtttactatattacacagtgtcctctttatgagcacacataggagaaacacttccctggtcctattcctgggaacagttgtgcttctagacctctgatttggctctgtgctgcggatctcctagccaacgatgtaacagactatgcttccctatggctaagagggcaagaaaaagccttcaagtcaaaatttaccagactttacaacatggtttttataaacatgccttaccccgatttcaatttattcatccaaccatgattttccctgtgaccaattgctttatttatttgtattttatctcactatgtagctctgtattttggaaagtgccttacattcttttttgaaaaaggtggggcatatattaacaaataaccaagtaagaagctaaaaagatctaagtgaaacacaggaaaggaatgcagctgagataaaacagtgtgtgcatactaatagaaatagaagaccttctaataacaattcaaggatgacttccaactgaaagtgaaaacttttctctcttcacaaaatgaaaagctaagctccatatgttaaacacagtcccattaatctaaaggactatttcagaacaggcctttagaaattgtttcctgaccctcttctttttgatgtaataacttgtgtatacatccagataagatcacttctttatgtgtaaaatcagatttattcttaaacataca

SEQ ID NO: 57741 - DNA, 1469 bp, Homo sapiens
atacaaacacctgagaagggaataccctaagatcttggttctcagttgactcctgctgcctgagaggtccatgagggtgaagtgattggtactgagcatctgggaaaggcaccttttagcttaccaacgactgggaaaaatacacaggaaagttgttgatcaaatttgcagatgatgcagagtgaagaggagtagctaattaggcagattaaaatctagattttttttaaatccaaacatcaatgcaattaactttatacaaacataaatataaggtcagaaaaaagtcaactactttggtacatgatagagaggagcaccaaggctattagcaattagtattttaaaaactgaaaattgcctagaccttaggcttgagttcaacttaacataattagaatgccctatagccctgtgtgcccaggacaattctggtttatgcctgttgcctgagcttaattattagccacgtccccctttcactctcaagaatgtcctggtttgggtgataagtatattatcactccaaatataaataagtgaatactgtgctgaaccggcggaaaagctgatgccgccattttaggctgattcatattagactgattcctcaaacagaggaagaaggaacacatccatgttgggtccagttctatagatggcacattttaagcagcatcctaacaaattagccagtatccaaagttcagcaagggggaaagcaagcaaaatacacaagtcttgttatttgagcaacgatagttcaaactgggaaatgttgcctaacagagagaaaacaaagagttggcataatcccactttgtgtagctaaacttctacatgtaaacgagggaggaaagtttttccctatattgatccaggatcaaagaaaatttcagttccatgcaaggggaaactcgccagcaattggaaaaaatccaaaaaatacaaattactcagaggcaagtaaacttgtactcatcatgttgaggcagaggcagatgcagtgcagcaggaatcttgccttggggaggtctttcccaaatactaccttctatttttcttttttttttccttttcgtttctttctttctttcttttttttaatacggagcctcgctctgtcacccaggctggagaacggcgctatctcagctcactgcaacctccaccttccaggttcaagcgattctcctgtctcagcctcctgagtagctgggattacaggcacgccctacgacgcccagctaatttttgtatttttagtagagatgggtttcaccatgttggacaggctggtctcaaactcctgacctcgtgatctgcccacctcggcctcctaaagttctgggattacaggcataagccaccgcacctggcctaccttctatttttcaatggaaactgtggtggaggtgactggcaaaaagggaaggagttcatgttgtgcatttacataaaaagctcag

SEQ ID NO: 57742 - DNA, 537 bp, Homo sapiens
acaattttgcaggcaaactgttatgcacgtacagattgtcagaagttttctgttaaaagttaggcaaacgatggtaggtgcaacctttttcagataaaatgttttgcaaaaatgagaactatttcccaggtagcagcattataagtgttctcagggtcatcctgcccacagattagcaacggctttgccagaacgggctttgatgttatccaggaatgacgaacaacagacctcctgtgctccttgcccgctagatgaaaacatgagaacataaagaagccctggtgcttctttccttttatccttgaacaaacacagacatacagcagatgtgacctcactaaatatgagctggttcaactgatgctgagtttctattgcacttctaatgattgcacatggtgatgttcccactctgtgggactgaatccaggcaaaagacaaaagcaaccctttgcaccacagacataaaagtttatttgaggcataagttctgaatattctaacaatccgattacaggattatttttctatagc

SEQ ID NO: 57743 - DNA, 722 bp, Homo sapiens
tctccaaagcaatccaatgagatatgtacaattaccgtcattttacaaatcagttaaataaagatatctgctcaagatcacgcagctagttaacaccgcccaagcaacgaaaacggctgagtcaccacactggcaaaagaccagggcagggggttcaaaaagggtgtgcacatttcaggggagtacccaaacaatctactaggatgtggaggaaaattccagaaatcagatttacttttatttatcccctattttagaactttcttctgcttatgttcaataatgtgggcaactcagtactatagtaatacatatatgtaacttataaataagtgtgtatcgattatgcttactttttttctgatgggacatatgatccaaaaagttgaaagatcatgtcacagtgagtttacctaataacaaacctacacatgtacccacgaacctaaaataaatgttaaaaaaaaagttgaaaggtcattgtcctagagttcagaactacttttacagttactgtggcataaacaggactaatctcaaactactagaaccagcgttgtagccttgaggcccaggtcagggggaacgagatcaattcatattctttttattactctatatattctgacaatgaactcccatcaactcaaatcatctgtgcttgaaatatcaaaaaatcatcttatataaaaagttttacaggccaggtgcagtggctgatg

SEQ ID NO: 57744 - DNA, 1057 bp, Homo sapiens
ttattaaggacccacatctgggtccttaattatgcagatataatcagagttcaagttgcataactgtgaggcttcctacaacaatttgtaactgcacttgtgtttcatgcagcctgtctaaatagaaccagaaggacaaatgtccacagccctatttctaaacagagctgaagcttctgccctttcaaaaatgctagtaaaaaccatttttagggtacttccaagataggacactctctagataagcatgttatcctccagttcttcatggcccttcagagtctctgtaagtttgaccacctccaagtcatccagtagaacacacacacacacacacacacacacacacaccccaatctcagccacatagtaaaacattacagaagcaccaggactcagtgggttcctggggagccatcactttcattttcaggcataagtctctctttgcaggggttccagctgaagggcaagcaaggttccaggagaacaagggtgagtcaatggtgccttgccaactgagactggatctccattcatgtgggctgctctattgggttattatccaccttattctttaaaagacaatttctaaaccacttccaagcatttgtaaaacaaacattgccacccaccagcaatgtttgctttattctgaaattgctgtatttaccttgaaaaccacaaactgtaaacagggcacctgttcagagaagatcttcaaactgctcactcactaaatcaacacctgggaaggaaaggcagttgacttcggcttgaatacacagtgtacaaatcaatcttttatctaaaactcttggtggtagcttgaataagttaatgattattaagcttatggagcaacacagagacttccataaacaaaatataacttttgttaatctgtttaatactcagaagagagaaaaacaagtaagactcacctaccataaaccatagaagcacaatattaatgcacacatatttccacataaaataataaatatttatataataccctccttctcagtggagacactttatactagagaatagg

SEQ ID NO: 57745 - DNA, 858 bp, Homo sapiens
tggaaatgctgggatggtgattctgggaggcaaatctacgaaacagcaatggcttttaaagccaaaaaaaaatgggggaaatatattcatgcagagaatggcctaaggcaagagccgtaaagacaagctatgcaaaaggatgaggcacttggtcaggcactgtctgctcctggctgttaagaaggccagggcagaggcaagcccagctcagggaattctctgggactccagctgcataaacaatgcatcatgggagaaaggctggagctttaagataagacagaaccctgagttcccaataggaaagaaccctccttttccagtgatgattgtagtaagataaatgatttaatctaaaactggaggtagaaaatgagagtaaaccagcaaggataatgacctcaatgactggattacaggaaaagccagcctttcaccagaaggatggagtgtctgaaaaagtgattcatgctctgaaccagtgcccagtgaataatatgagaccaagtatcagcatataattacctagtgggtacagagctgttaccccaggttcccttagatactctaaaataatctttgcaaatttaaaacaatttacttcactgtggattgaaagagggaaagaggaaaggcacccatgaagcgtaaatgtttatctttgaaagattaattcttcctgaccaacagaggagtaaggctgcccaggctcatgcctgtgaaacgtgggcacccctggaaaccaagttttatcacatgatcccagaaaaagtttgagtgtctcatccaaaagcacctaatggctattttgggggatacagactatgagactatgggcagagcactatgcctggaaaa

SEQ ID NO: 57746 - DNA, 855 bp, Homo sapiens
tgtccacaaatataactatggctcaccgtcaccaaggcaatgataattactacaatagctaacacatcagtgcttatactgtgccaggtaccatgctactcactttacatatattaatctcttcttcctcaccacaaccctatgaggtagaaaccatgcctattcccatttgtagaactgaggagacaggggcacagagtttatgtaactttcccaaggtcataaggtttacaagtggaagcgccagaattcaaaccccaagtattctgtccatggaaccccctctgcttaactactacatcacacacacacacctggagagtctacggagggtgaagagcagcagagtccacctgcaaaatgttgctggaggcccagaaactgaacttgtatcatgaatgatctcaaaaacagtggtagctcatgattcacaaacccagcagaagcgcttggcactaacgtgtttttcctaccacgctttagttgcataagaaagtaacactgatggaaaagggattgaattaaatctacctcccttctttcactcattagggggaatgcacaagtaacaggaactgtggaagtactggtgacttccacgtcccagtgcttggtaggcagcagtccgttataacacagctcgaagtcactgtcccgggtcgttgcaggttaagtcatctgccccaaagcctaacagctgaaaacagtagccagacaggagtggaaacaccagttccacagcctgaaatgtagggcggggggacctaagtgttgaaacaacgaggtaacaaaaaatttcctgtgcatcaaaatatactgcagcgtgcaattaaactgcacactgctattcccaat

SEQ ID NO: 57747 - DNA, 2502 bp, Homo sapiens
ctacataaaatatataaatatatattctacataaaatatataaatatatattatacataaaatatataaatatatattatacataaaatatataaatatatattatacataaaatatataaatatattaatatatatttccctcattcataaacatatatacatatatgtgtatatatatatatatttttccccccattcaactcgaatctcaagaactcttcacttggctaaattccaagagaggctcagcatttcagtgggccaaggcctgggaaggagagatagcaggtctgagttctagaacccaggaagccctcagagacgtccaagggccacagcgctgcagatgcccctagggctgcccaggccagtggggcgagtcctggttcggcaaggccaaaaggaaactgctccagcgaagaggggacggtgagctcctcccgcaggacaacgccacactttggctcaccacatcgcttgagtttcatgtccaaggccacggacttttatcgactgctctttcaaacccggcactgagagaccaggggctgaggacggtagcgagaaacggtggaaaaggggggtgttttgttttaccttccagggaaaacaagcacacattttaatcaaaacaacccagggagaagccagcgaagacctcttcgccgggcccgtctccgggcttctgaatcacttcctcctttctgatgtgtctctgagcttgagattacgaagttgctgagaaagtcttgcctctcagggcagcttcctgcgagcgggcgagcgagagagcggagcgcacggcgctgtccgcgggcgccgaccctgcccggccgggccaccacgcgcggcagcgggaggaccgggcggcggaggagggacagggactggttcccaggacccggagcgcgagcgctgcccagccctcgtctcccgcttaccccaaggtgctgatgaagccgttgaccgagccctccgcgtacagggacacgatgtcccctatgtagaggaagctggacattttctcagtcatgctgcttcatgttccacagtggacgtccctcttcttccctgcgccctcgccgccctctctccagggagccgccgcggcagaagcggatcggatcgcgggactacagcggccaagagccgcggcggagggcacggcccgagccactgagcgtcgcggctcagccgtgcgtgcgcgccggggaagccagaccggggccaagccgcagctgcggacaccccgcgaagagcgcagcccaggcgcccagagaagccgcagccgccgccgcctccccggcaggtttcctgttcctttctgaagttttctctccaacacctttgctcctcctcctcctccttccctctccgctccccactccgtgtccactccctgctctgcgacccgctgcggccgtcacagccgcccggcgggagctggaagtggccgagccccctcggtcccctcaggggaatttttggaccaggtgccggtgcccattgggcgaggaggaggagaggagccctggagaggtgggggggcggccaatcagggagcagcggccgggggcggagctgggccggggcggggcgaccctcgggaggccgggccacccgggaagcctctgctgccgccgcaccggcccgcgcggggacgcgacgctgggcggcgctggaggggcggcgggggaccccggcgggggagcgggcgcgtgcggccgccctggagaggccggacctggggcgcgacagtcgctgcctgggaactcgaagaagcttgatgggggcagggagggtgagaggtggcggccgggcgagcgcactgtaggacccgagcacaatggagagagcccccgaactgctggagatgaaaaggtggagccccagcggggtgggtaatttgctggccaaggaagaggtaggcgttgaagtaaaggaaaaaaatacaaataaaaaataaatgcatgatgaagaaagtagaagagaggaaggaagagagtgagggaaggaggatgatctcgatttcgttatgtagtttgggtggtctttttcctcttcttttctcaagtacgcggcgttaatgaaactcgacccgtccgctgatgtccaggtggacgcgagcctccaaggaggtaaacgtcacttggccaagccagtttttgtagccaaccttcagcggtgagggctcagtggagctgagctttaagcctccgaggccgcgcctcctgcgcttcgttaactccaagccgaggttaaccttccacccccatcagcccaaggtccccggctcaagacaaccctggcttgtttacgtttaaagctgctgactcttaaagctccagccgttataagcaaaacgcagctagacacttttccacgccttctctgttgcttctgtagccctcttcttagaacatgattttaaaagccttttgctcttcccttctagaagacacagtggaggcaaactgtatggcggttttgataccagcca

SEQ ID NO: 57748 - DNA, 974 bp, Homo sapiens
ctgagacccagtggggttgccgcagggccactgcagcaaatccctcccaattctgtggcaaagggtgagatgatcccatcatccactgggccaggggccagatagagaacagggcagaaactcagaaaggaccacaatgagcaaggtactgccaagtcagtcaaggagaaccactgggctccatcaaactgagaaagtgacccagacataggttaaacctctggtggacctcagccaggagtgccaacagaacgggcagcaacctgacaagagacattgcgccagagaggcctgagcacagaacgaggacatcacgtggacctcggaaccccagccccccacagccacaaggtcacaaaaccacataccgccaggtgaaatctgaaagatcacacattttcttcaaaagagagtagacatttacctcaagagattgtttacattttttgtcactggatcaaattttaaagaagtgactgaagtggccgtttcctggccatccagcaggtggagccgtgcgttgatcagatcagcagcagacagtgaggttttagacaaatgaaggaactacatttcctctatgcttctgacttgcagagccgggaaatatgtaacccaacataaaagtacaacttttcttctaattagtcaatgtatggtatttgattatgtcaagccactgtttctaaccacatgcagagaaataaataaaaaatattctccaggaactttccttgatctctccaaccagaagcaaccccttccccttctgaatgttcctagcacacaggctctcaaagtgtggttcctggaccatcatcagagcgtcagctgggaatatgttagaaatgcaaattatcagatcccatcccagaactactgtagcagaaactctgaggggtgaggcccagcaatacatattttaacaaaccatttaacaagtattctgagagcactttgtactattctatgag

SEQ ID NO: 57749 - DNA, 2298 bp, Homo sapiens
aagataaacatctcctaagataaccgcacatcaggtcttcgccttaggataaggaccccaacttcacactctccccttagcttttgaaacatcacagtaatttaccaggtagagcagaaaaacttagttgttaccatcacactggtgtgtagaaggaaatttaaaacttttaaaactttttcttattaaaacagagcatacggtactcccctgcttcgctaacaaaatcttatactgaatagacaatccacattcgaaaagcacatggcaagcaaagccaaagtgttaaatcaaaacgaactgatttcttacgatccagctattttcacctcttgctttcaagacgcatctccccttcatgcaaaactctctttgagaaaccttctagacccactttgctggagggtggggggtggaaaatacaaggtgagtggatagggaagacctcaggatcgaggttcgcttactttcgtgcctggtcctgcagtgaaaacgaacagaggctatggaccacagcctctctggaaaaggctgctggctgggcggggagagtcagcgcacagtcgggagtgtctggtgccacagacaggggactatgctttccccgatcatctcctagcacaccggtccttcccaggcttcctaagagcaggagcgcgcgtgcgcgtgcacacacacacacgcactcgggctcgcgcgtgcgcacagcgctctccgatagcccggccaagcctcccttccccctcgtagggccaggcgtcccagtcgccgaacaggaagagggcggggccaaggaggaaaaaaaaagcctccacccctcgagattttccacccgctaattttcccagtcacccattgggaagcaggatctgggcgacctgaaagcctccccaacagcgaagtaccaaccacggccccctaagcgtacgacccacccacccggtctccccttctctgtctctccacccaggccggtttcccctggaaaaactcgcgagactttgcgagaggccgagcgaaagcctgggaagggaggaatagggagggacatagaagggccccgccctgccttctggggcaaagcggagagtggtcggttctgccccacagtaacgcgaggaaagaaatctcgcgaggctggagttctccgggagcgccggtcggaggcggtcggcggaggtgtctaccccgccggtgatggcgttgaacgccactggcttcccggccttccgtccgctgcctccgtccgattctgcgtctgcttgctgaggaggcggattaggggggcgcggagtctcttcccttgagtgcataggtcccggttggtagagggtttgagtccgcatcgccacagctgaaggctgcgagggactaagagcagagtaagtggactaaatccagggacgggagcaggggtgggcgagtcggaggcgtcctttgccggggcagtccttcgccggggccggtgccttgcgcctcttgaaccaccggcgcccggccctgtccgcttcccgccgcgggctccctgctcctgggagccggacttcctctccgcgccccccgactccgagctcctcttaatggagatgcggtgcggaaagttcaatgaaaagccttggctctaaccctgtggacacaccttccgtatctgctttcatcctgccttacccacctgcgagttcaccaccggacgggggaccctttcagtcacctgtttgcagcgtttaatgaagataacttgtttcttgaaactgctctccaaggggtattactcttttctggttctcttcctgcctttcttctctatcccatctctgataatggttccagtatctgtcctgctatccgaactagaaaaccaggaatcatcattggttcttcatttccacttaacactgcactgtattattttttttttcgccagaattagtgcggttgccccctctgccccccgccctccactggtttccctactataatccttccatagagttattctgaaatacatatttatctctgtcctttccttaaactttttagtaaccgtattgctgacagcatcaaatcctaattgttaagcacatcatcattcaggatcttttacagtctgccccaatccattttaccttttagtcctgctttaatatcctaccatacaagactatactggctatttccccaaacatgccatgcgctttgacagctctgtacttttgtacgtgcggatgtctaggatgtttactgttcctctattttaccacctgtcaaaacccaattcataaatcattgtcttctcag

SEQ ID NO: 57750 - DNA, 3302 bp, Homo sapiens
aaatagagatagcatctcttctacctccatcataaggctattttgaagaatgaggattcacagaaggattaagtacaaagcaccatgccatgtaagatattcttattggaagacagctttacggaagtggaaggactatgaaatttgcagggagactcacctgggttcaagtcctatctgtaaccctagcagctgttcatttgttcctctgacaagggaggaagatcattacattgtagggtggtggggattaaataacactgcacgtggaaagcacctggcacacactatacagagtgaatgttagtgccctattataagcaaggtttttctgcaaaaaaaaaagttgcccttttcagctttggcctcagtcctatatacaaagatcctagaattcagtttgcacaagggcttttcaaagataagtgcatagcaacacaatcacattattcagaaaatattatgtttcagaactgcaactagtctattaacctcaaaacaaaacagaatgtgcttagtttcatggaaaagcacatgatgatctgcctggcacaactagtgccttttacattttatattaacaaaccatgagctgttgcccaaacccattcaccaagcacaagacttacaatctaacatcccattctgagttctcactgagatgaacaagaattacctgaaatcggccgggcgcggtggctcatgcctgtaatcccagcactctgggaggccaaggcgggcagatcacgaggtcaggagttcgagaccagcctgaacaacatggtgaaaccccgcctgtactaaaaatacaaaaactagctgggtgtggtggcgggcgcctgtaatcccagctactctggaggctgaggcaggagaattgcttgaacccgggtgtcggaggttgcagtcagccaagatcatgccactgcactccagcctaggcgacagagcgagactccgtcaaaaaaaaaaaaaaaaaaagtcacctgaaatcatcaaaaatggtgtactcatagggagccaagcccgggcatgttgcttcttggctcccacaggtgaatttgaagtggcaatagaacttcgttgattcttgtttttctcattttagttttactctctattaaattgttattttttacagttcatttatggatgacaagttatttcctgttggtagctgcaatgattgggaattttgtgatctctgtaaacgaattaatatctcatagagatctatttcctgttggatatgagacaacagagaacacagtttttgtccatttgtcttttttaaggtcaaatcgattagaaatttcttgccctcaagtaaggagaacaactctgatacctggactggcaagcttttgtgtttctgtgtttatttttcatttgtggctgaacttgtagaattgagggtatacacattctatctgtatgtctatgtatctgtaattcagaaagtcctttatttctcattgtgagtatggaatgttttcctgtctccagatggtattaataaattagatggtaaaggctctttaaaaataaagcctcattatgggttcattttccctctcaaactctgtagaacataaccagtttgaaaagcctctagatttgggggtgtaaaaattccatgcagcttgagagccatcagtcattaagccgctagttccaccccaagtcttgctgtccagaagctcagacagtccactgggcagcaaagaggcgctttagtaagttgaattaaagccacaaacatggctgctccctaagggagataatactgtgttaaaaaaagagaattatttatctcttcccatttcctccgctaaatgaggaggttaatagtaagacctccttagccatgagtgtttccgctgcaggaaacaccattcgtgccggttctggactcaccacccagcgtgtaccaacgcccccagcaccatctccctgctaggctgacagacccctggcggattttgacctcgcaagaaatgcaaaagcaactttgggttgcagaagccaggcgccccgaccttaccctcgctggaattcccgaagacctcggctgcaccagccacccggtgttcggatgccagcaccgctacgaccagcagctgcaggaaccccattgctgcctgggccgggctgggcccacgccagggctggggagaggtgcgggcgtgcgcgccggggccccgcagcctcgcccacgctatcccggggcgcccgcatcgggcgccatcgcccgccaggtgcagacgcttcgcacctgccagctccgcagccgccggcgcgcgccccgccgaactcctagccccagcgagaggtttcctcttccggcacctgacccccaacgcgcgttcccgcgcctcctcccgggctctcgctgcgtcacagcggcgggtctctgggcgcgggcggcgctggggcgtttccaggcagcgcgcgcctcctgccggcgcgcggggaacgcgcagcctgcggtgctcccgggagcccccaggaagtcctggcttgaggcccggtcttgccccacttttatctcaccaagtaggcaaacccactgtgaaagtacaaaataactttctgttgcggactaacgtcgccaggctcctgtttccgtgtttaacggccctttacaacagcaaaaaagaggaatcagttgctaaaaacacaattgaaggttatttcccccggtagcaattgtcttcgctgctgaggcttatgttagcataaaaatgccaggagaatgctgtttgtgtagtggttaccgcactagtcataagcactacatttaaaagtagtttcgttttctctaagcgaaatatcctcgaagacacggccttggtctgaacttcgtctcaagtctcatacctgagtgctgtttgagggacagtagtccatgtgacagatggctcatcgatgatgtggaattagacgcatagacttaacgttatttggggaggattgtcttgctttccttccctggttttaatttttttcacttatatattttgatgagcaacttatagcttggaaattacatgttcagttagtccactactaagctaacaatatatagctgtgaccataatgtgaagaagtgttaaagacaaaattattcaatgatacttgttaaagcaccgaacgaagactattgaggactgtctcaattggcatagggaccactgcaactgggtcttgcagtggggaagagggactgggctcaactccgaatacagcgtgggcaagagggaatttatagccaaccagcagtatggagttcagtggatgga

SEQ ID NO: 57751 - DNA, 1448 bp, Homo sapiens
aaaaaaaaaaaaaatgccgggcgtggtgcggacgcctgtagtcccagctactccggaggctgaggcaggagaatggcgtgaacccgggaggcggagctggcagtgagccgagatcgcaccactgcactccagcctgggcgacagaacgagactccgtctcaaataaataaataaataaataaataaataaataaaaataaatatatttactcttcaatttggtcaataaataaacacgagagggtacgagaaattacttaaaaaaaaaaaatccccgcagaatccaacaatctctgaagcctttaacacctaacaaccccaaggggagtatttcggctcttggactgtatttcaaagcgattggaccccagaccattcccccagttactcaaaagatccagcctctcctcaggtgtagcccgctctagaaaggccgcctcgggagtaccacccactcctgacggggcggggagttctctccgaccccacccgttccaaggacgcagccctgtgattggccatgacgcgtgccagagctgcccagtcgcggaagagcagctgttttggcgtctgtttgctgcggtaggaacatggcggatcggctcacgcagcttcaggacgctgtgaattcggtgaggaatttcattcgattagcctctgtctttctctttcttgaggtaaagcaagggaggaaaggggcccaagaggcaaaacttgaaagtggggagcggactgagagacagggcttcggcataaagcgctctctcgggaggcgccaccgcgaactcggaggtttgaggccggctgccgggcggtgcttgaaggtgcgggagggagcagactctttcgcttgaggagaccgggaagatcgttcttgtccgggtgaggccgccaggacttgtgggctgcgcggtcctgtcgtgttccctgaggacagttttattttcttgtcagtggtgcttacgggttctctttcttttgggggttgggaggagaagcaggagcttttttctttcctcatcaattttaatccaccaagggagatctcatgctctggatgactgggtttttgtaatgaaatgtcagccgagagtattccttcaccagcgctttcaggttggtgcgggagcgatgctgaggtgaggtgagagattttctttcatcttagctcgttcctttgggcccagagtatccttccatctcttgcctcttggccatccctcagaatacatcagtttggggacatctttatgataggaaatcttctaatcctcgtatgtctttccgcttatttgagtcttttttcttttctttttttttttttttttactttggagacagtgcctttcgcccaggctggagtgcagtggcgcgatctctgctcactgcatcctccgcctcccgggttcaagcgattctcctgtctgagccaaagtagctgggattac

SEQ ID NO: 57752 - DNA, 1254 bp, Homo sapiens
cctcccaacttcccggcctcccaaagtgctgggattacaggagtgagccactacacccagccaacattgttaataatatcaaaatgcctattttttttaaaccgatggtgtgatttaaatccagatcacttaaacaatactcaataaaaatatttgtaagccgtatataaatctgcaagtagaggtaatacatgtaagaatgttaatacataaatatatacaaaggcaatttaatattttttctaaaatggcttttccattgagaagatttgcctcactgctgtctttgcccacactatggtctttcaaggtcacttgtgaatgggagtgttgtgggcatcagtccattatcaacacctaccaacttcaccaagctgacctgtctgtgagtcaagcttgagttcctctcctctgttcgctagtcatagaaaaaccaccatgaagtcattggtgagagccaaggaagagatgtcagtcagtgccacagcagggggcttagggagcctggccacctttcctgcagcttatctgtgccttgtgcacctgctcaagcacattctccagtgtactgcttcctcttacattagattccggctgagcccacctatccttgtaacttgggtctttgagatcatctggctcatgatgagctgttctggccatatggccacttggtgtcccgtggtgaagtcctcagcctataggggcccagtagcctgccaggagctgcattccaccagtgtggaatgttccacaagcaaaaccaagggagcctaacaagtggtgtgcttctttcttacaagtaggcagtgaaagatgcagcaaactactttttactttgaaggggccatcagtacatgtcctgtcctaatctggcaggcctctggatcttcatagggttaatgttgtgccctctggattatacatatctatgaaggcatctacagtacatgccacatcttgctcattatcatgtatcctcaaaatagtagaccaatgtaatttttgtgaaatgaccagatagtatagatccctatgacagaaaataagagaagaactaatatagtcctggggcaatcctgtgaatttataccattgtcatttcctgctaatgcaaactgcattgatcctcttttttgattggtatgaaaagactatttcatcagatcaatgatggcatactacatactagaggctgtattaatcttctctagtaaagatatcacacccagtgcagtagctgcaattgggact

SEQ ID NO: 57753 - DNA, 6074 bp, Homo sapiens
attccatgatgacatgttgatatcttgaaactggctattttgggagtattttcaccacagaattcagcaaatgatacaaatcaggacttaattttttgttttgttgataatctattttttgttttgttgattatctattgattttttgttgattatctagacttaagaaaatgatgataaaaatgttaataatacaaattaaacttcaaagtttatcattgtgaataactgaacaaaaagttgaggagttatccttccagtatttgaaattaatatctgattcagcaaagagatcatgcatgtcattgatgtaccagtgaagctccaaaatatgtctttttcattttcatcttttttgtctaccagcatttatgaatctacacttgtggggctggttgttgcatatttaccagcacagtactgtatataaacagccacacacatccacccacacacaccccccccacacagagtttagatgtcattctgtattacccatagagctttctcaatcttttttaggtctgcatttaggtaccttatgaatggatatttagactgcaatcttttcctgttacaaaataatgctacagtgaatcacttatgaatcatcagtatgatcataagtacatttgtaatgtcaatagctattgctaaattgctgtctatgaaaaattttaccaattgattgatactcctacaagcaatatatgatatctgttttcccacaccctcagatggattattgttaatgttagtaacatttattcttggagacacaatgtaggaagccacctttctcaggagcagactgatcatgccacaataataataactggcagctgtaaagaaatatttgcaagtagcctatcttggaaataggctcagtactgttttcaagacttctgctaaaaagaggataggttaataagtcattaatgttttggctcattctcttcaaaaacaatatggaggaatttttctggtagacactggaaaaaagagaaggagaaatgtcagcttacaaaagaaatgtctgtgtaaatacaataattacatggcagtgcttgataattctgtactcaagccccctgggctccatgttatagagctcctctgggaaggcagagggaagaaccagaaaaaggagacttatttctgctaagacgcagccagaccctctgtgaaagacctacagaactttgagcacagcttccacttaaccacatgtagctatcaaccaaagtttgagcagaaaactgtgcattcatataatttgacttgctttgcatttctccctttcccttttctttttatatttcaaaaagagataaaagtcttctgtagatataactgacaaagcatcagtccttaaggatttaagaatcttaagactgggctggaaaaaaatgcacaagcaaagagtaagacctgcctggccacatttccttagccacattgcttatggattgtcagactttgactcatagtttacagcttagtagctctgtgacactagggagttacttgaccttcagttgcctcatctataaaatggggataataatagttccaacctcatgggattattgtggggaaatgagataatccatataaggtattgagccagtgcttaacatatacatgctattgctcaatgtatgctatcaattattttaatagaaatatatattataaattgtatgcaggcttattaagcagtagagatttcatcattcacaacagatttttttttctgttgcctttatgatctcctgagttttaaaaaacgcactaaatattcctatctcagaccctgtctcagaaaacaaacaaacagaaaaaccaataagtaacatttcttcttttataaaacctccaaccttctttttgttcattggtgaagtaaagatcattagtgaagtagatcttggctaaatagagtggctgaaagtagaaaaacagtgcacttcacaaccactagaataaggctttttttctgtctggcttagttacatgatacaattgagtctatccaggcttagttttaagtaaccatttatttggctgaacaaaattagagcttgtgtgcatttattataacatatatccaggccctatttaatctcctaggagaagaaatgtactaaatgatatactgatgtcgtggaagagcttatccaacttaattaagtagactctttattcccatatagtaagttagacattccgattctttccgatgattctgcactagaatttagctgaccagggagttggttgtacatagcatggaacacctttcttttgcccacagtttaattatgtatggagagtagaaaagagctttggtatgaaagcctaaatacagttaagatacaatgagctgatgacaaagattctctctctctttcactctccttttaagtagcaatgcaactgcacctgattagaagactgatctttgaaaaataagttaaattcaaatcaagaaaagtttcttgagaacacagttatctacaaggtactgtgatgagtagtatgaataataataagacaaagacgttaatgtcacttctctcaagaaatcaccatttaagggaacaaacaaataagtccagaccagatagtaataaaatgtgggaaatgctacactagtaaacaaacaaacaaaaaaatcatataggaactgtgatgaaggcaccaattccatcaggggagcagggaggaaggtgctaagggaaattttgcagaagtgacatttgaattggatcttggaggatttccaagatttttgtggaaagcagaaaggagagagataaataaacagcatgagcaggagcagagaacatcagtggttaggatgaagctctaaagatttgctaagacccagttataaagcatttaacggtcttctaagattgcctgggctttattgtgaaaataatggagaaaattgaaggttcttagttggggcaggttcagggacctgaacaggttgagtttgggggaaggtgcataagagtggggacacagggcaatgtgctggcagggagagtgtgtgaacaaggaaaaggtcttgaattgtaactctggagaacatctcgtggcgggttgtggaagagaaatttatgaaggaggctcctaagaactgccttttgaaaaaaggaatcctgagacaagcataagaaagcaaagaaaaagagtgataaggaaaaggaatcgatcagcagtgtcaaacaccgtacacagatctagaggaaaacgaaaaagaaagctatttggttgagcaactagaccatttttagtggctcctttgagaccactttcaatagaattagtaaggtagaaaccaaataccatgtcagacaaggaaaaataatacttgcaatgcacaggaaatttaaagataggcaggagctgatgttgcatctctcaaggagggtagtatttaagagcaaccaatggaaattatgagaaataggagctaaaaaggtctaatccccaaaaccagacagacgagaaacatttgcagaatgatgtcatcctgcctccttgggtgataccactttgttcctcagatgtttaacccagcctgcatgagtcaacatctatatttgggcataaggagaactaccttttgtgctatgtgccagttcagaagtctgtttttgctagtctggtttagctctgccaaattattttaggcttatgactgcatcaacagcccatggaaattaatctgtttaatatcacatagctctaattccagcacacttacttctattcaatgtaatcttaattggtttttttcccctttgcatttggaagacacaaggtttatatttacaagtacattcatagcagattttaaaaggcaaaagtggaaatgtcagaaaaaccatatatagaatccaagagcttatatcaattactgaacatgactagaataatagtaataacttctgtgaattaagtgcctagtgtttgccagacaattttcattgagtatctttgattctataaccctaaaatgtagctacgatttccatccagaaaagattaagtaacttgattacattcactcagtcagcaaatggaagagtagggactcaaagctagacctgaccccaaagcccgtggtctttcaccactctgtgccctcttcaaaatatcatggtgcccattaatgcaaaagaaaagtgaactggctgggtgcagtggcccacacccataacccaacattttgggaggccgacgtgggcagagcactcgagatcaggagttcgaaaccagcctggccaatatggtgaaaccctgtctctactaaaaatacaaaaaaaaaaaattagccgggcgtggtggcacatgcttataatcccagctattcgggaggctgaggcaggagaatcacttgaacctgggaggcagaggttgcagtgagctgagatctcaccactgcattccagcatgagagacagagcgagaccctgtctcaaaaaaaaaaaaaaagtgaacaaagtcatataagttatgtttacaagtgatgaccgagatattcagtggtagaagctctttttagatgtaaattactcatctaacttttattgggaagtaaatatttcaaaatgcatgtggttgaccagacttaatagtaaatgactctatttctaatgggatatcagaggagaaggcaaaaaaggaaataagatagaagcattacacaacagaaacaatgtctgaaggaaaattcaaaatttaagaagagctggagatgggttcttataagatctcgtaagattataatttttctggaattttgaactatagtgattcattctaaggaaaagaaatcagttcacaggaaaagaatctccctaagattatttcccatccccacaagcattgaaaaatgctttttgcatattacacagagaagttctgcttgtttttctcaacccctccttgtcagaccaggatgggatggggaagggtggcttacctttgtagaccccctgccagagagccttcccttggcatggaatctaaagtagtctcccagacaatctctagcacatcactgagttatattttcttcatagcagtacctgaaattattttgtttactcattttttcactgactggattacccccactaaatttacgctccatgagaacagattttgtctttttgattcatggctaaacctgaagcactcagaacggtacctaaaacaatgcctcaaaaaaaatttactgactgtctgaatgaatgaatgagttaatattgccaagggcacagtaatgtgaatctgcagcttaaagtggagatcttcacccaagaaataagttttgtatctctccctgaagaaagaaacagttatgagggtggggagtttatgttcatgggctattaaaggaaaactcagaaagatggtgtggtaaaaagaaatatgtatttggtctttgttccagttctttttgtttgtttgtttgtttgtttattttttgtttggagacaggtaccctccaggctggaatgcagtggtgccattacagctcactgcagcttaaacttccccaggctcaggtgatcctcccaactcagcctcctgagtagcagggaccacaggcatggaccaccatgtctggctaatttttacaatttttttatagagatgggttttgccatgttgcccaggccggtcttgaaattctggtccacccaccttggcttcccaaagtgctaggattacaggcatgagccaccatgccccgccagttcccagttattgacatagcttccaaaattcccggaatttcctgagcaataggggtgataaaagcatcttttgttactcattacaagttcctttcaatcatacctaaatttatgctaataaggtggttcctggtggacccctagatagcttcaagataggggctggttgccaggggagccaatcatgtgataagagggctggagttttcagccttcccactcccctcaacctccagtgaggggaagggggctggagtttgagttcattcactaatcaccaatgatttaatc

SEQ ID NO: 57754 - DNA, 6277 bp, Homo sapiens
tccagggttcaagcagtctcctgcctcagcctaccaagtagttgggactacaggcatgcatcaccaggcccagctaatttttgcattttttcttgtagagacggggtttcgccatgttggccaggctggtcttgaactcctgacctcaagcagtccacccgtttcagcctcctgaagtgctgggattatacgcgtgagccaccgtgcccaacccggccttcttatcccaggaataccctgagcatgctcctgcttcaggaccttggcccatgctgtttcctttgcctagaatactcttccccctagatagccacatgttttgtgtccttactccattcaggtcttcttcaagtgtcatctcctcatagaggcgtttccttaccaacctatgtacaaaaagcattcccatcactttattttctttagagtgcttattattacatgacattgtattatacgctgtgctgtttattatcttcactcccactagatggaagctccattttcaccattgcattttcagcccttaaaatggcacttgattcatagttggtatttgatacatattttttaattgaaaaattgctttctatgtgtaggcagtgttctacatcttttataagtattaattatcttaatctctctaatagctttatgagataaatacaattattattattattttgagacagaggctcactctgtcacccaggcttgagtgcagtggcacgatcttggctcactgcaacctccgcctcctggattcaaggcattctcctgcctcagcctcctgagtagctggaactacaggcgcccaccaccatgcctggctaatttttgtatttttagtagagatggggtttcatcatgttggccaggctggtctcaaactcctaacctcatatgatccacccacctcagcctcccaaggtgctgggattacaggcgtgagccaccgcacccagctagtaagtacaattattatctttcttttagagatgaggaatagcttcccttctgaacaggttgatctgcaagctcccattggtacatgatcacctttctctatatgtatgtagagcattgtggaataggtccttttgtgactatatctctctagtcccagtctaagcatgcttttcctgggaaagataacttgcgggattgcatgagctctgctacttctgtgtttgtaaggttccctctggtaaactgtattttgcatttgtatcatgtgtcatgaatggagtatatgttcatatctcctttgcacagtggttagatatttctgtgttggattacttttgtcattcaaaaagaaagcatgaccctaaaccaataaagcatgccttgagggtaaatattgtatttatagaaattcttaaaatggattacaatccaaggataccctgtctctcctgctctgtgcctagcctgtaactggcattctactacctagaagagtaagctggttaacacatcccttggcttgactcaaaaaccacctgtgtctgtgagtggactttctggaagctctaacttcttgcttcccatgtgggctccagtgagcactaacttcactggaagaaggtgtttggaggaaaagtccaaatcccttcctaagagatcaatacatctgaatgagatactgatatttttccccttaccatatatgcccagagcctcttttttccggaaattatttctgctagttctaagtcatttggtttctttgatttctttccccctaccctcctaggattacatttgaaatcctttatttttatttgctgtaaaaatgtgggtcaaagaattccacattccagtttgttcccatcatcccttacagctatttgctttgtgggtgtaggccagtttttgctatttttttttatctcaaacagcaagtccttttagaggcaatgttgtcatccattggtttttctgcaaacagtctgcgttctttggtatttcttagaatcatttaaaatttcctgttggataagattttgttctactgaaattccatttgcaatgtttttcctgttagtttaaaaatacacatatacacacagagaatctttcttttccaccatccacccttctttccattgtttattagctttggctacagaggcgttctagagtttaataccatccagctctgtctcactgacagggatgctcatgctacaaggagaaaagtcctaggagaggagcaagtgcagtggagctgaactttaacatgtgaggtgtggaagtcaggaggtcagaacaaaactggctgctgctctgctgtgtggtgggcagggctgtttgtctctgggaggttctcctgaggtgattgttgccactgcagcatcgtaggagagtagaagtcagcaatgggcaggttggggcagtaactgagaagcagagccattaacagcccaaatccagtcctggtgcaaatgataatgagatctttacttttcttccttttctttctctcattcctctctctactcctcacctttcctctccttggaccctcatactgtcttattagctctcttctttaatgtagaagaaaatgctggcatgaaaatgcactattcaaagactaaactgtgtaattgcaacagaaaatctggtgctattcaggacaacaggggcagcatagcagagctgtcctgttaagctttgctctacagggcaggtcatgactgtggtgtactttccttctccttaattccagtcctgacccttgcaaagaagtaagaggtagatgagttgagaaatattgctgggatgtaagtctgctgagtctcagagtccatctctgcttttgcaagcctcttccatagacaggccccagttctttcctttagtcacactgcgtgcgcatcatgtgccaagtattgtgctggggatatagtggtagtcaatataaaaacaatgcccgccctcatataccagcaaggtacaaaagctgttgaggtaattgcaagtgtaagtagtgttgcccaaaagcatattaaggatacaatggaagcgtgcagtgagagagctgatctggtctcctttatgtgtaggcttggccctgcctacactatcatcagcccttgtccagctgctgacccttagaatctgacttgccagcaaagacctaggaagccctgggcatccatgtcgactggacagataacagccttccccaggcacctaccatgttaacgcactatgtttgcactttgatcatttccatagccctgcactctagttcttttgccctttcaaatgttcttagttcttgccaggtccctcccctataaaaccaagtcctttctctgataccttcagccactggctgggctctgctgggattgacccactctccatccacctgactttgattctagcctgtcactggaactcccactgacgtgtcccacactttagattgaaccaacctgtcatctaaaccaaaccacgctgggcctggaccacagagtttccagagctccttcggttcaccctcagtccttactcttctggttcctggtttttccctctcctctttcattttgctgtgacccaacagcaaagtttgtggctaagtctgagagtgacactctgggcttgttggcaactgaatagctattgatttgttctttctcctttgcacacattgttaagtattgaataattagtcaacaaaaatatcctgagagcccaccatgcactattctgagcactgaggaaatgccagtgaacaaaacaaagatccctgaacttccacacatgcccatccattctgtgtgtgctctctgtgaatgtagagcttgaaaatcagagggactctgacatgagatcagtcaggccctctactcaatgtacaagacacactgtgcttccaaatctccaagtttctcaagaccaagggacccaggtgttgccttatttccatgcctctcacttccactactgaaaataaatccagccaggcacagtggctcacatctgtaatcctagcactttgggaggttgaggtgggaggactgtttgagaccagcctgtctctacaaacataaaaaaaaataataaaaaattagctaggtgtggtgggtgcgtgcctatggtcctagttacccaagaggctgaggctggaggatcacttcagcctgggaggtccaggctgcagtgagttgtcattgcaccactgcactttagcctgggtgacagagtgagaccctgtctaaaaaaaggaaaaaaaagaaaaggaaatgaaatgaatccccatgtggactgtttccaaaccaccctgctataagcatgacgtcaactcacaaattgctgcaccaagtttataaactacaactgataaatgagtttctggcttgtaaatcaaataattgccctttgagacttgcagaatggacaacacagattgctcattgctgacacaaagattctaagctaagttttctaatttcagagactttaaccaggctattaagggaacacaaacttgactttctctctaattaaagcctattataatataataacatagctcactgctggataaatactcctttatttttcactccaacagtacctaatttggtggcacggacacacacacgttctatatagggcttataacctgaacatatgtgtagctgtctttgcattttttagctgttttgttctatgttttgcctctcttcttagtttcagagttcacttattgactatgataattactgagcaaacaaatatgacctattaagggcaattactgttaagcataatttttaaatcatgccctaggaccaaacacttttcttgagccttgagacaaatgtcccacatgctggctgagtagcaaaaaagcagaggttgggatgatctcctgggtgctgccagcaagcacaggaatgtgccagtgatgtcaggcagagcagggcaggcatcagatagctggagtggggaactggccatgtggtgtgatgtgagagatttccaaaaaaggtcctggactgaaaaagtccttcctctctgctacagacaggggctgtgattgttggaatgagtgtgaggtaagcctcaccactccgacttctagcctgtgtctgccaacatctcattcaacaggatgtaaatctggggaggaagcctctgtcctcaggctcctggctcctggctcctggtatggagctaagaggtttcatggtctgtcctggctcccaggctgatgtctgtgacctccacagatggaatctgccttcttttattccattcttgttttcccaaacatttagcaatgccttttaagagcacatgttggacactgagaacacatggcaaaattatatgtatgtcccttctctcaaggatctgatgaggatttaaaaaaaataaacatttttaaaaagaagcaaatgaggaggatctttgtggtgaccgaatacttctgtgtcctgattacagtagtggtttcatgaatctacacttgataacatatcagagaactatatacattgttttaatgtcagtttcctggttttgatattgtactatagttatataaaatataaccattgggggaaactgcgtgagggtacaggggacctctctgtactatctctgtaactctctgtgactctagaattatttcaaaataaagaagtagttgctctcatttccatgttttgcccaagaacgtaggttaagggaaatttaatgacttggttaaaatgacagaacagagtgtgagcgttaagcaagtgcatatttaggtcaagtcaggggggaaacctggactgtttctgtagatctgggaatcatcagccttgacatgataattaatggtgtagaagtgggtaaggccactggtgaagaaggttggagagctgaaaacagcatcatcaaagaggtgaataaagagactgagatgggaggagccagagagaaaggagaaaaatcaaaagaatcactccaatgggagtccaggggagaaatgaatgtccagagtcaaatgctgctgaaagggcaagagggataaggactggtgtcctctgacttctgccacagggagatcacctgtgactgattggaaatgaatgagaggagactggaggccacatgtctaagatactatttcaataaactctggtgtaaagagcaggagagagacagcacaatagatggaatgggatgtggatttgaccgagagttgtttgttttaagatgggagagaggaggagagggacagcacaatagatggaatggg

SEQ ID NO: 57755 - DNA, 1201 bp, Homo sapiens
gttagaaccccatgttgtcaagtatggcaatgaatttggtcagataaaactattagggttgtacatactatacttagcaataaaaatgcaggactctcagttacatttgtatttcagatgaacaataaatacttttagcataagcatgctccatgcaatattttatccagcatccctgagaagtatatttaccaacctcccttgcagatagtggtggtcaaagatatgtcagaagaggtcattgggtggagcatctaggagagtactcacgcacatatactcttctcttcctacctccttctgcctggaatgctaacgagcagcagctgtccagtgatcatgaaacaagctcgagggtagaatccagcactatggacgggattatagacagaggaaggagactggccaacactgacgatgttgcagaacaacccaacagccctgatttatcttacatgagaagataaatgagaaaaaacaaatttctgacttgtgtaagctagtaagttgggtttttatcttatgtatttgaactcaatcctaacccaaacactccgtgttcacgtgccattagcaaaaggtcacaaccattgtcagaatcaatcattttgagataatacataatacataacacagcaaggtaattaaaaatgcataatgataaaatcaagaaacctgtgggaagctcccacaagtcatcacagcttgcatgcagctgactaaaataggggattcccacaggttagttcatccagaaactgctgggaacttcaggtctgcagtcagcccacatatccgcttagagtggcctccagagagtgatgacttcaccttattgcctactttctgcagctcatttgggtgcctctcatttgcagatgctactctggaactatatggggaaggggattctaagaaatggaattcttggttcctcttttccattacataggaggaaggcagcgatgttgacaacaagcaagcctaaatctgcattaagttttgtttcatcacttattgattattattattattattgagacagggtcttgctctgtcacccaggctggagtacagtggtgaaatcatagctcactgtaaccttgatctcctgggctcaagcaatcctccatgatggtacatgtctgtagccctagctagctctcagagactaggactacggacatgcaccaccatgcct

SEQ ID NO: 57756 - DNA, 838 bp, Homo sapiens
gtcccaaggactggagtggggacttgtggtgcctcttctgggcctgcccttggccacccatggaccaatcagcacgtacttcctcccctctcaggtccataaaagccctgggctcagccagagcagggcagaggaggtagggcaggaggactagctgcagagaggagctaccctgtctgctgagagctgcaaaggccaggaaaaccttctggcagagaagatcttggtacctgcatcttcaggcatgctgctatgaagacacaggtagagccttcagagtagaccccggttctacttacccaaacagcagacaaaaggcaaaggccacaagcctccttctaaaatgtggttttcaggccccatccacgtgtgcttgccacttttccagggagtgaaatataatctgtggacctggggtcagaagtgaatgagaggacaaaacagtcacaagcactgatctttagccttcaatattggtctagcctaccagtgaaactggtgcaatgaatgtccccaactgtaaatatcatctcagtcactcctatgagaaggaaaaaaagaagggataaattaagagagggcagaagtgcagtagaggcttccttttctttgggctaaaacaaatacatgaggaaaaggtgaaagaagattcctcttttttttttcttgtagagaagcgggtctcactatgttgcccagattgaactcctgtcctcaaggtatccttccacctcatcctcccaaagtgtttgaattacaggcatgaaccaccatgtctggccttctctcttcaaccaacagtctccttttcttttatttctttattcttttcttaaaa

SEQ ID NO: 57757 - DNA, 3437 bp, Homo sapiens
ccaaagttgtcccttttgggtcatcctataggggagtgctcttctgcacaattctcagatcctactgataaagcaggccagtactgtagttattttagattttccaagaaaactcaaacaggtttttaatgtattttttgtggcatttacaaatcctggttcctctccagtctctggagtcccctcatggtgaaatggaagcgtcaaggaacctgggtggcttcgagtccccacagctaccgactgagcaacttagctgatccatctttgttgacaactgtttcccaatctgaaaaatgcgtgaattctctctttccatttctaacattctttgcattgcactgtttgaaaaattcggatgacatttagaatgtgactaatgtcgcaacacattaggccactctcaagagaggcctgaacaggtttggcgtaaaaacggcagtgaggtgaggctggtgagaggggaagtggcgacagttcagtcaactccctcaaaaccagtctggccttcaccaggcggagatgggtggggccgggaagacgggcgttgacgacagaaggctacttccggctgtggtgcgtatgacgtcagggcgagtcggaccgacccagccaccgagaagccgaggaggcaaggctcgcgagagttcagggaggccgccctgagattccggcgaggccgcgggtcccacctcccgggggcggggcgagggcggagcggggagaagggagctgacgggcgcccggccggctgcggtccgtgcggaggctgagccggccgcgggcgcgaccggaggcaggtgagttcgcggatgtagcgctcggctgagggcccgagctcgccgcgccagccccaactctgcgagcaggagcaggaggagattttaggtgtctttgggtgtccagggaaagccgggctaattctggggctggaaatgtctccggggaacctgcggcgacggccttggccctcttattccccggggtgatactggccccatgtgtccagagagggagcctcgcacccggggaggaatctttgtcctctgctcctttctccttccactccccggcccccgagcactccgctccgggtccccgcctgggcttcacaaacaataacaaatgtcgcggatcctctccgggtagccccagcgctcccgtcccgtgccctccagccgatgtcacccagagccaggatccgaagcatggctcttcaattgtgggggctgtttgtgtaccgttcctaaaaactgatgcgtcagattgccaaacatttctcaagacagactcaggaaagcctcccagctcctagaagccacggagtgctcaaaaccagtcttagaatctgtctttaccattgcacccgtagccccttcctttcaaaatcatttctcccactccttttttcacctttagtatcgaggtcgaacgagtggttatttggtgtgggagtagaaaagagtataaccgattgagtagggcacgtttcacctttaaaaagttgccaggttgacagcaaaagaacaaactttattttcaaaaccagtggcctccccttttactggtgctgcttttgttttgtggaatagcttttcgggttctaagtttggaggaatgatataaaaagaagtgggaggtggggggagggctagtggctctggaagtagtggcttgtccaaaagtaggatgctattgtttctcacttgataaaatgcagaaccaacacttttacccatttcacataacttgtgataagttttgagagaagccacttaatcggaaatggcctattagcttattttactgctcaaatctgaaaaaacagctttaagtgatttaagttctgcctcttgattgtaagatggggattgatgagtgagaccttgtcttttttggcgctggggcttacgtttgaccggtctctctactttaaggcagggcctattgtacttaagcccatttttgcttcctcagtacagattcttgaaagttctttgtctcaatcatatatgtatataaggtactgtaaacctctttgaatttgattggcctttctctctgtgcctcaggatatgtaaaacaattaagtttattatactctctccccagtggctgagaggtattgtatgtgaattagccacccttgtgactatttgaggagagagaagttagtctaaaatattatgttaaattatgatattacataattttattgcataagttcatcaaactacttccatctgaaaaatcctgatctcaaaataggtaggtacaatgaattaaaaaatgttttggtttgacctcacttagctttgttttctccttgttaagatggctgataatgtttcccatttggttgtgatgtgtttagaatgagaagcaaagttgggtgtagtttttgtactcttttgaaaggccttgccactaggaatgaaaaaattagacttagaaaacacacattaaatagaagcagtttttctctagccatttgctcttgagtttgttttaaaataagtcaaagaatggagactgagatgatttgtgccaacaaatagatgtccttgttagtttttatgctgaaaacttgatttctaaaggtaggacactgtaagaacaaaggagaaattggacttcctaaaaaatgataacaaagcaatggactcagttcagctgtttgctttcagaaaagttctgttctcttaaagtaaggagagcatcattgtgttagtgaaattggataacgcaccttagaaagtgcctccccagtgatccaggataagttggaggctcttttgtgtgtgtgtggcactttttgttaagagggagaaagggcacaaatcagagccagaaagatttgcatctcgatgtattgttaaaatgcttttattttatgtaaatagtgtcaggtgaatcaagcaagcatattgttgtctagcatccttaggattacattaaaatcagcagattggcaagttatgattaggttagacttgacatatgcagaaattatgcttctgtatttttatattaaaagcaccatggtctttttgaatgaaataatgaaagcaagcttttaagacataacttttttaaaaaattaaaaatctgtctttggttagtttataaacatgaagcatatcctcctcttcttccccccaaaatttttgtttaagtcttaagaaagtctttagcaaggtatgaccagtacttaagtgcactggttgcataagccttctgtctccaggtaaaagtttgctaattgacagggtattattgttcagaatctttagagggagagaaatgaaaggcaacagtgaacagtgtttgctgctctgtacactcggacgaactgtggttgctactctgtacactcggacgaactgtggttgctgtcttcaaggagatgtgatccagtgggagagaaatatacctac

SEQ ID NO: 57758 - DNA, 656 bp, Homo sapiens
ataattttaaaaatttaaagcaaattcccactccagttcctcctgaccaatttttccagctatttgagcagtattttttgctccttggaaggggatatagtgcttatcctgtttattcaagtaaaatttaaaaaaaagataaaactttctccccttaaaaaaaaaagtctagagctggtaaaaatttctgactcagtaattttggaaagaattgcctctttccacaaatagatgagcttacatactaggtcttccaagtggactagtaaatttccgtgatgtcaggaaactgggtggagtttttatggatgcaagtccagtggaggagggacttttcaggtcatgtataaggagagtaggatcagattctggttttgaataacctataagccacaaagcatggggatttcccattgggttaatctagtgctggccacagtttaggcatatgatctagagtagctgctgcaattaagagatgcttgcttatgggatctttgcccttttattggaaggctgtaagtgtagcccagccttgatttataaaccaacttgacataatcactatttcttttcacacagacttctgaatagctgtcactaaattttgattaccaccaggcatttagttaagctagagctgaactatttgatct

SEQ ID NO: 57759 - DNA, 5206 bp, Homo sapiens
ctgtgtgcattctattacacaaattctctagcattctattatacaaatcatccaatcacctttctcacatttttttttccaagttgaaaatatgagaaaaccactcactggaaatgagagattaccttcctatccatctggcaagacattatatgtctctctgccttatcctatgggttatatagctactctttaaaaaacaaaaaaatcatgtcttagaaagtaaagctccagagcataaagaaaaaaagagagcaagcaggctttaaacctgagcagtaaggggaatacctattaagcaatgaaagggttgtgccccatggaatgctgtaggtcggctttgtttgtgcattattacccttcctgctttcgtattttagattctggattccccttctcttgctttcaggctttggtggaagtgaatcatcgtttctaagaaacggggactgcaatgattcacaggcaagcttactggacaccacaataggaactcctaagaaggagacctaacttttatggtcttgcttctactatctactagctgagtgatcctggccaaaatactcgacatctctgaacttctgtttctctactaagacaggaattaagaaagaggttgtgaggctcactgagccgataagggggaaaatgcattgtaagcaaggccatgtatagaatagtatttacattttaacccagatcttaaagcccaggtctaattaattctacctgttaccccttggtaaaccacctcaaaatagtgtacacttgtctggaaagccaaggtttgatcacattcgggaaaccctgtatggaattactgtttctagctgccaggagaagttggtgttggtagaatttggggtggagttccaagtcaaagctaggaatgagacgtttcaagactggttttgattagggatgtgtcttggtgtgtgttgaggacagcacagttttcagcacgtctcccttacctctaaagtcctagcccctgcttaagcctgcaacagttttctcctgtcatgcccacttctgcttgggaacacacttccaaaccctctgcccagcctctcacaatggccctaagtactgccctgaggacacataaggtgctggttaagacgttggaattgagtccttgtaggaaagttattacctttaggctggttgcaaagtttgatttggtgtcttctctactgtgactttcctttacttacttctactagattaccaaggaatgggtctagggaccagtgggagggcagcaaaccagtgtattctagacacgtggccataggatgtagggctgtcaagtgatgcccaaaagatcttgtttctggatttacccaaccgttccaggaggcaaaacggcttcctcgggaccctctctctgtcatctacactctcgtctctgcagctaagcccttccttaagcagaaaagagcagggtctctcgtccagcaccctcctccccaaccctagccccgtgccctccgctaacccaccgtgcaattatcttcattcatcctttacctttgccccgagggtctaacaactgcaatcttcggaatgctgggacaaagcttactatgagcatggaagcctgttttcaatagggtggttgctagaaggactcaactggccttttagtgctttgctgctcgcgggagggctcggcggggcggtgtccgcagcgactccgcccttggcccgggtctctttcccgccgggaagccccgcggcgcccagagcggcgggcggctggctccagtccgcatgctcagtagctgctgccggccgggctgcggggcggcgtcccgtgcgcgcctacgggctgcggtggcggccgccgcggcacccggcagggcccgccagtccccgcttccctgctccagagccgccgcctgggccggggcagggcgggcccggggctcctccatgctgccagccgcggggctgcggagccgaccaagtggctcctgcgatggcggcggaagaggaggctgcggcgggaggtgaggttgccggtggcgaggcgacggccccaggtgggcgcgcggcgtctgacgcgctgggggcgtccccgcgacgccaggtctgcccccgctgccccgagggaagcgcccgcgcctgtcctctcgggccggagcatcgcctccgaggggcggtgggacaaggccgccccgtggggcacaggtgcggcgcggcgcccggcgcgtcctcccggggagcgggacgcggggaggggagctggggtcgccgccggcgctcaggacgcggtgtcttggtcccgggccgggcgcattggcgaaagggagccagcgggggaccttgcacccggcgctgggagcatccgcctccacccactgctgggcgcccgcgtcggcgtcggcatggcatgcactgctgcggggacttcctatatttcttctttcttttgtgtaaaccagttgtcagcagcctcggacctagcccggttcctgtgaacccctcccctctgagctgataatactcgcggcttcccggcttgaaccgctgccccgcggtggagcgcgcaggtgggcaggtgcgcgtggacgcggggccacactccgggatcgcagcccgctccgcgacagccctccataagcgacaggcggctcgtgtctttcaccgctgaagcttcaggaaagccgtcagtggagttagcttgttcgattatgtatttctgtggtatttttgtgaatggagttggaagtttgcggtgctttttccttctcgctagtattcactggcagtattctgtagttccttacaacggggcctttgggaccactgctcacaattacggaatgaatacaaaatagctgttgtttaagacaaatgagaggcaggaaaacagaaataactgaaggaagactggcagagaagttcagggaagcagttaattctcccctttccttttggaataagatgatagagttttagattcttctctgaaataaggcaatgagaggaggtggctttcgaaattctaatataattgtgggaatttacatcatggggcgatttcagaaattcgatcatttgaatattcgtagtcttaggtaaaccctttgttgaaaatagaagatggcacgtgtggtgtttataagctctgacaccctttctgctccgtcttgtgactgagctctgccctttactgtctgtgtcacccaggttatttgaaatctcttagtctaagttcccccatctgtaaaatggagataactatgcagtctgccttataggattgttaggagtaaatgagatatgagatatgaatgcaaataaaatgcttagcccaatacttaggaaatagtaagtgcttcataaaacattaacttaatgtagttattaatttacaacttcaatttgctttgtgaaattggtgagtgctgtctggtccattaagaaagtgttgtcccttgtgagttaaaattggccaaactgaaaggaagtgaaaatgcacctactaattcaaagaaaatgcacctactaattccccagataagtcttacgaacttacaacaagcttttagataaagtttaatgctatttatctaactattttagattaatagtttattgctctttgcataccaaatgtaaagctgggaataataaaaattaaattttcttaattaagggtagcaatgtttctgtgcgggctgggagagcccgcaggtatgagtacctaagatgtcacagacatttcacaggggtgcttctgttagtcttacaacagcgttgtgaggtaggtagtatctccatttcacagatgagaaaactgaggctggctcacagttatacagccaggacatgacagaactagagttaaaatccatggctgtcgcccatactcctttcttttctttcccatctgacttggtggtgctaatgagcaagtgtgctcacttccagacacctgcttatctaaagagtagtaaaaaatagaacgctcaacgaaacctctaggaggaaaaaatgtatatgtatttttactatttctccctattcccagagggaaaacaaaaacaggcctctgggccagttggtggccatctacaaaactagccctaaggttttgttttgctttgttttgttttgttttgttttgtgtttttttaacagtgtaaaccaaactatgggtttccccaccccatcagttttagatggtaaacaccgaaattgagcatgctgccaagtgactgggtgtcctcctaataaatgattccagaatccttggggtaggaagagggcagtcttggggagcagcacatttccaagactcactgccagagatggtctggggttgaggcctctgtggggcagctttctcaccttccgttttcttaccagctcatgttttcacctatgatagtgtaagatccaattcttttacatgtagttctgcaattacagtggtttaaatttactttgtgagtcagaaatcaaacgtcatgtcccaatcaattttgcctaagctcctgttactggcatggatccttgggcaaaatttcagccagaaatgcattattcaagataaaccaggatgggctaattacttttcacatatttaagggggaggaaaatagagaaggaaagagagaaagagtgagaggagggagaaggcaagagaggaggtgtgaagtaaagagaggaggagaggggaaaggaggaggaaggagagagtgaaggaaggagaaggggaggaggggagggactgccactccatcaaagtttgactccaggaaaaacaaaaactaacgtttaaaatatatagggaaagccaaaatatcagtaggagaatacagtgatttcagtttactttgtccttgtgaaatgactccctagttctaaaaagcatgatgttctgtgctgtgaacattgaggtagcatccttttgaaatctccatttgtgtcatgttcaggaaatcataaatgagcaaataacaattcattctggtagccctagttttcagttgtctcatttaattgaagacctccacttctctgcattgacaactgagttactcgggtgcttggggtctgggtcattagtcagcatcatcatggtcataagcattttcagggacctcagagtgtgccatgtgccctacaggaggcaagggcacctgagacatccgcctgttctgtgagacagtgatttcctgccctggtt

SEQ ID NO: 57760 - DNA, 1416 bp, Homo sapiens
aattgaaggttaagactattgtgataaaacaataacttccaagacattcaaagtgttttacttacaacatttcatacatttttaagtagattagaaatatactttatcatattttccaagcatatcacagggaaagtagagaatcatctactacccttcttgaccaaagtgcctccacctttgcccctgtgatatgtcctatactcaattatgtgaaggaacctgcctttccccaacataatgtacactttcccacctccaggcctttcctcaggctgttggctgttcctggaatacccctgccctccctctagatgggtctggagaatcttaaccaatcaagcttgaaggctgagcgcagatgtcactttttttgtatgtgtggaggaggagaactggtgtgggaaaatcaatataagctttggaactaggccactgggcttgtgatttctggtttcattacttgtcagctttgtaaacttggtcaaattttaaaacttctctgagccccaatttccttatctgtagaataggggtaaaaatacctaacttggaaggttgttttgggaattaaatgagataatgattacaaactgtttaatgaactctgaccttcaacaaatgattttccccttttcctcatgcaaccttcccagaatctcctcgtcacccaaattgaaattattctcccctcctattttcacactgtagtttttttgtgtgcctatgataacacttgtgcctgtctgccacaagttatttggtttcttagctccacccttaagttgcacattgccaggaggccagaattggttcttactcagctttataatctccaatttcttgcacctattaagtgcttaataaaggcttgcagattttgaatgaagaatagtttgcttaaggtgtggaaagggttagttcattcttaaaggacccattaaatacgcactatttactaggcaaacagagaagcagaagtggataaagcaggagaaggggttaaagagcttacaaaatctattaggctgggtgagaaatgcagccaaaatatttgtaatataaggtaggcacatggtacaatatatgggctaactgttaggagttagtctcctcccccacagttgggagaaattatatctagttcatgaaagagggaccacagaaggctttcagagaaggggttaattttagtatcgatggaaagacaactcttggagaggcagccaaaaaaaaaaaaggtttgggagggggtcttccagggaacagagtaggcatggaaatggaaaatcaccagtgacatgcacagaagaattgatgttagtatcctttggctttggataggaaaactgaaaaggaaagaactggcctactgaaaagtttcatcattttctattgggcttcccctccaaggtc

SEQ ID NO: 57761 - DNA, 2146 bp, Homo sapiens
aacaagtcaccgaggcaaccactctgacctagaaaagagagactaaatccaattctccatgcatcatggtgctagtggcttctttaggacaattctccttttctttagttttcaacttgaaatgctagcacttttggcttatcacttcctttcaacaataatcatagctacctctggggtatgtggtcataagcaaaacagcctgatcttagagggatgttcaattcgcacctcaaagtttagaaggcatccagagcaaattatttagcaaaaggtttagaaataattttctttcgctgtttctctaggaagcacatggaagcaaatttagattgtgatcatcattgtttgtagggcatattatgccgagatcgtattaaagccataaatatcactttgggttttattgcttttaaagtctatattgtgtttaaacactgtatttaacatctatactgtatttgtaaaactttaacatttgcttgttgcagtgtcctgcttccttttttaaaaaaaggctctttccttttttctagaataatcgccattcagtgaaaagatatacagatgtatttatgaacactgatgcattttttccccaaagttaaacggaaggtgtctcatcttgttgctacttgagttgtcgggaatcatgtatcttttataggctttgtgtagaatttggcatatccaacatgcttgactagtgtgaatcatgataatggcctacattgtgtctactatttgctcataacctacaggaattatattttgttgagctgtattttccagtatataacaatgatctcggtgtagaccatccaaatctaaatacgtttttgtgcctttggaaaaacctgctgatgttgaaaatgttaaaccctgcattcttcttttgtatcagtcaggcctagaacaagttaggggacttttctgtgttgatatagaactgaaattctgatgaactgtggtttcttgcttttgcccatccctggattaggtataatgcctatgaaatgctggccttttctggaatggtcatagtcagggaagcattcttcagtgcttatatcactctgattacattctgcatcacaaatgagtggtttcccttgactccagtttccttatagtcatcatgagtgtttctcctccctctttgccctgtttcaaaagctcagcttctataattctctttttggttctgttaaatagttaaaattcttcatctttattgagtatttactatgtgctaggtgttctaaatgctttgcatggtataattcattagatccccagcaacttatgaggtaggtactattgttaatccatgtttcagatgaggaaactgaggcatagagaatttaagtacattgcctaagattaaggcggcagaactagggcttgaacccaggcagagtggccttcagagcttttaaccttgccctagattgcattcctttagtgtctgcaaggcatttggatgtggttccatttctatggagtgctgatgtctaaaactgatcttctgggagggagtgtggaatactggcctactttgactttgagagcatctgaggtctttcacctaatgattgtgtgatgtttggcatgtgtattagtcaaggttcaaccagaagagcagaaccaataggagatttatattaagagattaattgcaagggattggtttatgcaactgtggggctggttaggcaagactgaaacccacagagcaggttgtcagtaaaggcaggctgaactccagcacagacggaccctgctgttcacaggtggagtttctttttcctcaaggaagactccgctctgcttttaagactgttcaactgattaaatcaggcctacccagattatctaggataatctctctcacttgaggtcaactgatcatgggctttaatcacatctacaaaatacgttcacaacaacacctagaaaactgtttgacacaataactgaggattgtagtgtagccaagatgacatagcaaagttgctttatttctctgagccttggttttctcacatgctaaatggggatagtaaacaccatagacctgtgaggattgtataaaatatgtaaagcatatggtgcctggcgtgtcaggaatcagtaaaagatgata

SEQ ID NO: 57762 - DNA, 2511 bp, Homo sapiens
ggaggttgcagtgagccagatcatgccactgcactccagcctgggtggcagagtgacctgtttaaaaaaagaagaaaaaaaagagaaagttattaattcactatatttttagaagatggtgggttatatgctacctatatctcatacaaataaagctgcttttcaccattcaggtctgcctgtaagcagcatctgccttgaaagaaccattttctgagaatctttttcttctgtcagccaaggggattataccgcatgatatctgtcaaggataaacgttagttaattcttaattgagagctcagccactacaattggttccattctacagtaattattctcatgtggtttgtggaactcaattgtgaggtccctccttcctccacccttttcagtgtgtgcattgaaacagcagccttaaggtctttaaacggggaaatacatttttcttgcttcagagattcaattttacttgcccgagaagcttgtgtggtgtgattttcatcgctaaaagcaacagcagccacatggctgacaacaccaccacttaacaattcaaagctcggtcaccgttttcaggagtctcttccaaatctttctgaagtgcttttgaagttctacattccccgtctaagggaacacccagcagtcccaggataaaagggcagaagggtgagctgacgttttcctttatttgcatggcttaaagctagccattttctacaccacgcgccgccgggcttgtacatgcccgtgtgcctgtgacaccgaggcaattgtttctccttaaaaagggggttcgcgtgggttagtttcgtttctgatctggaatctcagtaactacaacaagaaaagtttaaaactcgacccgccaggttcttccccatcggattatctccgttccttagagatagcaggaagggcagcattttcttccatccacccacttccagccctagtctggctcagcgaggaatgcataaaattagtggactcctctgagtgacgttccccggctccaatcagcgggcgcgcaggcgcccccggccccgccccactgctgactctctttggctgattcctgcagggagggaggagagaagggcggcagtgggagggggaggtacctggaactgggagtgatgtcagctcccagctcggtgcctgcccggattcctgacatggtgtagtgcaggcagggtggggaaaggacggggaaggactcgtgtgctgcgagctggcggccgggccggagtgctggggctttgaactccgagaggaggtggaccagaacttttggaactagtgccggcggctctccaccccccaggtaagggcgttttgctccactcccagacgggagggaagtggcaccgttgtgtggctgcagctggctgttgcagctgctcctcctcttccccgggtcgatttccttgtgcaactcactcctgtttcccaatgggaacgggcactttttgggggtggtgggggtggaggggtagggcttaactcctggggcttggaccgagcttgtacgtgaagaatactccaggattggacgtttaggtcttgtctgtatccttagacccccacaccctaggctcccggtaatacctgagaaccccaaccagaggggcgtgtgtgtctctctgtctgtgtgtattgaggcatttaaaaatgccacaaaaaattatggatcatcgactcaaaaattatgctcgttgaaaagaaaaaaaaagttttgtatttttttgtctccttgtggcctattatatattaaaagaatatcaatgttagtcttatatatcaatgtaaaatatccttttgtgtaatccagtcaggatgtgagaaattcacttggggtgtttattaattatgagcttgcgggaaaactcgtctcttgggggcacacttctaaaactgcaactagtattcactcattttaaccgagaaatcccttcagctgccagctttatatctggagaggttaggatggctgctgagaatcttcagatctgtttcctgtggctgcttgaggggcgagctggtagttgtgttttcagggatcttttttagagaagggagttttaacagggaaacgcggtggaaggcgtggcatataaactcttaattatagggacgtgaagttttcaacatgtgggaccaaaacaaatccttgctttcagtaagaactgcggagagcaatagaaaaagaacttgatttcaaagtccaagtttggtattttgagaaagcaattgcgggaggaaaaagatacttttaagaagtgaaagaatagaattctgatttttgtttatttcctatttcaaaccctgtctttttcctatgtggagattttgtgtgcccaggtcactaactgggtgtgattgactttctcgagggggcggggaaattgactccatacaccgattcaggaccctctcatcagtgctttaaggctctcttttggagcaggaaggaaaaaaaaaaaaaaaaaaaaaaagtaagcgctg

SEQ ID NO: 57763 - DNA, 3957 bp, Homo sapiens
ggcagccatactctgatggttaaggttgggaaccccagatgtggcctcctttgctctggtggcagttttcaatgccacatgatgttgggacaagcaaatcactacctttgctaggtctcgccgcctttacttgtgaacttgctgtattcctgtgcattaactcctgtccctgttgactgggttggtgttcagaaagtgatctgagctgaatatcaaaaatgtgtagtttttaaactgagtggctgtatgacgagtatttttcaaagacggttatcagcctttgtagggcctctgaaggagcctgtgacttcctcgtacaattagaaaaataatgctctgcattagttatcttagaaaactgctgctggtcttaaattaggttccctagaagcagactctgagaccaggagtggggtgctgaaggattttgggggtgagctctcaggagacacctgtaaggaaggaacaaggcaagattgggcagaggagaagctgactggcaaatgtggttgcgtctgagaccccagccacttctatggggagcgctggatggttcttcagagctgtccccatttgagcaaggggctggacttttgtttgcctacatcagctaattcctggcaactggccaccccttctgggggtatcactttgggtgaggctgtgtcctgcagctggctgaggaccttccttgtgaaccatcagcagctggggatgggtgtattggccctaaaaaggacgtctgggtggagcaatatagtgtctactatactgtcccaaagaatctaaccctttgagaaagaaacaagtgggtagcgccaaatgcccggcatatggcaagtccctttatatggaaagttagaaagtctggatcccttagcaaaactgagggaagagattataactgctttgtgaactattaaataaacagatctccagcctcttggaagtttatgagatccttggataatatgtacacctgattacggtgtaacagggcttagcctctatatttgtgaaatgactgacccataattgaataattttccccaagcatgaattactgcacgttcagaatattcatcctatgtgtatataaatgcagttgaatgggtcgccgtaacaaaaggcaagcaagtgagtgaggcacacaaactcagacttagaaccttccagggggccctggggatggaaggcaaatataggaggttatagctttggttcctgaatcaccttatgtgatattttagtcatagtcgaggataatgatttaggagttaaattgccaaaggataagtcaatatgctttggcgggggtagggaagaatcaattttctggcatttccgaaagccagttgcactgaacaaatgtctaaaactggcatggtttgttgtataagtgggatgagtagacaaagccaaagttatacctaatctctttcccaactgcagattaagtcatatctgtaaaaggcaacatggtttttcttctgcattttctgccttctagtaagtgaaggaggcaatgggttgtgctcctccatcatctgagtagtttgagtgtattttggggactggaggtggggaagcctgatgacttcgtcgtggcatagagcaaaggtgatcgggggtgtgtgttcagaccatggacttcgcttcccagtgagccccctggactctgtgtattctttgcctttatctgcattgccacctggaagctccgtaatgtcaagtcctggaagatattactaacctgtttccattatgggtgtagtagaaatataagtaggtcactgttcctaattcagaaactgaagagagtcaagctgccatggtgacaggttctgtataaaaacacccacctctgaacctcttggagagatgtgatgatttggtcattggatgtgaaggggataatctgccagctggtttattgcattggctagaaataggagatgcagaaactaaaaagctctcaagaagtcatcagatgagaaggaaattaatgtagcatagtgattctgctgtagaggaaaggctaaaggtgagactcttgaatatgtgcaccatttcttctgcagctcttgacttggatgatccttctcagtgtgatcccacgagtgtttggtgatgatctgatagtagaaagggcagagcgatttaactttgtgcacatcttcctctgacttctccatctttctaacatgcctgtacgtgtgcctttatcattggcattctggagttagggacatgaccttttctacagtccggatgaggaatctccaactatgacttttcattgtgactcacgtctgcaaagaatgaataaagaagaatttgttggccaggaagtgtgtactatgcagagagaaataattgttgttgggaaagaaacttttgaagaaccagaattaaaaaaaaaaaaaaaagaagaatgaaggaagtctatcaagaaaaggaagaaccagaagtgatctgcagggtgttgcctggagatatgggaaataaatcaagaacagagaaatgggaaaagataaaataaaaaacattgccggttaggaccagctggggtcctaggaaagtggcagttccagcggggcttggaaagctactgaaccactcacttatgcacacacaactgccccgccctctccccttctttggcccccattcacctggtgtaggagggtctgacaccctcaccagggagagtgctatttggctgttttgaaggcgagaccttgaagcgtgggagagcttcgcctctttcgtaagctgatgttgcgtaacctcccggagagtcaggacctagtggttaaggacacaggctttgaagccaggcagatagggtgtgacttaaatgctggacctcagaaaaatggcttattgtgaagggtttaatggagcataatgaagtaagtgctcaaaactgttgttaatatatgccaagagttataactaaatttgtaaaaagcaccttcttatactctcaggcaaactttgaacccgagctcggcttcaacagggagctggactctatcagtggccccatgggggagctgggcagtaatccaaggctccgggtggggtgtttgaagcagctgcagatcctcgtgaagggctctgggtgcccatacattgtccctatggagtttctgtacttaaagcccctgattttttttgtaagctgctccagctgggatgtctgcacactcacacatgttaacctagaatggattcaggaactattttaacatttacatggataatgggttgctttgttaagtcatatgtaaatttttatttagctcctaaccatctcctgtacacaagacactggactcacaggagtgcaaaatgcaatggtgttaggggtttgtatggatatgttattcgtgctttatgacaactcagagagaggtaggtaatattaccagttttacagagattaaataacttgcccgagatcaaacagagattataccttactacatggactctgtgccaccgcgaattgtaagacacattccaatattggagatgttaaattaacctttaaaattaacgaaatgtggtaagtcacagagcctcgattctaccccatacttggctgatttcaaagtttgtggttttttccctcatcacatgtaagggcttgcaatcctgtcttaactggtgaacataaaacaaacacaaataagaggacaattaacatttgtaagacttgaaagggtggcattaataataataataatggttggtgtttatcactcacttactctgtggcagtgctttcatgtgctttgtttgggggtgggcactaattttatatatatatatatttttttttttttaacaaacgtgaaaactgagataggtactcttattcccatcttctaaagagaaaactgaaacaaagattagttatgtgaccttgggagatcttctccaagatca

SEQ ID NO: 57764 - DNA, 955 bp, Homo sapiens
cagaatcaagggtagaggagtcttcctggaagaaaagtagatttgataagctggaagaattctgtaacttaataggagaggattgcctgggtctgtttatcatctttggtatgccaggaaagcctaaagacatcaggggagttgtcctggacagtgtcaaaagtcagatggtgaggagccatctgccaggagggaaggctgtggctcagtttgtcctggaaactgaagattgtgtgttcatcaaagagctgctcagaaattgtctgagtaagaaagacgggctgagagaggtgggcaaggtttatatcagcattctctgacttggatatgtattatgtgagtggcctgtaagaggaaaagaaaaaaagattctaataagcaagctcacctatttgcatcattccagcatgggattttttttcatttgttttcccattgattgaaaatgattactgggatcaaagtacattcatgtcgcaattacagagagagagagaaaaaaagaaaaccctggctctgcctatgatttaaaaacagttcaggaaaagttataatttagtttaatatttcattcacttattcaataataaaaatggaagagagataataaagtcacatttaaagtttgatttgcaaaaaaaaagtgtctgtttgaaataataagtctagcactcaaaagtataaaatgtgtttttgcatctgttggtgggagatgggtaggataaagtagtgggtaaggctacagagcaggtttaattacatttgtaatgccagtttcaagccaggcacagtggcttatgcctatggtctcagctactcagtaggctgaggtgggaggatcgcttgagcccaggagtttaaggctacagtgagctgtgattgcaccactgtgctctagcctgggcaacagagtgaatcctcatctttaaaaaaaaaaaaatagtttgggttcagg

SEQ ID NO: 57765 - DNA, 2125 bp, Homo sapiens
cacttgagcctgggaggtcaaggctgcagtgggccatggtcctgctaccacattccagcctagcaacagagcaagactctgtctcaaaaataataataattaattaattaattaaaataatttttaaaataaagagaaaatagagaatttattttattttattttatttttgaggcggagttttgcttttattgcccaggctggagtgcaatggcgcgatctcggctcatcgcaacctctgcctcccgggttcatgcgattcttctctcgagtagctgggattacaggcatgtgccaccacacccggctaattttgtatttttagtagagaccaggtttctccatgttggtcaggctggtcccaaactcctgacctcaggtgatccacccgcctcgggatcccaaagtgctgggattacaggcgcgagccaccgcgtccggccgagaattgttttattaaggcttgtatgttaattcatcctaccgtagaaaatttaagagtgttcattaaaagtttattttctaggtcctgatgagttctgactttctgtaattctaagctgatctaacaacaagctaaccatatatagctaaaagttataggctacgtacacgcggtgttcactgtatgccaacgctgtacacaaatatttgtctatgctaacttgtctgagatcatacatcccagaagtggtgaagtcaagtttgaaacccaagcactctggctcgggatactgcttctctccccttagcgcatattactggcattagttgaagacttctttaatccaagtaaatgtagaaaagcaacaattataaataacaagagtccctcgggtagaccgcctgactctcggatcaactgaggttccacccagagcacgcccgccttcagtgagccgcaacccctatccctacggtctttatctgcaattctctacgaactgattcactcgatttttaaggattttttttgttttcttttcattacttctttcagtttgggggaatcttcctgcacatttgactcggctctgagtgcgcagaccaacgtgtttcctctttctccagcctagggcggtgccagcccagggagcctgcgcttagcggccccaggcccgcccctgacactgaacgccgcttgtcccctccggcttgccgtcctcgcagccatggcggccgccgcgctcccagcatggctgtctctgcagtcgagggcaaggactctgcgtgcattctccactgccgtctactcggccactccggtcccgacacctagcctgcgtgagtgtctgtctcgtcttctctgggctttgggggaggtgcaagagcggaataccggcctcatgaagggtgccgcggtggctgagccagcgccgcccgggggaggccagtgcgtccgctgccaggcccgtctggtaggaaaaccatggacgtgggtctgtgctctgcacccgcgttgcccggcttctagccgcctgtttctgccctgggtgctctgggagtttgctcagaaagcttacatcccccttccccgtgacctgctcctgtgttgcccccgtccacagcccctggcacaggttactggtgctgtgttgtttatcgggcatcggcgctgttgaaccatggatttccccaaacattaagagagtcatacggctgtgctaggacaaattgctgctctgaattccaggccaccaaatgggcggccttcattcaacaggcgttgatgacctccatttaacagagattgtagggatgcttgatagcgtgcttaccccggaggactctagtggaaaatacagatttattagcggagaagtgctatgtagggtgagaggcgctgtgatagaagtgtggctagaatgacgggagcgttgaggaggagctggcgtgagtctaatcaataggcggatcctacctgtgctacttcctgttatatctctaatttactctcctcatactaccaactatctagttcaggtgaccatctcatttctacaagttttttttccgtttcctgtttcccctcttgctctcctacattgaattctcaaaacagccaaatgaggttttcaaaatttagatcttgtcttgctgctctcatgttcaagatctacaaatg

SEQ ID NO: 57766 - DNA, 1725 bp, Homo sapiens
tataggcatgagccactgtgccctgccttcccttggctttttaaccttcccctagaggttacctctaagtagcactgaggggaaagtagctgctaattttatgtagcttgtagtactgaaatccctctggagaagtgatcacctagactccagtagaaggatattactgttgtatactattcaaaacagtttaactatagaagtgtcaaagtagatttcagtaagcatagacatcgcaaagcctaagcttcaggcataaaggcttaatactgcctcaaagaataattatttcagtgctgggaaggtgataagagacacatattcactggaccattcatttatccttcagcagtttaaagaagcaaggaggctgggagcactttgggaggcaaaggcaggcggattgcccgagctcaggagttcgataccaccctgggcaacatgatgaaaccccgtctctactaaaaatacaaaaaattagccaggcatggtggtgggtgcctgtagtcccagctactcgggagactgaggcacaagaatcgcttgaacccgggagtcggaggttgcagtgagccaagatcgcaccactgcactccagtctgggcgacagagtgagactctgtctcaaaaaaaaaataataataataattaaaaaataagcaaggagagttgtagagatttggtgtcctattttagtattacgtattgttagcattggaatgaatttttaacctttggagccagacagacatggatttgaattccagggccattacttagtacctgtgtaatagcctcgactatttaacctctgaggttcagttttttcctaaggatttttggatggatcagggagaatttgtgtaaagtgtctggcaaatagtgggctctccataagcatctataaataatgttgatattaacaataataaaatgaggaaagatttttttcttagaattttaaattcatggtttcccaatttctattaatatatacagcttatatttaatttggcagagtttgtacaagtaaagtcagatctatactctttaggatgtgtatcctactcacaatttgacataattgatgataacacaacttccttaattttaactttttagtgattttttaataattgaaaccttccgtaaatgattaggttgagaaataatgagtcagtttgcaaagtgacttgcacaaaagatgagcacaaatactggggaagagaaaaaaaacagttgctttagaaaagttagagatctgaaatcaaatttcagagattcatgggtgattttgatattgaattactaatggttgcttttttacattttaaaatttcggctgtcttatttggatttcatgatagttttattgtcagaactatgtctagctttgtaataaaatggttctgaaaagtcatgtaacaaaaatttctaatttagccaagcagtgttgcattcctgtagtcccagtttctctggaggctggggcaggaggatctgttgagcccaggaattcgagtccagcttgggcaaatagcaagacccccaataaaaattaaaaatttctaagttggagaattttatacttactaagagttcgttttaaaggggacattattgcagatatttctgataaaaatgaatacttttgcagagccataatcaccatttaatctgtcggatttatgagttcattttgattgtgtatgcctacacacctgc

SEQ ID NO: 57767 - DNA, 1833 bp, Homo sapiens
tttagctttggtagctgaaagaattgacagtaattcttttttcactttttatgaatatttgcctcttcgtattttttatgattttcaaattgcttgggattttaaaaaatggttaaactgttttctctcatacagcacaaggccttacttgtaatcatgagtagtggaatattactatgattcatgtcctaggcaaagagagttgtaaataagaaggtaggaggtgacaggcttgtgtgttcagtggagcagatatttctttgccttctgttacaacagaatacattgacccttgcatgaattagctattatgtttttctttgtattacattcatacaaggaaaaaaaaagaggttcaagttatgttattatattttttgttactccttttatcatgcctcgaggttccttagaacatgttgttctaacactaacgagcagtgtggttttgggcaaattattcagttgctctgggcttcagctgcctgatctgtaaaacaggtgataatagtactaactcactcctaggtttgttgtgagaattaaatgagttaatacctgtaaggcacttagaatagtgcctggcatgtagtgagtgttccaacagtttttcagcctcagcccatgccacttccttctcattggccttcattcatttcctcgattgtgttaagccctttccggcttcaaggcctttgtggatgcttctcctctacggggatcacaatattcatctgactggctcacagtcaacttcaagtctctcattagactgaatgttcccagagaacactatgcctggcagaatagttgtgcaataaatatttattgaatgaataagtaaatgaataatggagccaactggaaaagagaacaggatcacatggaatggaaaattgcttcttcaggggttgggggtcagggcagattctcattgcaggcaggaagaaaaagaaaagtggtgtgtgtgtgtgtgtgtgtgtgtgtgtgtgtgatccatatttataaattaaatggtgaaattgtaaatatttaatggtcaaagcattaaaataggagtcgacaaattaattgaattctttgcctaagtgatgatcagtttgagcttaaaatggtatttttaattgcccccagtaatttgaatatgctgttgtttgtgctttaaaattaatatattccaactacacttcaataaaataaattttttttgtgtgacaaggtctggccctgtcacccaggctggagtgcagtggtgtaatctcggctcacagcaacctcagcctcttgggctcaagcaatcctcccaccttagccttctggctacaaaaaaaaactgaaacagctaatgacttcaatgctgggtgtggttttaggagctaaaatgttgatagtaggagccaggcatggtggtacccgtctctaattccacctacttgagaggtgaggtgggagaatcacttgagcccaggagttcaaggccagcatgggcaacatagtgagactccacctctttgaaaaggaattgatagtgaactataagtcagggcacaaaattgtaaataaaatgtaatcatagcagggttttaaaaaacggatttaagatgtacaccaagtgttaccagtgttaatgggccatctttgggtaacagaattatggatgattttttttttcttctactttttagtaatttccatcttttctatgaagatgtatttaaaattgcaacctgctgatactatatcagaattcaattctggattattattccattagtattaacctcctatttttaatatgacactgaactttcgctaaaagaccaggaagttaaa

SEQ ID NO: 57768 - DNA, 470 bp, Homo sapiens
cccatctcaaaaaaaaaaaaaaaaaaaaagtgaaatcttgatgtattagggtttagagaatagctgcaaaaagttattttctgtatctgctggaaaacagcatatctttgtaagtacagattgtaaggcagacagattgtaattatgtggatagagtagcgagtggtaacagagcttgacagaccagtgttcacgtgacagagtgtgcagccctcaagcgcaggtgcaggtggctaacagtacagggttaaggggccaaagtgcacagacaaggtgttggccagggcctctccacattttgcaaacttctcttcccttaaaaaggaaggaaaaaaaaaaagaagaaagaaaggaagaaacaaacaaacatttgatatttctcagaattcagaactcatttttttttgttttgttttgtttcagaatactgaagaatgggaaaaaagtaagactgaagcagacatggaaga

SEQ ID NO: 57769 - DNA, 1938 bp, Homo sapiens
tgcgctttcatctttcttttaataacttagggagaataaggggccccagtggcaaatgcaagctcccctgcctcccaacccgattcctctgagaacctgctgccatctgcctggacctcctgtaagatggctcctacgcgaccacgctaccagagaatcagctctacgtgccaccaacattgccaccaactgtccatagatcgcctgcgtgcctcagcccactgacactcgatgccggactgggccagaaggacgaccccatatttgatgcctttttgtctccctggaccagagactccatccttccctttcctcccacgctcatttctttttctttagcccgtgtaaagcagcgtgggagagaaaacgaatttcttctccctggggtaccccggagcatcactgcagcccccaacaagcggcggagccggcgcgccccgggcgggcggagaggctgcggggacgcgcgccctccgcctcccgcagctgcgcgtccgcagccgaggcgcccgggcccgcagcttcccgggcctccccgagagccggatccagccggcaggtcaggccggcggctggggtcccgcgggcggaagtgagaagggcggcgggggaggaggctgctggctgggagctggaattcccttcccgcctggcgccgcccgggagagcccgcgcgaggacgcccgccgcgctccgccggcccttttttggcgctgagggaaaggagaagggcagggccgccgcctcgcgggagcgggccccgggaggaggggccgccggagaggccgggcgagcgcgggcggccctcacctcgccgctcctcccgggccgccatccctcggcgccccgcccggaaccggcgcgcgcgtaggggctgggaggccggcgcgcagatctggcggtgagcgctgccgccccggggcccccagccatgtcggccgaggagatggtgcagatccgcctggaggaccgctgctacccggtgagcaagaggaagctcatcgagcagagcgactacttccgcgccctctaccgctccggcatgcgcgaggccctgagccaggaggccggcggcccggaggtgcagcagctgcgcggcctcagcgcgccgggcctgcggctggtgctggacttcatcaacgccggcggggcccgcgaaggctggctcctgggcccgcgcggggaaaagggcggcggggtggacgaggacgaggagatggatgaggtgagcctgctgtccgagctggtggaggcggcctccttcctgcaggtcacgtccctgctgcagctgctgctgtcccaggtgcggctcaataactgcctggagatgtaccgcctggcgcaggtgtacgggctgcccgacctgcaggaggcctgcctgcgcttcatggtcgtccacttccacgaggtgctgtgcaagccccagttccacctcctggggtctcctccccaagctccaggggatgtcagcctgaagcagaggctgagggaggcccggatgactgggactcctgtcctcgtggccctcggggacttcctggggggacccctggcccctcacccctaccagggggagcccccgtccatgctcaggtacgaggagatgactgagcgttggttcccgctggccaacaaccttcctcccgacctggtcaatgtcaggggctatgggtctgccatcctggacaactacctcttcatagtgggcgggtacaggatcactagccaggagatctccgctgcgcattcctacaaccccagcaccaacgagtggctccaggtggcctccatgaaccagaagaggtaagcaccccggcagagtgctgctgccttctcattcattcacttgttcattagttcattaccccagtgtttactgagccagtaaataggggagggtgtgctgtggtggaaatgacatcttcaggaatgttgttg

SEQ ID NO: 57770 - DNA, 521 bp, Homo sapiens
gattccatctctccccaccctgttatcatccttagcctgctttgtaaaaggcacatttttgccagaaaatgtattttaggtcacttgatttttttttttttttgtttgtttttggtcattaaacaactttcttttcccccggactgatgtcaacctaaagtcttgagacggtgccatttcagagccgtccatgtagtcattctctggagatttcagatggcatttgggaaaactgccaagatgatgtattgactctgaagacaagcagggaatttccacacagagaaccgtctgaagccaaagtgacttacggattgtgtgtgtgtcacattgcagagggactggactcaagtggcctatctgtataatcacttgtctctatttgtgagtgagctggtgttgcacttgttccaatcagcttggcatctgcatttttgcttgtgggaattcaataaatcctcagccattggggtgagagattgaagagttccaagaagtacaggaagcaattggtagctaag

SEQ ID NO: 57771 - DNA, 2460 bp, Homo sapiens
aaacattcacgagtggactgctagttgactgtttctctcatcgctattgacagtctgaaatggacaaagacatctatataatcattccttcctttcaaataaataatctgtgaattacgctattcttttcctattgcttcaggacaagctatttgacagaaagcttttaagaaaggctttgcaagaaaactctgcaacagagatggcacgtatgaattgctgtgatctggagttgaagacaagaacaaaagtaactctagagcagaattctttgaccaaagtcatcttactggttggcggaggctctcagtctacttgcatccggtgcttgagagttcagacaggcaaagatgagaggtagcatctagtcaacatccatttcttgagcacttactacatgtcagccactttgcttagtccccggttttactgtgctctgctaggaagtggtgaagagattcggcgggatcttcttaggaccaatcctacaaagttccagatggaactcattttgatttgggggacggtttacttgcagggattaggtggagaaacagggcctgctactcaagaggaatgagaaactgtaactaacaggaggtagactgggaaggagcatggcaaagtcaccccttttcacagggcaacgctccaaagaccacgctcaagctggggtggcagggctctgaacatggggccccgacccgggcctcggcctggggccacgtgacgcgcgtgtttacgttgagtgacgggcgctgtgttgggcgggccttggcggaaatcaacttccgggggcagaggtgttcgaagccgggtggtgcgtgggctaccccaacctgtgtggctgggccgcggtctcccctcaagggcctggggccgtgcctcgggtgtacgcgtaggggtctgtgtgctgggggtggctcaccgggcagcgtgggtgagcggcgcagcggcggcagcggagagcgagagaggggagcaggtaagtgaacgctcgccttccggggcctgggtcttggggtcggggccgcgcgaggcgagcggagagcgccccaccgggggaggagcgcggacgagcttccgccgcctgcagcccgcctgctgcggcctcgcccttggctgtcgcagcgaccaggagtcagggggcgtgaccaacctcctgcgggaacggagccagctcccgggggtgggagtgcccactcgttcctgcgctcgccggtgggtaccggtatctgcacgtcccagaatcgagtgttttcgaaagtctacgcccacgaacacgtgattattgtgtcaccgaagcgcctaccgaacggagaccttgattcttgcttagattacacagaacgcgcctggtttatgtatccccttttactttgccaagtacattggggtaaaagctctacagcgtctgccagccacatttccttagagtttcttgggccacatgttgcaataaaagtggcatttcagggtcaaggcaggagccagtaactttgccaagtggtgaggtatccttcgtccccgttagcacgcctccctttcccaacaataaagatattttctccatctgcgcgtgtcgcctactgcggaggaaagctttggacatgaaacctatttttggcttcactttaaggagtggaactctattaaaagctgcgctggtgtttttttggtaggatgatgttgctgctgctactctcacttgcttccttgatgagagttggggcagagctcgatttcctggagggtaaagtcttggccacaattttaggtgactcagcggccccttatgaattctgactctttccttccctcccctctcagctgtgcggatactgatgccacctttctctccaaatattaatccgggtgggagttggatgatggtttttggaagcagtttgcatgttgcgtggtggagttattggagtgggctgacattttacttcacaatttaaggcaacccttcccccccccacaatatttagttgggtggggtgacagggactgacaacaaattcgctgttgtgttccctgctgtcggagagttctacacttaatgatcacctgattgccctctgctacaatttctattgcgttgaggggattggttatactgtctgtacctattaggtaaatgtagtaagggtcatgccaggcagagtgcacctgcatggtgttggctaaccagtaaactgtgtggtagagaattgccctggttacgaagtttggtatcctccaggctgcctaggagggtgttctgtgggctgggaaatcttatgaactggtttcctagcaacagtataagcccaatggaataaacataaagaaaacaaagtgatgaaagttacaacttacctcttaacttttattaaatggaaaaatgtagcttcttattggagtgatccactcaaaacttctgagacatttttgtttattttgatcatcttagta

SEQ ID NO: 57772 - DNA, 929 bp, Homo sapiens
ttttttgttgaaaattagataattaaataatatctaatgtggtaactctggaaatcagattctccttctcagggtttcttcttgttgctgctcttgttatttgtttgcatagtgactttcctgaactctttatgtaaactttgtattcttttatgtgtggccaccaaagtctctgcatggttagtactggacagcgaatgattggacagttatttccctaatgcttggaagcaatgagtctcccagcctttgctggtggtctctgtgtgcatgatggggcatgccttcaatgcttagacaggcagtttataactctactttagcttttagttcccacttgtacagagcttaaagtgtagcaagaagtcaaagcttaggtcaccttttcaattctttactgagtacttgcatgagcttggccatctggagttcaaggaatatgttggatcttatcaaaatcccctattgacatttcattacctagcttttccttttaagattctggtcagcttgttgtttgccccaactgttactgccacctcaggcaagctgatgttaaacagttggctctgtttgtttttgacaaatgctatctggggaaaaggttattggcactggacaagctcttaggtcaaataaagacaagtaaaggagtggtgttttccagggaactgccagacaggtcaataatgacaatttctgggaatggggttttggaggaggtccaaccctattttgcccctcctggtggctgctaggctgctggattttattgtgatttttgagccttctagttttcaaggctctcatggtactggggatagagggatgagattaaaatgccataaaacttgcttttcttaatgaaaatcagccatttttctgtaatatgttcttcctagattgatgcaagcctttgattaatttct

SEQ ID NO: 57773 - DNA, 956 bp, Homo sapiens
atatatgtatatatacacacactacttatagctatattttgtatatagtaccagtggttgctaaatattttgacattaagacccctttacactctcagtcattattgtggatcacaaagagcttatgtttattgatatttaccatattagaatataaaactgagaaatttaaaaaatgtttaactcatttaagaaactattgtaaacccttacatattggataatattttgggaaacatagctatattttccaaaataaaaacaaatttagtgagaagaatgacattgttttatcattttgcaaatctttttactctctgtcttcatggaagacagctgtattctcttatctccttgtttattcagtctttggtgatatcataggtcatgcaacctctggaaaaccccagtgtatattcatgagagaatgagagtgaaaaagagaatatctcagtagttttatgaaaatagcttatgaactctctaaaagggttgcaggaatactcagttcattacatttcttttgctgtggtaatggccttcattccttggctcatggtcctcttccatcttcaaagccagaaatggctgtttgagtctttcttatattgcatcactgaaaagggaaaggtttccctatcccccttgcagggtgtgtaatgggggtgtggcttgcttctttggtggcccgctacttatacctgtaagggagcatacagatgggcaggttgtggggctccaaccccatggcagtgtctaggggtgaatgtttacagctcctgaggctgcagtgggtgtgtgttatcatgtgctcttttagtttagccatctgcgggctgcttgtgttagtcagcttaattagaccccctgcctatggcaaggacagagggctttctgtatcccgaggttcttgcctttgtgtactggaagaattggatcccatgtgggcttggaga

SEQ ID NO: 57774 - DNA, 1771 bp, Homo sapiens
cttaaaaagccaaaagatttatgattggctgaaatgggctcatcattatattgtcccttcagttagtgttttcaaacttccatactgttgacattttgggctggataattctttgttgtggagaggctgtcctgtggattttgggatgtctagcagtatccctagcctgtgctcagcagatgccagtagcaccttctcctctgttgtgacaatcagtgtgacatttccaaatgtcctttggctggggggcacaaaattcccttatgttgagaatgattgttgtaggcatttgaataggaatccttggaaaacagaagagctggagaagatgtagtccaatgctctcagtttacagagaaggaaactgaagcccaaccggagaggttaagtaacttgcccacggtgacacaattggaacaatggtgacagacctaggactggaacccaggtcctctgacaccttgtgcagtgcatttttcacctagatctgcttccaaagccctcacctgccaactgtgtgagatgacgggtacattaatttgctaatttcccacccactttaattgctgatcaggaaggcctgacggctgctttcacttccttgcaagtgtgtccagaggcaagcagagcagctccccattccaagggagcatttcctggatataggcggcccatattgtttcactcagattggaaggggtgttgcataaacatttgccttattctctgatccagtcatttaaataagatttttctcattcccagccaattcagatcatcagtctcttttgcattcttgaatcaacatttcctccaaagccgctaagaaagtgtacagccagaaacaaatgtttgtgtgaagtcatttgtcactctgcaaattccttaggaatgtggttatacaacaaacagttggatgttatcatttatatgcctagaatttgtttcattatctgaaagctcatcctttttgataaaaaaaattttagaagtatattaatgatttatcacaggaagtatttacttttcacaataataaattcctctgatgtgagaaagtacctaccaggctcactggaccagaagccctgagtgcttaggcttcagttttggctctgtcactatccaaactgatggcctaaacagggccatatctttctcaacagtgttttctgagctaccactgagatcccttgacactctcatattgtatgagtcatattcctgtttcatctattatagtccctgtgagctttctcctataattgagtcttgttctacctggtttgactactgcatttttgatagagaaagcccaggaaacacctattgtaaaatgttattcatttacccacttacagtgggaccagcccacaggttaatttgaaatttttctagttgtcagtgaaatatcttagttagaaagtaactttgccagacagtaattttaaactctgctttgtgggtacaatagtcccctcttatccaagagggatatggtccaacactgctagtgggtgcctgaaatcatggattgtaggaacccaatcaaacacagttctgttcacatccacccacaaatttaataccttttccatcctaactaagcgcttgtcatgcactgtggccataattttgcagtttaaagggcaacagcaaaactagcacacattttttttttcctctccacaatttaacagataggtctgtttttactgtaggttttagcaacttcagcatacaattctttttttcttattaagttgagaac

SEQ ID NO: 57775 - DNA, 1766 bp, Homo sapiens
cagagactggattaaaaatccctgagagccaagatatcaagtaggtaaggggcagaggtcaaaataaatggatccagccagtctgaggaagattcacctacaccaatgctgcagtctgaagctggataagaagaagggaaggaaataaacatttttgagtgtgtaccatataccagaccctgtgcatcacctaatcaaattatcacacaaagcttttagggggtataattgtcaccatttcatggctgaaaaacatggcctcaaaagatagcatgatgggtatcacacagcttttgagtagtaggtctgggattcaaattcaggtctaattccaaagcctgtgttctttctgaccatagcaatgactccagagcaacaggccagcgaagagagggcaggctttaatgaatgagatagaagctacagtgagtcagacttgggcttcaggtaaccacatggaggcagggtaacagctggcacaagacttccaggaaatgggcaatgtttggaaagatatgttgacaaactgcccaggctgtggggcatgaggtccaaaggtcaaagtttagaagaataaaaagcaaaatcaaatttctatgtagaagaagctaactagaagttgatatagaagcatgaaactagacagaagagggaggagttagaagaagagacagggccaagtgccatgctgagaggccgaagctacagaaaaagtgtccaaggagagaggctcctggtgatggggtggctgaaagactttaaagaatagaagtgtctgatatgtaatcataggttgtttggttgatgtcctgtaaactccaacaattgccccaattctcctgttaaaatccatcccacacatcacatagccttgtgtttgagacaggctcccgtagaatgtccaaacaggaagacggggaatgttcagtgtggagtgacagggtacacagaacagagagcaggcacagaaaagagagggagcccgtacatggagtgattaggcctcagccagaggtagccaggaacattataaacaacttgcccacatgtcaaagattagcagagagtttgagagagttgttaaatggctcaccacataaggaaggagaatgcaaaacaatttcatttgaatcctgaaagggcaagctgaacttagctgatgtgtggcttatgaaaagaagatattgctaatagagctgatcaaggattaagtaggcaaccttggacagcagttaattttccacccctgggaatgtgtaggcaaagaggacacagacccagacatggcagtggtaggacagattcaggtgtcagatggggacagactgcataacccattgaactccctcccaaccctgagagtccagcctaggaaagcaagtttaaggctcccaaatgaattaagtatccaagcaaatcggacttgcatttgggaatgcacgtttgacaaaactcagaatgaatgagtcaataggaaatccacccaaacaggttaaaattaaaactgaaccattaacatccaagagaaggataaagctgccttgctagtcgactttctgattcaatccaagatttctcatgtgtttcctgctcctcttaatgagtcacttggtttagacagtctaggatttgctttcagagcaggtggataaacttacctgtcccaatggagatttaggtttcaacacctgctgaagatgcatctaacctgttgaagattttcttgcatttttagattcatgcccggacctagccatcctttctcc

SEQ ID NO: 57776 - DNA, 1851 bp, Homo sapiens
aagtctttgtaaggtaaggaaaattaaaacagtgacaaaaataacatgagaactgccaggactctggagcataagaaaaacataaaaataattaaatatagttatttggtggaggaaatgatgaaaaatttcccacttgaaggcagtatgcatagtgattaaaaggacaggttccaaagtctatcctacttactgcctagattccaaaagtctgttctaccattttctaactgtgtgactttgaggaatttgattaacctccctgaggcaactctagaagagcccttctaagaaagatgctgatgcaaatgggccatttttgtgaaataatcctgttatgggtcaaattgtgtccctccccaaattcatgtgttaaggccctaaattacaatgggactgtatttagagacagggcctttagagaggtaacaaaagttaaacgaggacataaaagtggggccctaatcaaataagacggttatccttctaagaagagaaagaggccggtgtggtggctcacgcatgtaatcccagcattttcaaaggctgaggcgggtggatcacaaggtcaggagttcgagaccagcctgaccaacatggtgaaacctcatctctactaaagatacaaaaaatagccgagagtggtggcatatgcctgtagtctcagctacttgggaggctgaggcacgaggattccttaaacccgggaggaggcggttgcagtgagccaagatagcgtcactgcactccaccctaccctgggagatagaccaagactctgtctcaaaaaaaaaaaaaaaaaagagagagagagagatagaagagaaagagacactagagagctatctttctctctctctgctcatcacagacaaaagaacttgtgaagatacaggaggaaggcagctgcttgcaagctgggaagagaggccttaactgacacctacaaccctgatggcattttgatcttggacttctagcctccagaactgtgagagaataaattttttgttgtttaagcagccctgccagtggtacattagtttccccttatctgtggttttgctttccatggtttcaggtccccatagtcaactgtgaaaatattaaatggaaaattccagaaataaataactcataaattttaagttgtacactatagtatcctgatgaaatctcttgctgtcccacttagtgccctgggagagtcaagcagccttttgttgaccatatccacacttcatatgccacatgcccatgagtcatcagcatcatctgctcctgacatccaaccatcaacactgtcctggctcaatgagtcaggatcaccctcagcagatgacgctccttctgacataatgtctgaaggtcaatagtagccctaaactatgccacaataccaggtcattcacctctcttcatctcatcacataggcactttataatctcacattatcacaagaagggtgaatacagtacaataagataagttgagagagagagaaagagtgagagagaccatattcactcacgtaacatttacttcggtatattgcaataattggtctattttattattattgttaatcttttactgtgcataatttataaattaaaccttactatacgtatgtatgtataagaaaaaacataatatatgttaagtttagtactatctgaggttttgggcatccactgggggtcttggaatgtattcccctcagataaggggatgactgtaccacagtttgtttattcattcatctattgaaggacattctggttgcttttaagttctggtcattatgagtgaagctgctttaaacactcgtgtacagattttgcgtgaaa

SEQ ID NO: 57777 - DNA, 831 bp, Homo sapiens
catttccgaggaggcaggagcacctcagatgctccagggaattgttgattccagagagaattgctgatgggtgtagcaccccctgggtgcgtgcatcgaagctgtgaacaaatcccccctttcctcactagagtctctacagagaaatcacctcagcccatgtattctgtgacagctgaggatggcaaatgtgggagcaatgtgggcttctcctggtgctaagtctgaacacagagcataggccttgcctcaaatgtttgcaaacatccgtgttaatgctcagcacgccactttacaccgaaggagtcacaccagtgtgacacacgacttcaagacttctgaggagctagaaaggaagtttatgtatttgaggcctttcccttggcttcactccatttagaactgggtgactcaaaatgacaaataaggtgtagtaatgaagacaaaaagcttctttaaaaaaattattgttaatccacttctctttttgacctctgaacagcattatactagggagtttacccagtcctctcagtgaataagcttgtgctgaaatcctgtgttctcaagctggcatgttatgttgaaatgctttcaagttacataaacgcccacacttactaagtgcaattccctaattgagtcactgggaagcagcagaagtgagcagcactgtggtcctgtgacacagtgacagtacagagaactgtttccccaggagcaactcaagtctcaccacctgctgggctcccaactgttcatatattcaacctatggtaaagaaatacagaagtaggattgccattatcatcctcagtatcgccttaaact

SEQ ID NO: 57778 - DNA, 1226 bp, Homo sapiens
cccatcactacaaaaataaaatttaaaaacgttgtccaggcatggtggcatgtgcctgtagtcccagctactcaggagtctgaggcagaagattgcttgaacccaggaggtcaaggctgcagtgagtcatgattgagccactgcactacagcctgggcaataaagcgagaccctgtctcagacaaacaataaagaccttctctatctgggagtaatacaagtatattttctaaaacatatcattaggttgatatagttctgtacatccaatgatatcatgtccaaccgttatttttaacaattaaaataaatgtattgaaatcatatcaattgcatcagagttggagaatgactaaagatttagataatagtaaagtggaaccctattatggtgcttatatcaggcacaatgatgtctacctcatgcctaagaaatttcctatgatacagtaagagaaatacctcatgagtcattaagtacatgggcattaactttgaccagaagtaagaccaaatccccacaatagcatcataattactgagccaactatagtaatcactactgccaagactggttaactacaaatcaagtgctttacaggccaaaagtgacttgtagctaaaagacctaggttggggattagctatgggaccttgagcataatctctctgtaaaatggagatacataatatacatcctgactatcttacagccatattgttaggatcaagtaagattgtatatgaaagttttttgtaaattgttataaagttgggaggtgcacaaagaagatctggtccaagtcctgaccacaagattggacagtgtggttcatcttgtgtaatgggacacagggtagtgagattacacagcgcaggttttttgaggtcagttaaaactgggttggaatttgactttgacactttttatcttaagcttatgttactcatttgtaaaactgcagacttacctaacaaagatgatatcaaaattagcagagagaatactttgtgaaagtatcaggactgtgcctaacacagaataggttatcaacaagaagttttttttttttttaatctccactatgattgacaactgcttttgattcaacaaacactaatacagtcaacacttctgcccaaaagttacatactaagacctcagatcctatcaacttcttaaaatacaagaaagtacaataaaaatgagaaataaggccaggtgc

SEQ ID NO: 57779 - DNA, 2126 bp, Homo sapiens
aatcctcctctctctatccatccctgcaccgccaacccccaccctcccaaaaaatcagaatttttttcctcatgttttccactagaactggcataattacaacaacttaaagatatcaacaaacaaattaggtaaataaccatgtcttttttcagtgaacaagccaggctcattctttataattgctgtatactggagtccaatgtatcaggctaggcaattaactgaaatactgaattacaacttcaaatgaataaatcctgtttttaactgtaactttcattgcttctgaaaaccagtctggcaacattttaacagctattatgccactttgtctttaagtctcgggggcactaaaatataaaagttatttaaacgtgttttctcaaacaatgacctgtcaactctatatactacagataaacaaggctattctccaccacgagttgacacgttgccttcggaaggtttcctgcgccgaggaaaagtagtgacagtcgaacctgtctctcagcatctcgccctcccccgcccccttctcattttccgaagcactgtgcgaaactccttccgggcaaggccaagactcttaaagagacagagggcaacgtgctgccacgaatgtggcatttgtctgaatgggggtagggagtctgacatccgggaggactgggactcgaccgattgggatcctactcgcctgcggactggagaaaccacctgggaaccgggcactgtgacaagcaaagggtcagaatcaggtgcgatcgaggaagcacctgaactccttcgagttgcaggatagcacacaagcacccggacctggcaaagggaagctcccagtagcatcgttgcctagggtcctgccagtaacgcccccgtgggaggtggagcggcttctccgtccgaccggctctctagagatcaatgaagacaggaagccaagcccatgacaggctcccagttccctcaattgcatttacgccctaaacagccctggaacaaccgagggaacagcacccagcggtgtttcagtattttaccttgtgttatggtcccagcctaccgccatgtttcacagaagcccgggtcgccggggctcccgcgtacccggaaatatcgcgagaacaaaagcgactatcacagctgaaaacgtcagaaaagagacaatgtacagatctcgcgatattccctttgcttacgacgtgcttagggaatgaagaggcgtggttaagataaaagaggcgtgcctacagggaaatgaggttgcaacttgttttaggtgtaatcgcgccgccagtccggttctgtttctatgggaagggaggggttactttccgactaacactgagactgcagaacgaatctcagctcctcacaccgtatttcattactaataagagccttgggcgcagaaattatccctaacaaccctaatgcatatcacctgtgcaattgttttgtttccctctttcagtttttgtgtcgttttcccctgacaagaacatttgagcttccttttccgccataggtaacgctttttattatttgatcagcgtttttattgtcttccaggttttaatatcataagaaagcacatatgtcttcctcatctcccttcgccaacaccaactatgccttcaaatatttgttaagaaagaaaattaatacctcatctttttctaccacttcatagaacaggagttaatagacggaacttcggaaagaaaagttaaatgtgaactcctggagagtaaacccattccaggttccttttcacccatctgttaccagattttataatcaaacattgagatttaaattttctgattcattgacctagaagtctaacaacggcataattatgacaactgcttataattactgtttaaaggctttaactgcttttttaaaaaatctgcgtatcctcacaacactcttagaagataataccagtatttacctgttttataaatacggaatttgagtcaaggggtagtgaagtgatttacccaaattcagaccgctgggagagtcagggaaatcttgatcacaatactaaactgtgcctcaaaggaaaaaaatcacattgttttatgtagtgaattaacctttactgaaatact

SEQ ID NO: 57780 - DNA, 1231 bp, Homo sapiens
ctgtgtgcaaccaccaaaataccactctcctccctctcttggctaaaatgaggaactgctactgctttaccagttacagttttatccttactctagccaggcctccttttgactgagatagccatcgtaaaattgctctacttcctgacagaaaccaattcagaacaaagtccatttccttagaccctctccaaaattacccaaagctctacctctattataggtttttctaacaccttcttactgagataccccatggttttccatggtgtgtatactccctctctgcaatgagtgcaaaatgcaatttgttcaactacaggtacatttctagggtctttggtgaaagggtattgacaggaattagggttgaagagtatggtgctatggagacccatggttcatcttaaggaaaaccaatagcttgaacttataaatcttcccctcctccataccccaattgctttataatctaataagagccatacttactgataggaaagttaggcaactttggaacttcaaagcaaaattctgaacttaatggtgttataaatctggaactatcataggaggggtcaaggtccctggaaaaagaaagcatcaaaatcctcctcttgacctgtgcaataaatggattttaatggtgtcctaagtggcagaactaagaggaaactagagaagttgatgcaatactcaattacaaaatgtttcaaaaagtttccctctatgagtcagtctcatgatggaatactgccaaatgctcaagcatgacagacactatgtgaccaatacatttctaaagattattcaagcttggtaagtgagtgtagctcactggtagacaggtgcctctcatgtacaaggccctgagtttgactcccagcacctccaaccattaatttcttagtcctcagcaccactcatcggtaaagattattctggctaatggaacttttctccactttaatttatctgaggtctaaaaagggccatctatattatgagtataaaacctgatactggtaacactgagtaaatacattttcaaaaaagttaccatctaaaaatgccatttaggaaataaaatcctttaaaacatatggcatctggacaaaaccaagagtgccaactaatggttaaatgagataggaatttttgtactaaaaagtcaagacaagccaggattgggaaggaataaagatccagtgagtgtgatctcatactcatc

SEQ ID NO: 57781 - DNA, 1044 bp, Homo sapiens
ataatttgtatctattttttctcatttacagtagaaaatcttaatatataatacattttaatattcaattttccttgtgttcttgggataaatcctatttggttctgtcaaatgttcatcaaataatctgctgaggtcaagcattgacttaaccctgaggtggttgagagtataccatcctggtacaagggttattttcagcagaaagcaattgaaaataaaatgtagacagaagaaaaactctctgccctcccactatctccactaggagggcagaacaattcttaattagagacaaatctcgactcttatcagcccagagatggcaccagaagaatctacataacaaatctttctaaagtaacttttattttctacaactgtccccaatatattcaccttcctacaatatgccacccctagaagctcaaagtcctttgcctttagaagctcaaagtccttttcctttattttgtcacttctcttatttattgttctttttgttaagatgttatataagcccaagttctaatcacctctttgagttactcaccactgaattttcccatatatgcatgatatatgtgttaataaaattcagtttttctctttttaatatgtcttttgtcagtatcattgccagagttccagcgaatgaagctaagatggtctgagaaaaacaaacaaacaaacaaacaaaaaacaaaaagcaaaaaacaaaaaacaaacttctctacaccaactaaaggaaaaatctctatctctactacaactactgctactctcggtactttacctctcacaccagatgtatgggattttttccctccacaacaattgggtatcttacaattcaattccattctgacattatctaccttgggttagcacggactgcacaggttaagagctcggtttcacaagactgctctcactccccacttcagatgccaattgcaagtccaggttgtcacatgtgctactgactgcccagcaataaatcagaggttcccacgatcccctcctcaggtttgataatttact

SEQ ID NO: 57782 - DNA, 696 bp, Homo sapiens
tccaacagtttcccctttccttaagtgatattagctctgcttcaattgtttgcccccaaagaataagtgttgggtaccagctaatcaggaaaccaagaaaaaaatcatggtgactaaattgaccaatcaggtcataagtgaggacagaagcttggaagaggcccagactggggattcctggaagactgggcaaatattgtttgggtgtcaggtgtggcagtgccaagagagccaggcgaaggtcgccagggctgcggcatttagtgaggctgactaagccccagaaacacagcatcatgaatggcagtctcaaagaatgttcaaaattaatgttcaaaataaagcaactaggtcacagatcacagcgtatcatgctggaatattctaaagaaggatactgcatttctcttccctctggctgtgtgctcacttttcacatgcacttcttggtttcattttgtttatagctgattttacagccctgctcatcattaaaactgtttccatctgaattcacagactcaaaaactttcccaggagccttattttcataaattcacttagaaagagctcatgttaagttttatatatcattttaaaaatctaaagttaaaaccccacataaaattacatcttccatttaaaactttattaaagataattttccttagtaaatactgccaggcccatgttacc

SEQ ID NO: 57783 - DNA, 1750 bp, Homo sapiens
tccatctacaataaaatgcatacatacattatggaatatccatgtgatggaaatcaattcagcaatgagaatgaatgcaacaacatggaggaacctcacaatggtaatgtggaacaagcacagaagacacaaaagaaaaggaaatcaagaaaaaccatctatagacaacgatatatgactggaagcaggacctgagctccaggaaacaaggctggtactagaaagccacaggcaatcccccagtggaatggatcatgtaaaagccagcaaagtagaaggtgctagataagtgctatgcccccatggggcattccggggccgagacccatcagtagtcctgaacacttgctgcttcagcacctgggacccatagagatagtgagactatttccaaacacccgatgaaagaagaaaagagagccaagcaactccgacaagcttctcattgtgttctgttaaagttcctctggcttacaaggatgaatggtccaattaaccgagctcaattaaaggcggagactatttttaaaattcccagaagagacgtatggtgagatcacggcagacaggaggcaggaacagatgcagctgtggacagagcagcgagggggggctcacattgtgaattttagctccagattgattgcaagaacaaatcagcaatcccaagaggacccacagaccctcttaaggacccaggagaccccccacaaaactgtgaatgccccaacagtggaagtgggaaagggagaccctcctctcccaaacacgtcccccacaactggagaagctgaaggtctgtttgtgggagaagtttctgactttacctggagctgagtcaatttggagagccaagtgaaatactggggtagaggaagcagcagaaaggccctgggagctcgcgggctcccctggcaggccgttcctgcctggaaccacagggatccaatgggagagaagcaggggataaaactacacagagagaaggaaatctctagctgaactttgtaacagtttgaacggggtgagaagcctcctggccagaactcgggggagggtgcaaatctgatgtgcagactccacaggctagggaagaaccaagcccttttcttatgcagctgggaggcagacagcctcatatcgcttacggtctgggggttgttgaggggggcatggtgggagtgagaccagcccttcggtttgtgtgggagctgggtgaggcctgtgactgccggctttccccggcttccctgacaacctgcatgactcagcagaggcagccgtaatcctcctacatacacaattccagtgacctaggaatctcactcccagcccccacagcagccacagcaagacccgcccaaggagggtctgagctcagatatgcccagccctacccccacctgatggtccttccctacccatcctggtagcaaaagacaaagggcatatactcttgggagttctagggccctgcccaccatcggtccctccctatactagcacagatgaagctctctggaaagcaccacctcctggtaggaggccaaccagcacaaaaatagagcattaaaccaccaaagctaagaaccctcatggagtccattgcacaccccagccacctccactggaacagacactagtatccatggctgagagacccatagacggttcatatcacaggactctgtagacaacccctggtactagcccagagcccagtagattcaatgggtggctagatccagaa

SEQ ID NO: 57784 - DNA, 2362 bp, Homo sapiens
gaagacgtaagtcaaaagcccatgaattgttgccgattgctatggtttccttttctgagtcatcagagacacctgtcaagaggcctcagcctctcatccagagcaggcttttcaagctgccaacccagtctcaaataatcattaccataaacacgggttcctattacacccgttgcaaaaaggcttaaaacgccgataatagcgcaccaatattatttcaacagttttgaccggcgcgttaaaatgaacttcaatgctgagccacattataaagggttgagtcaagctcctgattgtgtaagatagcatttcccttaaatgagcacttctcttctttcctcagaagctaggcttcttttcaaattaaagaaaatactccacccctcaaaaacctggcatattctcggttccctttacgcttattcacaccagaaacgctgaatcatgactccgaggttgtaaaagaaaaactatttcggctggggccccagggtccctggagaagcctaggctctgcgttacctctctctgcaccttctaaagtctagatccagagaagtctggcagattggagagcctctgggagcagccaagggtgcaaggcgggggctggggggctcgggagagttttctgctccctctcctgaacccacgcagccctgtcagctcaaggctcccgcctcgtctcatctgaacgaaacccttaaggggctgatacacttctcatctgcaaagctgcccaacagcctccgagaaattctctacttggaagcatcgccaccaccgccacccctccggaaccctctgggtccgcgctagtcccacttggtcacgatccggcaggcgaaggggtgcggaggcggtttcaccagcccgctcccagccctgcctcgagagagaagcccgctgagagggcagacagttgagaaactcgatcccaactccccagccggcgcctcccgaaccgccccgagagcccagattagccgggcagtggatcccggagcaaagtgccatgcacatcctggagaggagggaggcgtggagggaaagggcggcaaaaatgaaatgcccccaagtcagtcccgcaacttctcccggtccgagggacgggcggagggtagaggaggcagcggcggctagcgcgaggtgagggactcacttgaaggtgaggacgcagagcggccggtaggacttgtggctggtgttctcggccatgcccttgccccagaagtcgttggtgaagatgccccagcggagcggggcgccgggccgcacgtcggggttgttcacgatcgcccacacgtcgtcgtgcacgaactcgccctgcagggagcggccgtagcacaggcagcttgccccggccagcagcgccgcggccccggccggcgctagcccgcagccccgccgccgggagggtgtgcggtccccgccgccgcctcgggcagaggtggtcaccaccatcgcgccgccgccgccgctgctgccctggcctctcccgggcgtctggcatcctcccctaccggggccccggcggcgcgcggcgtctgcccggaggggggctcgggcatggtgctgcggcagctggacccgccgcgagctccccgcgctccgccgccgcctgcgccgcggagttggcccagctgcaaataaacagcagtccccccgcctcccccggccatcgccacctcctccgccccactgcgcatgcccgctcgctctctcttccaccgccccccaatcccgggacgcgggccggttcccccgcacagcccggcgccctctgcccccggcccgccttgcttgcaggtggaccggggttcgcggcgcgcggctgcccgggagctgcggggaaggacaccccaggttcccacttgcggtgtccggctgtgctcacccccacgcccccgcccccatccttctcccccgaatggggctgggaaggggcacatctggcggacccctcccgggggacccaggagggtttagcaggtgcgcagtctggaacccccacacccaccttccagggagaaaagtgccgctgcttcccgggaagttcccggcttttcagcacccgggacaacagcagcggcgcccggagagacgctctccacccgccccgcgctcgcgtccagtcgccggctctgtgctctcctgcccgggctttctctcacccgcccggcgcggcgtcccgcttggcggaggaacccgcggggatagggagcaccttcctcaaagccaggagaaggggtctccctggacaaggacatcctgctcgccctgcccgggtgtgttcagaggcgccaccggctctttaactttacagcccctttcttggcccgcacttacaaaaagtaccagg

SEQ ID NO: 57785 - DNA, 612 bp, Homo sapiens
tttcactcccaatcattgctagactgggttccagttttctaaactgtgaacaaaccccagagggcagttgtgaagattaaaagaggtaagtcaagagctttgaagagtgccatagcaaggtgtgctcaacacgttagctaagataaaatattgtgatggtgatgatgaagatttttctctcttttttcccttagcaattttctcactactgccatttctcgccattgtagtaacatggaataactactactaagcgactattaaatatctgcttttcaattcctgactactgattgatttattgatttactttgaaggagaatgtggttatcagcctaacctgcatttactctggacaaccacagtttattttactcacgattgcctcattgcagttgcaggattgagactataaaccttctcaattcctggtgccagagaatgcgtaaggaattctggccaatgagtcacacagctgctctgttgtttctaatttggctgccaggatcaagttgcttctcaaagaaactttaataacttttctttccaaaacgttaatcttcatcatctcatggcttaagtgtttaatgattacttcataaacaattttca

SEQ ID NO: 57786 - DNA, 464 bp, Homo sapiens
atgatgggagggtctaccataaaggtctctgagaggccctgggaacattttccgcgttgtcttggcaattaacatttggctcctctttacttatgcaaatttctgcagcaagcttgaatttctccccaggaaatggggttttcttttctgttgcatcagcagcctgcaaattttccaaacttttatgcactgcttcctcttgaatgctttgctgcttagaaaactttccccccagataccttaaatcatctctctcaagtgtaaagttccacagatttccagggtgggggcaaagtgccaccagtctctttgtggagcaagagtgacctttgttccagttcccaacaagttccacatctccatctgaaatcacctcagcctggaccttactgttcatatcactatcagcattttggtcaaagtcattcaataagcctctaggaaattccaaactttcccacatc

SEQ ID NO: 57787 - DNA, 1438 bp, Homo sapiens
caggggaactgccctttataaaactatcagatcttgtgagatttattcactatcacaagaacaacactggaaaaacctgcccccatgattcagttacctcccactgggtccgtcccatgacacttggggattatgggagctacagttcaagatgaaacttagtgggggacacagccaaaccatattaactatatagcctgggtgtgtagtaagctctctactacctaggtttgtgtaagtccgctctatgatgatagcacaaggacaaaatcacctaacaacatattccttagaacatattcttgtcattaagccacacatgactgtatctttatttttctgaattcagacatccatacacctattttcactgtttcatgacattaaaaatgcatctttaaaaggactgccttttatcaacttacatctcttaaacatatataaaaaagaagtttttcacaattcatatgagtcttaaaattgtattaaagagtgaacacctaacacattaattactagttgacagttatttctttcctagaaaatccctctaagaactttaagagtttcagacgcaggaaaaaatagggtaagactgtttctcccacaactctcggcattcaattatttctacataaagatatttagtacatagtgaagacctaaatctataggagtgagaagaatgacccaaatcatccaaaaaaaaaaaaaaaaaaaaagactgtagtgaactggaatagacaggaaatccccagcattccttccaatgagtcactttttaatatagaataccaaagttctcctgttgtgaaccaagataagccaatttgaccatctgcaaaaggccaatgcctttgtgaaacctgtagcctctggccatgagtcagttgagatataagaatgaaagaaagtcttagacaaaattctgctggaatggaaacatttattagcaagtagatacaaaaagtcctataccacctgcttttgtaagctcaagagcaagctcttgtaagctcttgtcagcctgctctgccttcaggctctcttacaagaatcttgaatgacagattcactctgagattgtccagtactctgaggcagtaccagctcgccttctagtcaaatctgagctccagctctatatctataaggctgctgggcctttctcttttaagggctatggtgccggtacactcttgccagtcaattgcttggtttgcccagtacttatttcaataatataagattattttctaacaaccttcctactgaggaacatactctgggatggattggaagtgctcgtgtagactctgtgatgattaatttcatgtgtcatttcggctagcctatgctgtccagtggtttggtcaaatgcctgtctagatgttactgtgaagttattttttagatgtgattaacatttataattagt

SEQ ID NO: 57788 - DNA, 2058 bp, Homo sapiens
catgaaccataatgaaatttgccaccaaatgtctttggatgtttttaatgagaaaaaatggttgtgttggtaatggcccagctgttttcttgcctggcactgtgccttgcctacaataggtactcagtaatagtcagtggaatgaagtgagagagggaaggaataagtgaggtcatgaatttgcctgcctgtgtctcaaccttcctgtatctcagcagagaattctatgcgggaggggctgtgatgatggaagcaatccatcctccctgaggatttagctttttgctgctcagagatgagttaacactgactaattacccagctgagtggtgactgtgactcataagtgaggggcagatggaatttagaaagcagaaaaaccaggaggggaaagttttcaagggttaagctgagggtgaggagtcaggtgggcatgcgagaaagacagaaacccagctgtggacctgtgagccgggggctaggccatcccttacacagtgccaagtagtacacagacgcagagcttaggaaagtgtcagcgaatgtttccacaagtgttccttagtcacctcaagtcttctggacacattcatcatcttccctcccatagatggcccatcactgttctctgcagagtgattcattgtcagggtgaaaatcttaggaaattgtcttcacacaaaaaatctgctccctagctcaaaacattcagtaactcctccaccccaggagacacattttttttctcctatccatagtcttccatagtcttttttttttcagtgatttgtttgatcacatactacatatattaccttcaagtctgtgcagcctttgtctttcatcctgttgagcagcttttccctcaaccttcttgtgagcttctgtgtaaatcactatcattctctttccaaacactgcatttgaacttagtgaagtgtagctgtttcttcttttccttccttttttttttttttttttgaaggggtgcatattctgaagaaaagtctacaaatcattcctctatctaattcaaaacccaacgtgtcactttacagttgggtttcctcaagaggctctgccgtggacccatggaggatgggatgtgcaggtcctgaggtcactctgcgatgtgtcagaggagaagagtaagggtatctgggatcatggggcaggattaatggagtccaaaggaaaaaaatggcaggcagagagggagaattctgtgattggatgtgtcagaagtgggagaagtatgaacaaactctgggagtgactaagagagaatctgacttgacacaagaaggcattttttaaaaactgaacatttttagagaagctataaattcataggggattttttaatatggcaaagatgatttagccaatgtccattcacccaggtccttgtccttctgtgtctctttttgcacatccattcatagcaaggtctctggtttgtttattctgttcttcccatttcaatgagatgttaagtatgggcaagtcatttcacctctgagggttcccatttcctcagctgaaaaatgagggaaatggaggattgcttgctaagatcccttctagtttgtcagttaattgatgttatcatgacaggcatcccctgtcagatccccagagtgacaaagtggatttctcaccacttattctctgatgagcccaggaaccagtcccctccatgttgggggcagcccctgtgtgcatgtggagttgagctgcgtggattccagtgcaagactcccaaggctgaggggagggaaggttgtggaggggagtgattagaactgacctgagtctgaggacaggctctgccgctgcccagatgtgtgagccctctcaccgagcctccctgctccatcatgtgaggctggaccacggcaagccacatgaagcactcagtacagtaaccagcacatggggagcaatgaatacctgtcacctgtttccatagtctttgtaatgatcatcatcatcaccatcatcatgaaattgtcacagcttaaatccaggaatactaagaagggctcctgtctccat

SEQ ID NO: 57789 - DNA, 1599 bp, Homo sapiens
tgatgtgtcttagataaagcagtatcaccatgaaaactgcctattcttcccagagcactctcccaacagcactgcccagcgctccgcaaaactcggccaatcggtgtcaaaacagtcctgccaacccgacaggaggaggcggtgggcagcgtgctccacagcaacacctaaaaagggctgggtttggaaaaaagctgaactcagatttgaactgtaagtaaaattcccacctgctccccaagtccgcgcacttaaggaaaataaatcacaccctgaaaacactagcacaggttgcaaaaactgcttcttgcggaccaagtaggcagaacaaactgccctggagaagggagacgacacgaaaaggtgcaaaggtggccaacaggtgcgcgagctgttcggcaaagatcctgggagccctgctccactggaccggggggcagcggggtcggagagcgggaccagccgtgaggcgtcagccccagcccggtgggggtgaggacgaggggcgccggggagagggagcccggccagccggcaggggcgccccttcggcggaagagggtcgccgaagaccctctcctcacctggttgagctcgttctcggctgcaatccgcaacttcgggtcgatggtgcccttcagcgcctggatgatccggttgaggtccatctccccgggtgggggctccgcggcccccggaacagtaggccggactgcagctttagttttcttttgaccctctcagcctcctcttccgcgacccctggattacctcacaccccaccccccgccaccgtcgccacctgcggccacttgctgcgccactctgactccgcgccccctgtcctccctttttcccccccacaactcgctctccattcaccgttttacgacagccggtgggaggcgggagaaggaagaagaggaagcagagcttcctttacggcggcctcttcccccgggcgtgatgctatgaccgcctcccgtcggcggccgccatgctgctgtacggaaaacggcctaggcttctttcccggaaaggaacccgcgctcccgaactcaggcaggcggccgctatgcttccgtacggtaaacagcctcccgcctcttcccaggtgaggaaacttgagctggccgggagtctgcttacagctgcttccaaattaagcatatctggatggtgtgacactttttgttagtccgagaactgtatgggcatcgcaactgggcctgttccaagatagacttgttgggaccttcaaatcatgtaccttacaggaggacagggttcctccgtgtgtgggagtcatcgttcattcattcattcgctttcactgaacatttgttaaacatatatttttgaaccagagtactaggatttttaggtaccacattataacaagatgaattccatgcaagttaatgtgaaggaattcacaacctgatagatgagacaaatataaacaaaaaaaatttacagtgtagaaatgataggggagtgctgggaagggaagagcgtggtccctttaaatgatagggatgggcgaagtgaagtgctgggtagaggagtgtgtggtcccttgctagggctccacgccca

SEQ ID NO: 57790 - DNA, 1920 bp, Homo sapiens
cagacaggtactctctcaacctgcaggaaccccgcgtttattctcagttgtttggtttagactagcccaaaaccgcttacacccaaccagtttaagagctcattctagcgagcccttcccgtgccctaatcagtggcccttgcgcacttacgtatccgtctctcgacctccaagcacccgaggtatccctttctccccccttaggagcatccccaaaccaaggacagaacaggccccatgcacgccagcgcgcaccccctcaagtctccgggggagcctgagcgaagagcacctctcccgagcggccacggagagccctgcaggcaccgacccccacccttcccacagccgccccgggtacgcagaagccgcttctgcaaggccccgggggaggctgacctgcggaaaacgcaccgaccgcggccctcgggagccccgccccgccccggggatgccaagccgcccctccacctcgcagcggcgccggccgcccagacctgcccaccctcgccgggtcagccgcctccctccgccgcgccgaccgaggccgccgcagcccgacttcacctccccaggcagccgaggccgccgctgccgcagcccgggcccgccttccaaagcctgggggaggcaggagcgctgcggaggtggaccggcgccaccccgcactcgcgtctcctcctcctgtctcctccctctcccctcccggtcctcgcccgcggcctctgcggcgccagagacccagccgactcagccgctcgcgcccaggcccgcccaccgcgccgcgcgtggcttttgtaggccgcgccccgccccggcccgctccgccctcggccgccccgccaccgcctccttccggtgctccttcccggctgcagctggccgccagcgcttgtcgggtgttagttccgggcccagcttgggctggtggtaggtcgggagagggcgcggtctcccagcctttgcgcagattgcggggcaccaggtggggccgaggcgacgccgaacgccggcaggccggaaaccgcgcagccccgctggacctcgctgattgccggcggcaccggtggtttcgcgaccttgaacaggtgactccaatagctccaggagggcagcgagcccttcgcggaactaccagataagccatgcttgaggctgtcgtagcctagtgggtagtcgtgaaatgcagatgcgcctttgcccctcagatagcatctttcatagtaggatggggaaaaaacaccgtttccttaccggggaatcagcctgtaagagcagaatgccccaaatcagcatcgccataaaaacggagtaggtgacttcgcaacctgcaataataggattgagtttattcaagccgtattatttgttcatgtgacacacattaattgactggcacgcagagaaagctgtaaaaaatctttgtaaggttacataaaattaagagaaaagtctggaaatatgtaaaagtttattgaggaaaggaaggtgtttctgataccaaataagaaacacacacacacactcagcaatactttgccccaacatgtgtttacttattacaccaagtggagttttttaggtcctgattgtccctgacgctctgataaaaaatattgagactagcaaaagaacagaaaattcagaagaagaatcaaggaaacaaaggtctagttttaaaagccttggtcaacttcacacaaattaattttaacattacttaatacatttttttggcatctattatccgtgttcttttcggtccctggtgacataatgtaccctaatgttgcattttaactttgaatctctgaatcccatatgtgttcttcagggtcagagaaatactagattttccctttttctcattgtttataaacagagaaacgcagaagatgctgaacatgaggagaggaaggc

SEQ ID NO: 57791 - DNA, 964 bp, Homo sapiens
gtccctgcgcccctgcaggcctcgcggatcccccacttgtctcgacgcaggggacgcccacttgtctgacgcaggggacgtggctgaagtcagtcgggccgcccgcttgctgcacggcagccgtgggactggcacaggctcctcggcagcattatgggcagctggtagagcggccacttctgagagccggatgggccttccgaggtcgggccgtgccccgctgggcagcgcagagggggtgtgtagggcacgcgacttggagccaggtccagacccatcctggctcctctcagggctccttcccctgcccccattccaccccagccctgctggctgtcccgcaggacccagcgccgcggtagccttctctgaactgcggctcaggcggaggtgtcactcctgcctccagcccaggagggcaggtcaggttatgcaacgcgtgccgcgcgatctccccccacctccaacccccttttctcccgggtccacaccgcagttcccaccgctccgggtgtcctccccagtgcgccgcgatttttgtgtccaagccccagagtccctctgagaccaacccccagccagcacagacttcctgccttcccagctcgggtgagtagccctgaaacgcccgcccccgccgccccgcggccgcagcatcctctcgatggccgcgcctccgggacgacgtggtcccctcgagtagtacaggagctgcaagagaggcgcgccggggccagcaagctctagaacagcaggagcggccccagttgggaccccgggacgacgagtggccggcaacgcggcgcccgcatggcccaagcagtgtccgggaggggtcggggccccggactaggggcgcagcgaggaccgcccggaggctttcccttgggcagctaagtccgagtcagctctactcggatttccagcttccagccccggctctggtggggaccatgcctaggag

SEQ ID NO: 57792 - DNA, 1416 bp, Homo sapiens
ataattctccaacaaaggcttctattgaaccctacctgggtaaaggaaaccacaaccatttaaataatacaagaaaaccaaacccgagttacactggcaaaagtgaaaacaaagtgggtggctacaggactttgtaaacactctccttcctctcctctcctctgggaaaataaaaaccaaaaaaaaaaaaaaaaaaaaaaaaagcccaaaacaaatcaaaaaatgaaaactgcaagaaaagtgtcaaaccacaaaacaaaagagcgctccacagaagctcagcacatcttcatttggtgggcgctggtgccctttccctgtgggcggcgccagctcctttctcggctgcctgcccagctgctgggctggagctccgcgtgctgggtgtaggtcaagtgatcccgtcgcgggcgggcggaggtggccgggcagccgccgctgtgcccgggtctggggtgagctgcactgctgccctgggccccggctcccacgcctgtttcccggagctccgcggctccggctgcttcgccctccctctgtgggctgggctggggtcctcgcgagaagtcctgccccgctcccttctccaaatccacaggccctgtttctctggagacagggaggctcatacaggatatgtgcaaatgcttttattacaagctgagttgaaagacacccgtttgctctcgggtccttttggtgagcgccgcaggaagccgggctcctctctccccagaggcggccgcaggttcgcggcgcagggcctgcagtgccaggagcaggcaggggcctctgccctccccttcgtccctgatctcccgcctcctcctcacccgccgtctctgcgaactcaccctgggctgcggcctttcttccctcaaagcaggccctttacacaccggactccgcgtcttgtcccaatacaaatacatgaaaatgcggttcctcaggtggcgagaacagtgagcacttctgaagcaagcccattaggaacattgaagtaaatctgaagcctaacgccccggcgccctgactaccggctgccgagcggactctgcggtcccgcagcttccctgcactcgcggccctggacgcgcatctcccaggcttttctgcgctggcccctgccggcattggccaggtccccgcagttcactaaaggcaagagggcctctgcagggctccgcggggcgccccgctgaggacgctgtgggcctcgcactccacctcgtctcctgtgctgtcacaggcggaggccagcttctgggttgagacctctgtgaactccgggtcttcagcaaattgccccagtcctgaaatcaaaacctagggggcggggttggaggccatgaagaatcaaaggaacattatcactggagctcgactcctctagagggtggcagtaaggggcttttg

SEQ ID NO: 57793 - DNA, 1148 bp, Homo sapiens
gaactggccatgggagcttgggcaggctgtgtcgcatgtctaggctgttgctccttatctgcagaatgggagccgtgctcactggtggatggaggaggggacaggggacagactgggtggcatcccagggctccaggcattggacagaaggcatgtccagggcctgggccatgcccaaaacaacctagagcagggcaagtggcagagcccctcccaggctgctggcaagggccccctggccctaaagcagcccatcctcatcccaccccggctagtgactttgaaagagcagcttctagatgctcagccaactacacacaaaggcttctccctactgggaacaaagtaagaataacgccaccctcacgggaccaaggaagctctgagaggggatccatgaagccagcctcgggaaccagaggaggcaggggggcggcgagagggctgggcagcagaatgttggctcgcctgattagctgaccccacccagaagaagacggaggattctagttctttaagggaactggcagacttcttctctaggagccctctacctcctgggccccaactctgaagcagctgcctggcagagacagtgaggagggtgcagggagaggactttgccctccactgctctccagccaggacacggccccggctggcagcctttcattctatactgagccaagagacacacaccagagccccaggctggccatgccccaccgcctctccagccccactgggcacactggtaagtctggggcctctgcccacagtcagggcctatcgtggcctggagcccacacctaccacactgactacagcaggactgagggcactcatggtatctcatggaaaacaaactgaggcccaggaggaaaatgtttgtttaaaattttgcacgccatttctccagggccactaagccaggtccacttactttgattactctttagtgctctccttccagccatatgaggaaaacatatatgttttcaaaacttaggaaaatactgtattctatttttcctcacttgaaattacatggacacacctgcaactgtatgtgttttttaaaactccaagaactgtacaccaaaaagagcaaacttaaagctgggagttgtggctcacgcctataatcc

SEQ ID NO: 57794 - DNA, 3252 bp, Homo sapiens
taacaaggtcaaattcatttttaaattattaaaagaaaaagaaaagcttttcttaaccctccttaggacaacttaagaagggggagaaagaattgctggggtaaaactgtctcggatagggtccctgtttaactcaagagtaaatcctaatcttccgagtgcctgaagtaatggaaggttacaggaagaaaataaaaacaaagaaactgactagggtcatagttaccagaacaaactgcaccgccctaccacctcaagaaaccaactccccctacaccaaaacaaaccttgcccttccccgctccccccaccccctagaaacacacaaagaaactggccgcacgcacaattcgcccacagtcctcacttcccttagtagggcaacagggagccccggaacttccccacggtggtttatcgggcgtcgtcggggctgggtcccctggacttgcgggccacagctcggctggggaggaggtgctcgccgccctcacccgtttctctgaaagcagtaaaatgcctccccgctcctcccagggccctcgggtccccaccttccgtaaatcgtgcttccccctcgggcactccggtgactgccgagagagacgccgagccagcaagtaagaatgctccctggtggatttgttggtaaataagacatctcgcgtcgggaggaaagttcctgcgggggccgctcgccggggcgagggcgagggcagcgggaggtgaaccgcgtcgctcgccgccacctccctcacctgcgccggaacaacgggccccgcgccagcccggcccggcgcctcccgcaggccgcgcctcccgcacgccgcgctgccggggcttgttcctcctcatggctttgccctgacgtaattcaaacatggcaacagttcgacttcaaaggcgaacccacagacctcccagacacaggctcccgggccacgagaaaccggccgagcagtccgggccaagctccccggaaccctcggccgtcgcaacccccgacgccagggctgaagcgccgggcactgccgcctccctcggtcgcccgcccgcacgcccggagcggggaagcacgccgcctccctacgcaccagcatggcacctcgcacaagtagcgccgccaaagtttccccacgagggggctgagggacaaaagcccctcccgaaactcgcccgaacttcgagggcctccgacctgcacggccctacgcccaggcggcggccccgagcgccgggggcccgcacgggcacatgcagccctttgttttctgtccagccgggcgctgcctacgtgcagcatcagggatgtcggagcgtttcgcaggggccggacactggacgatcaccctgggtaggggtccggaccccgcgccccgaagagtccggagcctggccccccgaccctcccctcgggagcaggcccatttaatcaaagttttgcagtgtccttgatgagaaacgcccggagtatccgccccgcacgggcggagagttggcgactttcactctgctttttaaactggcaagacgccatcatcagcaaaccacattgtcctgccggccggacctgcccgacggcggccgcatcccacggctcacgcggggctggacattcggacaaggaccagggtcgcagcccgaagcacgtggtctgtcacgtagagcacaaaaagcagtgccctgcggagttcactgactcccgcggcgtacacaacgccgccgcctccatctccagccaagttggcttccctggccatcttacagcgcggacggccgcccataaacgggaagccctcgcggtgtcgcccacacctacgctacaggtgaacgcaccgggagcaaaacttcgggctccgaaagcaccccggacaccagaggctcttgggcgcggtccgaagagggcaggcgagtggaagacgggctgtttttaagcgaccgcgtgttgctctcattgtcgcatccgcatccctccggagttgagcaaacaacgccacgccgcgtgcgctccggcagagcccagcactgacccccaaaggccgatttaaagaccctcggccgccagctcggaagcggatggcaacttagtttccgagcgaatggcgtttattgtccaccctagtccgagggctgcagtcaactaaaccacgaggtttcacaacggcgcccgaccctgcccgcgcctcgcgcccacgcggacgcaccgaccccggccgctgcgcggtggccaacgagtcgctttcctctcgggcctttcggccgccgggctcctttccgcgagagaacactgcggcggagaaaagtcattgtcaccttcaacgtggatccctcaactccggcgactcctcaattatgcccaggctccactcacttccccgccccgagactttcggtttgcctcaaataccctccccaattaataaatacacactaaacacgagcgtaccaaagaacctggggtctgaagatcacgaaaacagcgctcccaacaatgccacctccaagacaaaacttcctgtgtgtatgtggaaggacggggggaggtgggtggaggtgaaaagagaaaaaaaaaaacactgaaatcaaagcctcgtgagacagttttgcactagaagcatggtgagagtcactcaccttccaaaagcagccgttccacgcgcaataatgtccccgaggtgcggagtgcacgccaggccagtccccctcaagcgctccctcctcctcaactgccttgtctagaaagatagtctcctgcagttctgcagttgctaccgctggccgggaaggtgtagattccgctttccctctgcgcacgcgcggctcccggcacaaaattctcttgaatcgaacttatttgcatacgggcgcgcgcacgttgcgggctgggagggggagaagtcccggcgaccgcgcgcgctcccgaggcctctattgtccttttaaggggagaagctccgcggcgcgggaaacgcggcggccagagggaaacgggggcggggactgcttactacggcggacgtcacataaacaaacgcccccccccccggctgcaggccgcggcggagagggagaggcgaggtgggaaagggaaaggttagcaactgaggggagggctgcgctgcttggcgtgttttccgcccccgaagttgttaggggcaccattgagcgctgaaaaattgttctgaaagctgcttttgcaaaattctcacacctgtccccactgtcggtgacagaggaggtggtcttgtaagc

SEQ ID NO: 57795 - DNA, 407 bp, Homo sapiens
atcatttagtcagtgtcaattataccctaagtattttatacacgttttcttatttaattgtcataatagatcagtgagaaaggagaaaaaaaaaaaacccaaactattatccctatagagatgtggcaactgtcacacaggaggattacctaactcgcccatgggtatagttaataaatgacagagtagacatttgaacccaggattgttatgacttcaaaaaccaatactctaaaccaggcatggtggtatgtgcctgcagtctcaactactcgggacgctgagatgggaggatggtgtgagctgaggagtttgaggctgcagtgtgctaagactgtgcctgtgaatacactgtactccattctgggcaacacagtgagaccccatctctaaaaattaaaggcaaa

SEQ ID NO: 57796 - DNA, 632 bp, Homo sapiens
aaaggaaatgtagagctctgaagcaaacatgtcaatgttgacatatgttagttctaggtgattaatacatacattgactgtttattgtattgttctttctgttctgtgatatttactttttttcataaaaatctctgatcagcaactgaggaaaaaaaactaattcaggaattatttcacctgtcacttgtatttattttctattttatttgcactgtactcatacacattaaacattttatttaacaaagttcactgctttgggtacttaatttatgtatgaaattaatgaccttttattcaaagcactactgttgttagaggaatgactaatattacagaaggtgatgactcactgcggtggaattttgctaaaggcaagacaaagctttatatctttaggtgggaataaattacagcttcatacaaacgcacttactagtaaatcaaagaggaaattaaaggcagtaaatctgtgacccgaatgcaaactactttaatgggatgcttttcagagattttccaggagtacaagcaaatccttttagatttgcagcaataaaaaaaatgctatgtggtgcttaaccatcaaaacacagcctttgcgattattcttcagggggaaacttttg

SEQ ID NO: 57797 - DNA, 3147 bp, Homo sapiens
gtttcttaaaaatgcattaaagtctaattgatggttttgttaacatcattctctctgtgcctaaagagtcctaggtcacacctaaaaggtacagttttagcttcagtaggcaaacggaaaagaaaaatacaggcttttttcctttcattagtcatcactgacagaaggcctccaagtgaccctggtgccacaaatgtttaggatctttagggaagaaaggagtctagaaaaataacaatattccttcaccaatctcgagaagaatctctccaaatctctctgcagacattttttcttcatatcctttaacaaagccattcttaacatgtacatgaaatcttagttgaagaaacaatgtgattacataattacacatacggaaaaacttggtattctattatctctccaaatttttttttaactaaaactagacttacagtttttgttgaaaatgttttgtgtttctacctccgaagaatatgaaaaaaagaaaatgttttgctctgaagctgagttaagaagaagatagccaagacgtgggttgatggggactgtattttaaggctgaacagttttgtttactattgtttattatttaatatattcttcccagtctccccacccccaccaaaggaaaagcgaaaaatttacgttagtgcaatcaataaggaattatttgtccaaaggaagttgttctgaaaggctatgacctaagtctttaacacaaagttcaggcggtagatgtcacttctctcacccatttaacaacaacaacaaatcaagattcagatcccgcggaggcaagcagaaaggaacaggcgtgaaaaatgaaatcagttgtttctccccggcctcctctcgacactgcgcactccgctgccctgcccccgcccatcgccctttagcggccccttttaacggcgtcgtttgcccagcacagccccgcactgcgccatcaaatgagtcaagcggaaggaccggtacccctccgggaaaaccaggcactaacacacggtgcacccaactgaatttaaactcgggaacagtgtaggcagtgtcaacaaagcgcggtgctgggtcccgagcgtccaaaggtccctgccagctcccagacgcggccaaatccacaggattccaaaaggtgacttggccggcaccgcagagcggcaggcggcgcagagggcagagtccgaccggtccccgccccgcgctcgctccgcacggccaccggctcctccgcggacgctaccccggcgggagccgagctgagtccgactccccgtctcccgaagaggcccgaaagccgcgtcacgtgcggggccgaaacttcgcggccggggccgggtggctggcgggtgggaggcaggcacggcggtcggggggcagcccgcgcgcccggtgactcaccggccgcctccgagtgcggctgcaagcgaaggggccggcgcgccaggcggggtccgtgcccttggggccacccccgcgcctgttattaataacccagcgcctggaggcgaaagccccggtgggcgcagccgcaaagcccgcacgcggaataaataacaatgtcattaaatcgcgcccgagcgccagttcggccagaaagcggcgggagggcgccaccgggagctgactttgtctggagcctgcaccccgcctcccgcgcgtccccacagcgtcccccgcgcccctgagggggctcagcgccgccgcagccctggccttacccgccagctcgtcaggctccagcccgctgtccgcgtcgatcccgcacagcacgaagtagtgcgcgaagcggcaggcggccggggaggagcccgagcccgggccgggcgccgcgcagctcccgctcatcccggccgcgctgctccaggggccgccgccgccgccgcccgggaaggctttctgcggaggctgccaccaccgctccggctgtggtctgtgcgcccgccctagggcgacactggcgcgcccatggccgcgcagccgcctctcgccgccgcagcctgcctcctcgctcggcgcgggggaagcggccgcgggctcgcgcgcggcgggtccggagcccggccgggtgggggaggggcgcggggggagtgtcggcctgagaggccctcgcagccgcagctgcgctcgcgagctgagagccgccgcgtctggcgcccgcgggtcagctgagcggcgctcgggctgtgggagcgcggggcgggcgggggcgccggggctcggcgcgtgcgacggagaggggtggggggcgcgctcgcgagggacggaggcgcgcgcttctaccgtgcgcgcgcgcctagcgggttcggaggccaagcctggcgtggggccgcattcgtgcccactggccccggctgcggcatcgagggcgaccctgcacacacccctcctcgccctggccagccgataagagggctagcctcagtgtgggggtctgtcttctaaaggggttgtcacccatccttatttcttttaatgcagctttggggaaggtgaacagccgctctgagatcatttcgcataacggtctgaaccatcgtcttttaaactgtgacctgtgtgggggtgcctgtctcactttaaggtcctcccttcccccagccgtcaccccatttacaggccatccttagtgacttagtgacaagtcaaccgtgagggggaaaaaacacaactcaatacccacaaagcgttgagacttctagaaggagtgcagtcaccaacccccgccttctgtcatttatcctgacattttccaggtcagtgtaaatagccaaggcgctccagttccgcagccctgtacccatccgatgttatcggctctccccgcaagtaacaatcggaggctaaagcaacaggaattagaccatgaactctgctcctcccaaaggcacggctttcttgccctgctcagctgtcttttgccttctcggaaggaactcgacaaccagttctttttcctttgaaagaaaactggctgggctcagtggctcacacctgtaatttactcaacactttgggaagcccaggtaggaagatcacatgagaccaggagttcaagaccagcctgggcaatagagggagactctgtctccatctaagtaaaaaaataacatttatttatttaaaaaataattttttaag

SEQ ID NO: 57798 - DNA, 1009 bp, Homo sapiens
caaatctttcttaagctttaagcctgaactatttatgaccaatgataagtatttccatcatatcttacaactaaagaaatgtgccaggccggtcgcggtggctcatgcctgtaatcccagcactttgggaggccgaggccggcggattgcctgagctcaggagttcggaaccagcctgggcaacacggtgaaatctcgtctgtactaaaatacaaaaaatcagccggccttggcggcatgcgcctgtagtcccagctactcaggagcctgaggcaggagaatcgcttgaacccaggaggcagaggttgcagtgagctgagatcgtgccactgcactccagcctgggctatgcagcgagactccgtctcaaaaaaaaaaaaaaaaaaggtaccagtgtgtagtaacattgtgggtgagaatctttgctctttatacataactgtttaagtttcagttttgtttttgcttttactgttttagctgaagcacacttggccgatgttaagctaaattatcagtagatggcaccacagtcttagttagctgaagatttctgggttttgcagggagtgaggattctagtgtcagttgtcggatgtttaggtgtgactcagtgacctatgcttaaaagtttgcccggttactaactgagggagcaacaagtacaaactgcagatagggaattgaaaaaaggaaacacacaaatttacacagacacggtgcccatagatttgttgcaagggcagtttggtagagagaagctagaaggaagctgaagctccagaaaacccaaaactacaaacttccttcaaaagtctagggagaggccgggtgcggtggctcaggcctgtaatcccagcactttgggaggccgaagtgggtggatcacttgaggccagaagtttgagaccagcctggccaacatggcgaaacctgtctctactgaaaatacaaaaaattagctgggtgtggtggcgggtgcctgtaatcccagctattggggaggctg

SEQ ID NO: 57799 - DNA, 1772 bp, Homo sapiens
ggtccagttgaaaggtggatatatgtagatccagactcgagtgatataggctgcaaataaattgctagtgaatttatgaattattagaaaagaaaggacattcattatgatttaatcgcagttgaatgtaggcagcacagagggcttatactgtgtctttttttttttttttttttaaatatacggtgtctattttgctcaccactctatgcccggtgcctggaagtgcgactggcacatagtaggtgttgcatagtttcagaatgaactttttaggaatcaaaattctacaaacattgcacacagatttaacgttcccttattttccaggtgaggtcagggcgccctttggtttcgcgcttctgtccctttaagaaagtggaggagaaagaaagcgctgctgggaaaaagggcggggccgcgaggggccgccgtccgtcccgccccctgccgggccgcggcgctctgctagagcgtggctcagttttggtagcgggaccccggaaatgtaaagcatgagcgggaacagtcgccagggcgagtgacaggcgagccctatgctttacttccgagggcggtgtcagcaaagctaggtaaggagacagggaggacggtgcctgcccctttaagatcgactccaccccgcctctggaggaaaatgacgccgccgtctacccgttgtggaacgtaactcttttcatcccatcagctctccttctcattaagagaaataccaagtggtcaccacagtcacatacttcataacccatgcctcatcggtgctgggacgggagagggaagcgccgatctaaatgacatggggtccaaatcccaaataatctctatttgctctgcgttacctttaaacttaggctgcgttgtgtgattcaagtgacagcctagtactgcttaacaattagtctagtgggataccaggccctgagagacccctacgatcccaggacactgatgtggggtaactaacacccactggaagtctacgctgagttcacaggctatgtatgacctgacatgcattttgacctgccctgtgttttgatatttgaatgagttgctgatgtttacaagccgaagctggccgggcgtggtggctcgcgcctgtaatcccagcactttgggaggtcgaggcaggaggatcgcttcaggtcaggagttccagaccagtctggccaacatggcgaaacctcgtctctactaaaaaaaaaaaaaaaaaaaaaaatacaaaaattagccgggcgtggtggcacgcccctgtaatcccaggactcgggaggctgaggtaggagaatcgcttgaacctgggagtcggaggttgcagtgagccgagatcacgccactgcactccagcctgggcaacagagactctgtctcaaaaaaaaaaaaaaaaaaaaaaaaaaaggtggaagctaatgtgtcaatatctagatttttttgatgattttgagaaatcggaggatctggcagcatgtcctgcctagcctttttgaactgtttgaaaacagtctccagcttgccacagcccctctgttattttacagccagcctgcatcactcatttatgatgtccagccccttgtggggatttggatttttgacccctaaatactttagtggatttaagaccatttaaaacatttatgcagaagagatccgaggtccccaaacaactgggtgtataagttgtgtttaagttgttcctcattctcatttattctaatccgggtgtttttctatatatatatatttttaaa

SEQ ID NO: 57800 - DNA, 1233 bp, Homo sapiens
ttacaggcatgagccatcgtgcctggcagtagcagctatttagacagggcatgtatgcctctactttgccatagtgttaactggttgatgtcaagtcccaggttcttagtgccatcaacaaagaattggacatgacacatacaagtagcaaggcagcaaacagtttgttaagcagaatgcaatcagcaacggatcaggctgacctgcgagtggtatcagccccagtttgttatagttcatggccttttatatgttttttcctcacttgcttaaccttactttgtttttcgtaagtgaattgctcatcctggcctttccctcattgtgcctaaaccgcactttatttctcataagctaattgtgcatccttgcttaaccttattttatcttttctgacaaaattgctcatctttacttttagttcttgtaaccaaattgctactgcaacccctttccacttattttccttatcttgcatgttctaactcattgcttactcccgtatctcttactgcttactgtcttatttcatatgtcctgtttctgctatcttgtatgctttgcttttggtattgcttcagctagcctatgtccaacgggtccccttcacccctgacttcctctgccattctcctgcctcagtagtacccactgttccttattactccaatccgaagatcaagagtcagctgaaatttgttatttcagcgtttctccatccctcttcgcttgtttggtaactatttagctccagtccaaattccttggttgaattggactttgagttttaccagagaggtcattatactacatttcaagcagcaggaaaatcactctatgatggagtcaagaggagacagtgactcttggattgagtttactaattttagtctttgttttagcagtattttgtcagtcttaattcgtggtgctcggtagtttctggaacatactaagtattcaatactttgtcagccgaaatgagagactgaggcatgagtctcaaccagtcaaggtttgttaagcccaagaaaaatgcaagtcacagaaaagtttgtggcctgtgctcttctaagaggtttttaggaggcacagtatttatacatttctttttctttctttttttttttttttttgagatggagttttgctcttgttgcccaggctggagtgcaatggcacaatcttggcagactgcagccttcccctcccgggttcaaacgattctctgcc

SEQ ID NO: 57801 - DNA, 530 bp, Homo sapiens
catttttttttctattttaaccgctgaaggaatatgattatacaatgccatactcaatggtggcagcatttaatttaagtaatggagaagaattaaacattgtagctggatctgtttctgtagtcgaggacaactgtgatgtaactttgaattaaacaaacaaaacaaaacagaagaagactatatatatattttttctttttttagagacagtctcactttgctcccaggctggaatgcagtggctattcagaggcttaatcattgggcactgcagccttgaactctgggcttttttttttttttgagatggagtctcagctctgtcgtccaggctggagtgcagtgactcatgtctcggctcactgtagcctccacctcccccaatcaagcgattgtcctgtctcagcctccagagtagctgggattttaggtgtgcaccaccatgcctggctaatttttgtatttttagtagagacggggttttgccatgttggccaggccggtctcaaactcctgacctcaggtga

SEQ ID NO: 57802 - DNA, 2251 bp, Homo sapiens
agataatttttgtatctttagtagaggcggggtttcgccacgttgcccaggctggtctcgaactcctgagctcaagcagttctcccacctcggcctcccaagtttaatgtaaaatatcagatgccattgtttcagaaagccttcagtagattaaggagattgttctccttatccttaagatgtctattttttacatggcaatattaacggactgaaagctcctggagagacgcaattgcccttgtaacttccatttccgtacaatttctggtaggaaataataataacaataacacttagtggtgtttattatttgctgggcatccttataagggttttacatgttttaaatttatccctcaggacaactccatgtgatgggtgctattatcacaaaaattttatagataaagaacctaggcacagggagaggttacgttaccggtccatggtcacgtggctggtgaatggcagagccgggggctgaacccagcaatctcagccagggatccgtggtcttaaccactttgttacctttatcccagggtctgtcaatgtttattccagttacaggggtggaattctgctagaagcttttgagaacctcatctagcgttgtgtttttttctaccaaggcttttagctgctaagagagaggccactgccagtaacagccggggcgccgagctgtcaaggctgacggaggaatggacgctcatcgcgcagcggagtgttggaggggcaagcccgccaagagacccactttgcacaactgtcctcagccaggaaacgacagatcaggaacccagggacagaaacacacgcggggcctcttcagaggtcggcggggggggtgggaaaggggcggggaggaagagcagcgcagggcctggccgtttggaggaggtgctggggcggcgcgaagggaggcgggacagggtagactcacagatccaggagctgactgacccgccgtgggcgaggcatcgctgcagcgtctgaagcctcttccgcggtcccagggcctccagaacccagccagggaccgtccgccaactcccgcccaccgcgcgacgcgtaggtttttgtgacgtcacacggatttttccggtgaccggggcgtggccacgcttcggactccacaaggaaagaagagagccccctttggggcggagccactgagggctgcgcggaagaggctgggtgtgataaactataaagaggccctaaactcggatgcaacgtgacgggagttgtagttctttcacctggcgggcgtctgctccggttcagctgcaggaggtttcttgggagttcagcccagcgcgcagccccgccgcgacgccgcgagccgagaactctcctggggcgaagggagcgctgagaagtcgctactcttactaaaaggatgcgttggatgctgggccatacccttggcgatgcacactggagacccgctcggatacggactccattaacatcaaacggagcgtgttagaggatccgagtttactgagcactttctaggaagcgtgcactgagctacgtgctttctaggccttagttcaatacttaaccatattcattataatccggtgaaatcgtaattatttagccttattttacagatgaggacactgcgtaccaacaagtaacctcactaagaatttcgtcatggaggagaagggaacctgtattcaaattaggaaggatcctgaagaaagggcacctttaggtggaattttatctttggttctgctgcagagtacttgctgctttttagtgctccctccacccccctcattcttccttgtagattagtctgttgtttgtatgctgagttccttttttaagctccttgaaagttggaacccactgctgttgcctgttcaggatgctacacattgaatcaacatggatttattaagcgctgaacgagggctagggatcgtgctgggtgctgaggattgagtggcgaacacttgggtcagacaagtaaaagggcaattagaataactgttaaatgcttagatggggttagttctatggaagcacccatgggggtgggatacagatcagagagaaaagggtggtctgcaaatagtttgggatggctacactggagagtgatcaagagtgagtgtagggcaggggttggccgactttttccataaagtgctctgaaagttgcagattccaggagaagtaactattgtcagacccagacaaattggagcctagagaccagaaa

SEQ ID NO: 57803 - DNA, 858 bp, Homo sapiens
tcatgctgttaattcataatgtaatatatgagctgtatgtggacccatgttttaaaatacaataaatatatataaaacaagtatatcttatttatatgaatgtgtgctttcacaagaacagaacggagctaagccaagtgagcccctactttattatcctaccatgtgtaggttattttcaaataggattgctcttaactctccaagtgtcctttgagaaaataacacgtctttttatttagtttcttttcatagcttgttttataatatcacactccaaattggaaataacagtgcccatgctcatggattgttatacattgttgaaatttcccattggctagaaacacttgctttgtttctaggttagagatctgtgactttcaaattctcaggagtctgagtcatacaatggatgactcaggatccaagcaggttaagagttgggcaagttcaaacaggagaagcaaggagatgttaataaaggagctgttcccaaaggtgtggacagagttagggcagagcaagggtaaaggtagttcaataccatagcgctacaatagcaggaagaccttacctcttctggtcctggagggcaaaaccaaaaccttgccagagtgaccacaggtgaagccacctgaaaggaactgtggcctttgaatttgtaaccgcctaaggggttcaccttgccccctgcctagaaagaactgattcatcaagacgggggaattacaatagagaaagagtaattcacacagagccagctgtgcgggagacagttttattattactcaaatcagtctccccaagcatttggggagcagagtttttttttgtttgtgtttttttttcagagtc

SEQ ID NO: 57804 - DNA, 684 bp, Homo sapiens
catcaaggacccagctctagagagtcctaatatttagaagatgaggagaaaaaagaggcaggtactagcaaggagattgagaagaagcagccagtgataaagaggggaaacagtgtggcttcaggaaaacttcaagaagaaagtgtttcaaaaagaaaataatggtcagctactactgagaaattaactgtgatttggatagagaacaaatcattagatttggcaagataaagatggttggcaagcttgataggggatgttttgtggcagatggcaagtgtcggtggctttatccaattctgaacaggatatttgctagcatgcacacaagaccgtaattcctctttcataatgaatgctactaatgttacacaatgtcagatgagtcacttgacaatgtaattttccagtagcagtgtgttttgctttctctctgagcatattttgaataatttcacattaggtttttacaaaccttttgacagcagtaagaactgtctgttttaggatataagaagtgcaaatctgaatggatatctagttttggcctctttctgactttagcaaaagaattatttaattttttactatgctgttttgttttagaaatgaaaaatttaattggtttaccagtgctcagtgttttgttagaaatcaaaatgaaggtcgggcgcggtggctcac

SEQ ID NO: 57805 - DNA, 1225 bp, Homo sapiens
tcccaaagtgctgggattacaggcgtgaaccactgcgcccggccttacctgttaaattaatgttagtggaaacacattgccaaactcaatttttcaagtacatgtatcttcaaaatacaaatatacttcaaagctactgtactttgaaatatgttatcttcaaaaatgacattatcactaagaatataggaagccttaagaattgaatatggtggttcaaaattagtatttttcctctttgtaggggaaatcacccaaaagtaacaatcagaactgttaccacctgactggttcttgcccactgcacagataaaaccaaaacactgagccagcaggagttgcagcagagaaagagtttgattattgcaaggcaatagagtgaggaggacgggatacatttcccagatccacctcaccaagaattcagaggctaaggtttttaaggatgatttggcaggtagggcattaggaaacagatgttgtggattggttgggggatgaaatcataggagtgttgaaactgtcttcatgtgctgagtcatttcctgcaggggagtggtcagaggaccggttgagtcagttcctttgttgcagtcacggtcactgttcaagctggtgtcagttgattcacctgaaggcaaagtctgaaaaatatctcagagatcagtctcaggtttcacaatagcgcttgtgactgcctgttacataactcctgagcaataagcaattatagaaaagcaaacaagagaacaatgatgggctatcattcaactacgcctacagcttaagaggtgagctccctggtgattgaaactgcttgcactcctcagttgatccaacttctggaaaatacaaaggcagtctgcatgacttaaagatcattgtttctttttctttttttttttttttttgagacagagtcttggtctgtcgccgaggctggagtgcagtggcacaacctgggctcactgcaacctccgcctcctgggttcaagcgattctcctgcttcagcctcccgagtagctgggatcacaggcatgtgccaccacgcctggctaattttttgtatttttagtagaggcggggtttcaccgtgttggccaggcagtggctcaatgcctataatcccagcactttgggaggcagaggctggcagatcacctgaggtcaggagttcgagaccagcctggccaacatggtgaaaccccgcctctactaaaaata

SEQ ID NO: 57806 - DNA, 1170 bp, Homo sapiens
agctacaaggaaatctgagaagggaagtttttagctttcctccttctctaaagaaggaaggaaaattgaaataagagttggaatgagtgacaggtgagctaacctacagaattgactacaagtaagtgattgaacaaacaactttaataatccaattattgaagggcaggactcaggtgtaggaatttagtggactatttgctatacatgttactcaatatctgttagtcctaagatcaaaattgatttttaaaaaaaagactcacaagtcacagtttacttagccttaaaaggtacacggtaaacaatgcacacagctaaacagcagagaccttctgatgtctggcaatgctgggtgcagcttccatgcccctccaccacacagcatgctcagctgcaagaggtgaggctgaagcgtgtgcagaagacttgacctctgggcagccaccctttccattctctacctatgtgtagtccatgcttgctgcatagcctctgggagaaagtgctaaatcacatgcctaacagggcagctgcaactcatcaatcaggggtttcacaatgaatgcttctgtaagccaggggcaatctgacctgctaacattccaagtttatcttgtatcaatacattctggggagcagagtggcaagaaggtaaatctaaggtcatatccccagggtccctgggtctggggcaaaagtttagaccagccaaaaattccttccttggtgggctaatatatttatctttctttcttcctcttgaattcagagtatctttcttcctcttgaattcagagtatctttcttcctcttgaattcagaatcaattgagagaaatacaggagtcaggataagtgagcatcaaaatatcaccttaataaagtcaactggaagatgtggccaagtgggcaggctcacactttccccagacatccccgcctggttgctggcacagctgaacaacacaggcttctcagcaaaggcagggtcataggaagcagatccactccctgtaacacacaggtctagaaaggtggaggaagggctgagctcagtctgttcttactaactcacatgtctgactgctcactcctatttccctggggaggggcgaatgaggaacagggagatactcagtgattctcagccaatctcacagttcaaagc

SEQ ID NO: 57807 - DNA, 604 bp, Homo sapiens
aaaatagctggacatgatggagaacgcctgtggtcccagctactcaggaggttgaggtaggaggattgcttgagcccaggagtttaaggctccagctgaccatgattgcaccactgccctccagcctggacaacagaatgagaccctgtctcaaaaaaaaaaaagaaagaaaaagttatgtaactttctccctcatttccttagaatatgctatttgctctgcctgataagctccctgccaccacatatttagttaatgactacctgctttctaggtctcagtgtaaatgctactgctttagcgttgctactcctgacattctagacaaggtgaggtcactgttatataatcccctaaaacctatcttttcccttcagaacacttatgatttgtaattatttttatttatttttgtttggctgggttttttgtttgtttgtaattatattttcttgttggtctgtttgctctagaccagagatcagcaaactccagcccatgggccaagtccagcctaccacttgttttataaataaagtttttggaatacagtaaaatgcattcatttatgtattgcccatttggctcctaaaatatttaccg

SEQ ID NO: 57808 - DNA, 1319 bp, Homo sapiens
accgctattttaaaaaagaaaagaggctttttgacatcagctgttgctattctatatgttatcttctttctgtaagggaaggtacccttatcaccattctggatctgagcctgaaatctggccaccttttcttcattcatgctgatagtgaacctgaagcaggaggctttttcaacactagcaagtggcaacagcaaaatggcagctctgatgaagacagagaatggaccattggcagttagtttttagaaaatgagtttctagattctcaacttctgtctatgctttttcttaaaagagatcttctatcatgctagctctcagatgttacccagtcctactcttccagctccccatttatatccaagctcctgctactgatatacacccactatggtgcattgcttatgggaggaggaacctccagggctccaggaaagatacatttctaaatatcagtgctggccagtgaggaagtggatgactctgatgatggagtaatgcatcttttgcaagttagatgtttcccaattctttgctttcaacaaaattgaaagagagctgagaaagttgacataccaaatttcattaaaaatcaacttttgataatcagtaactatgtgggttttggcatatacttcagaaagagttcaaataattgaatgaaatcactataataaaaccccttctattccattctacctatttatgctacaaggagtccaataaaaacaaatccatacttagataaagaaaggcctttttcaaaaagacttatgtaatgggggtggcagggggaaagctattgtgaaagaatactccactggagcaaacaaggttagaaggaacagagtatgggggaaatggaatcagagagtggcacattggacaatttttctttgcagtcagccaattctggaagggtcattaaggaggttgttccacattccaatgcttgtttaaactcaacagtaggccaaagttcaggggcctcaggggaaaagagaagcctaactagagtttggtcaggtcagattagcaggtattttgtccagactggtcagtgcaaacagttcatctaatcatttatgagataaaataatgggaatttggagagcctgtgttgtctttgtcttaggtaaacaagggggtcgtcatccattggtcttatctaaatcatatagggaagggtggatttttgcagtaagccattttcaggaccgcaaaagagtggagggatttttaaactattgctattttccaggagtatgatgctcaggtaaagttcaacattgccaacctttttgtttgtttgtttg

SEQ ID NO: 57809 - DNA, 1532 bp, Homo sapiens
aaaatgcataacctcaatctaattgtaagaaaatatcagacaaactaaattcagctactctctgtaaaataactaatcagcagtcctcaaaagtattaaggtcatgaaagacaaagaaagactgaggaactgtcacagattggaatagactaagaagacatgatggcttagagaaatgtaagatcctggattagaccttggaccaatgaaagaacattagtgggaaaactggcaatatttgaataacggctgaagaacagtatttagcaatgttaatttcccggttttgatcattgtactaggttgcgtaagtgttaacactagaggaagctgggtaaaagatactacaggaacgctactattttggaaactttgaggtaagtctgaaattatttcaaaatgaaaagttttaaaaaacatcaggaatgaggccatttatctttagagtaatacattttaaggaatctttagggtttccatttaggataatatttgccagacctcatgaaattaaatcaaaatctctgaggtgggagtgaggcatcggtattatttttaagccctttaggcgatcccaattgcagccaagtttaataacaagtagtatagacaataaccatcaaatgaacaccagtgtacccaccacctagtttaagaaatacccagttttgtttgtttgctgagatgtcaaggcaagaaatatctagttttaagaaatacgctgtagactcttccctgatcctgcctgcaaatttctccaaccatagttttcctcattctgtaatcaagtttaatttaatttaatcatagtttaatcaaatacacatgtatccttaaaacatatagttttaaacatatacttttatttttacacgtttaacttaatatgaatgaaaccaacattataaatatatttttggcagctagctcttttcttactcaacattatgtcaatgaaatgtatagattttaattcatgtagatgtagtttattttcattgctttcagtattttattattttgttatatcaggatttgtttgtccattctaattgagaacataagggctgtttctagttttttgttatgatacataatatagctttgaacattcttgtttgcctcattgcgcccacatgtaagagtttctcctgagcacatgcccagtaaatggaatttctgagtcatagggcacatccatttcaggtgttctagataatgccaaattggtttccaaaatcaatacaccaatttggagtcctatcagccgtgtgtaaggttgcttattgctccacatccttgccatcttttgattgtgtcaaacttaactccttttttttttttttttttgcaatatggtgggtataaaattatctcattatggtttgaatttgcctttccctgttaagtagtgagactgtgcttctgttcgtgtttctgtgggttgtatactcatgaaatgtatgtatgtgtttttcttccatttttctcacgggttgtttggtatttctttatttttttctttttttttt

SEQ ID NO: 57810 - DNA, 590 bp, Homo sapiens
cagtaattatgggtttcttacatcactgcccattagtcccctccagccaccagaccagactgattatttatggttttgcttgctttgcttttgttttctaggtggctatctcttaggaaccccagtagtttggacacacacacacacacacacacacacacacaggcaaggtcacagtcagatccctggcacgttaatttggccatttgcccaggagcagctggtagcaatccttgtgttccagcacttaaatttctcctctcaggttaggatctctgagaatataggaaagaaaaaaaaaaaggagtttctcctagtctctcactaacaatcaacgtagaagactcctgtgacctctgatcaccaaaatgtgtaggggtttcttctcaccagcaactaatcaatcaatcctgaccagttgggtgtcttctaaatcagctcagttctgacactatccacctggagatagcatcagattccacaggttgaggactcaattcccgagactgccctgttttccattcagatgccaattgcaagctccaggttgttttacctgtgcttctgactgaccaagctatacatcgggt

SEQ ID NO: 57811 - DNA, 741 bp, Homo sapiens
tcctggggactgcccagtctgtgggctgtaatgttgatggccactaccctcatgacatcatagatgacatcaacagtggtgctgtggaatgcccagccagttaagcacaaaggaaaatatttcaataaagaatcatttgacaactagaaaaaaaaaaaaaagatgtttatcaagacaatatgtgcaccgctgaacataggctcttatcagtggttctacttttgccctttgccctgtgatcgttgttggaccctaatcagtggttctgcttttgccctttgccctgttccctcagaagcatgtgatctttgttagactcttatcagcggttctgctttttgctctttgaaacatgtgatctttgtacctactctctgttcttacaccctctccccttttgaaacccttaataaaaacttgctggtctgagactcaggcaggcatcacagtcctactgatatgtgatgtcacccctggcagcccagctataaaattcctctctttgtactgtctctctttatttctcagccagccaacacttatgcaaaatagaaagaacctacattgaaatattgggggtgggctcccccaatagaaaggcaggaggaagttgagggccaggggtctaggatgtaagttaatcccgggttaggcaagagatggagaagagatttaaacgttggcttttaggtcctctatatttttattggccttttctaataagtccttaatagaagctat

SEQ ID NO: 57812 - DNA, 2107 bp, Homo sapiens
ccccaaaaaagaaagaatattctgtatgtagtttttttgttttgtttctgacagacgcaaacgcactcttctagtaatgactaaagacttcttcgtttaattcaccaatgaactaatctgacaatttatgtaacaaataaattcctataaacataagctcccttgcccctctccagtggcacaatctctgatttgccatcctggttgcaaccttcattactaagtaaacgcttacgtaaaccttaataatgagattcgggcaatatgattaaatattggtttatttgagtgcaaagtttgaggatggcgacccggtaggacacagactccaaaagatgggggtcagtgcttcgaaagggagaagtttgagggtcgtttacacaggcagggtctgggaagcttaacaggatgtcaacattttccatagaaggttaacgcatagcaatttgattggttcaaggcagtgtttctttttgggaagggtctatttaacattccacattaaggatgtaatagtcaagcggtcatttatcttattcaatgcgtattttatctcagatgccatctggtctgagctgggaacaagaaaataagggagttaatctataacaaaaggtcggcaattaagaggtcgtgcttcgtgatctggtctccaaagtcaactttcctcagggactttcagaatccccaaatagactatccactttctttcacacttatttgcctctaacttgttgatttcttttttttttttctgttttttaagggttaacaatctcttgggtgcactctgacttccatgcgctttatagaaaaaattggtcctgaggccagcagcaacagtcggtctcaggaacttgttagaaatgcacatttttcagccccaccccaaacctactgaatcagcagttttgctggtggttctcaatctctctttaacgtgccctctgggtgctgcggatgcacgctgaaggtagaagatcgctgcaggagatttccgcgtcgggcagatgaaagcgctctgcaagcccgggtgttatctgcgggccgggtccgcggcttctctggtggcactaggaccgcggcggcgcggccctcgcagccaccgcctcgggcgtgaggcggagcgtagctgttcctggatcctgggcctggctcctcgacccgcccctggaggcggaccccacttgacttaaactctggggcccgggaggccgccggttttctccccgcttgccggggtggtcctcttccctttgtcggtaagtgtgagacgagcaccccgaggtccctccgccttccggggtccgggcggggcgggggccgggagccgggagccagaggcactcgcggtccgggcctgcgcgcggcgcagagcgcttttgttctgcggcaaagacgcagtcgcgggcggccccggaacccgggcctcgggccccgccggctcgcgcgtcccgccgtccgcccaccggagctgggccgggccgccgcgcttgcttctgcccgccgcaccggggccggccctgggcctccgcggatgccgagccttgcaccggagggcgggcctcgctggctgttttccctcattgcctggctctgcgcggtagaggtcgcgagtggcgaaggctaggacgcattttgtcgaactgcgaggcgcggctggtgaggcgggtgggtatgagagctgcttatgtttttaaggctttcctgtcgctggagtgaaaaagaaaaatctttttttttttttgctatttcccgagggttctcctcctccccggccctcttaagccgaagcctcctggaacagaattgctgtactggcatctatctccaagtggtccgcgaacgcttctgcgccggcgatggtttctgttcctcagcaatagttccttgaggcatttttaaatgcacaaacgcatacccatcttaggtgttctcgagggacacggattccctaagcaaacgtccttagggtcctgagttcagcagcaaactttcggggaatcatttccgtgaaaacaatttatttgtagtacatcgagtgcatactgtcttaacataaggatgtgtatgagcttgaggcgcattttcatttagtggcgggcgg

SEQ ID NO: 57813 - DNA, 1496 bp, Homo sapiens
gcggactgtcctgtgaggatagtaaggttatctggtgagagtgttaggtggcccaggccagacttgggagaggcagggagagagggggacgacggaggagggcgccttggggtgcgtcttgaaagctttgggaaacccagcggtcttttgggggcaggtggcccaaaaagccttctgcgcgcccaggggacgaggaggatgcgcggaccgcgaccgcgatagttttgtttgcttttctcgggagaaagcgttccaggcagtttcctgagcttcggccctcgacgtagcaaaagagcccgggcgcccacgccgctctcggggtcttctactgccaccgggacaaagccctgggaggagctcccgcccccgcgagccggacagggcggaggctcccccgccgcgcgcgccccaccgcttcccagtcccagacccgtcgcctgcgcctcctcctggcgcgcctcacggtgcagcgggcggcggcccgcgcgcccggcgggaggcgcctcgggatgtttccgtctggtccttccctccgccccccgcgctgactccatccgctccccgccccctgctcggagccgccgccacgcgggaagggagggagccggccccgagactgcatcattccgcaccggctgctgcagggccagagggagcaggtggagcgagagagcgagccgcgagccggagcgcgccagacccagggcgagactgcagtgacgcggcccgggagacatggcggacgggcgtctctgaataagcagaatccggagcccctcgctacccgcggccgccgcagcccgggccatgccgcacggctgctgaccgcacgcaggggccggccccgaggacacatgcggcggcctttgccgcctcgcccctgaccctctgccctgttctccatgttgcatttctcgtcagtttctcgggcggtgtagctgccgctgccaccagagccggcggggcatcgcgctgctcattcatccggccgcactttcttttccgtttccacccatcccttcccatttccttctccctttccccgccagcttcgcatccatctcccccaccccgtaaccccctcctgcctccatccaccggggctatggccgcagaagaggtattgcagacggtggaccattataagactgagatagagaggctaaccaaggagctcacggagaccacccacgagaagatccaggctgccgagtacgggctggtggtgctggaggagaagctgaccctcaaacagcagtatgatgaactggaggctgagtacgacagcctcaaacaggagctggagcagctcaaagaggtgagttgcctgtcacctctccctttcctggccctcactccccccacccgcaaggcccactcatcatgatcaagaagtcataaaggaggtgattgaaaggactgttttttcttctagggccctttgttggtaagagaagattgaaagagtccattgtttcctcccccaagagaaaaat

SEQ ID NO: 57814 - DNA, 605 bp, Homo sapiens
aaaaggtgtaggtttgcataaaagaaactgatggaatttggatgcccaatagcagacccaggggaatgataccaggggaaaagatggacagttttgtgggtaaattagcagtgattttgattccttgtcttgttagctgctgatggagatacgtgtatcagcataatacctggctagtttccatggccggcaagagccagtcctgcagtgtgaccacatcctgtccattctgggtcttggtggcaagccaggatgattcaggcagttgggctttattacgttatcccttctttgccctctgaaagctgagttttgaaatagttaggatcttatacaacatctcagattcagcatgctgtgcaggaggtggggagaaaagggtacaaaagaggaaaatgttcagtgaaggtgttattacaatggaggggaatatgaaagtggaaattgataccttttcctcttgggatttaattaagtctataaaattaaggtgttgcaatacataatgtctatgatttttttttaccagctctaaatctctgagatggctgtgttttagagctgcatgttctgcttatttactgcctgtcctttacatttcaaat

SEQ ID NO: 57815 - DNA, 746 bp, Homo sapiens
agaaagcatgttctcatcctacaaacactccattttctccctgaattagtgtcctttctttgaaccagatgagacttcgctcagagctggaggctatggccccttagttctgtttccacagtgcttccagccctctccccagtttggaggcccccaaaatgaggcgcttatctctttgattttgtgaaagaaaatgcacagttcgtctatttggggcttctgaaagatgttaggccctgaagaaggttgactgggagactgagtggggagtgacagaccatgaccttaattactgaccttttgttatagattaacttccttcctattttattgttcctggcccagaccagatagcacttgagataaaagatcccttgattattacatccttaatgtggaatgttaaatactcccttcccccaaggaatcactgcctaaaaccagtcagattgctgcgactgtgcactaaccttgtgtggaaaatgctgtcatcctgttaagcttccccataccgtgcctgtataaacaatcctcaaacctcgctgcttcagagcactaaccccatctttttggagtcctcctgggtgaccctcctcaaactttgtgctcagtattttaatcctattgcctggatctcgatttaaagttgataattttcagagaattcttcattttctctttgcatattttattgtttcctttccatctgtttttcttttacttactgcctgaagccaagagacaat

SEQ ID NO: 57816 - DNA, 2202 bp, Homo sapiens
cacacctcttatttcattttctgtcccgatactcctggcaagatgtttagttcagtggagtaaggacagacttcggtgcggagactccagctctgcagtgctatgtgaccccactgtaggttcagcaccttggtttccttatctgaaatacttattcggtagttttaggacataagatcaagggttcagcacaacggcttgagacacatacgcgaccctcagagtgcgggtctgcgagaatgcaagcaccctggacatggtccagagtagctggacttcttcccgagggcactgcgtggccagcaggtgagcgcggcccccgcctcgcagcaccccaggtgtgcggccgcaggtgcgcgcccgcgcggctcccctcggccaaagggcgaggcagtggcgcggcagggcggggccggccagagcgaaccggctccggctccggggccgcgcccagggcgctccgctgggcacagcaagttcttggctgcttccccggccggaggaggcggcggcggcggcggcggcggcgctaacaggctgaaccctctgcgctctcctcccgcccttggggacctgctggcgattggctccagagaggaaggggtggaggcagccccggcctggcagctgcggtagcggctttgagtgagtgcgggagctgcagataccgagacgctgcgactgccgcaggagtcgccgcagccaaactcgccgcgacgccgggagggagcgtaccgggaaggagagggagaggaggcactcgctgaggagacgccgcagtagagggcgcccccggagtcgcgccgaacctgggcatgcaggcgacgccccccaggggccgctcgcggctggacgggagcgggaggagtcggggagcggcggtcgagcccggcaggatgagcgacgagggcggctccaacttcaggcgggtggcgatccggcggaagtccaacccctcctacctgccgcccggggtgccccggccctggagcaggcccgcgtcgcacctgggacgtgtagggaccgctgccttcaagggccaggtgccctcaggagccacaggtaagcgcctcggggcgcgggggaagggtggccccggcgcgtaggtgcgggtgaggggcgctcccagcgccctgcaggtgcgccctctcgtcccccgctgcggaggtaactggttcgggaggttcattgtggaaggctgcgctcggccacccactcccttagctatgctgtcccttcccccagaggaccttgggcaggaacccgcctaccgccgagcttgtcctggaggtcacttctcagaaaattcagaaagtacaggtagaattctctttttctctctaacttttgttaggatttgaaaagaccagttttctagctactgaagcttaagcggcttcgctaaattcctgctttgggcagccgtggtggaggcctaatacggtgaaggggaggctggtgtccgcccaagtctgacaacctaggtgtggtgagcaaccttcttagtgcctggattttcttaaagggacgcttgactcccaggctgactgtgaaaagcggcaaggaaagctgttcctaacatcagaaaacggaatcattattgctgttttcatgttaataggttcagatgtcagtaatgcggtgttttgatttctgaattctcattgaatcttaaagaagtcctcaaggtgatctattcaaggcgatctattcaaggccacgtaatctcccctgtcttgtaaatgtgttctcttctccccaggcgagtttgaaactagggatttcttttttctttgatttgcaaaacttctttaaaatcccctcccctcctttatgcggtaaccagaggtgtctggtatgtagaccagcttacgaggcaaaacctcatttgagcagcagaaatacaaataattctaattactttcacgcatttcattctgattaagcaaatatgacgatttaaatatgataaatattagagcttttaaattcccttttagtcctggttctgaacttgtagtaggcatagagcagaaaaacatgatgaattaaaaagatataactacagtagataagggcagaaattgtgaggtgagaaaatatgtaaacaagtaactgaattacagtgccttcggtcttcatttccttgtcttcaaaatgaggacactagtgtgaaacagtttctgaactctcttccagtct

SEQ ID NO: 57817 - DNA, 2041 bp, Homo sapiens
ctccttagggactttctcaaagtacccttggtggacataaggttatcctcactcaacggaaggacatatctgctgtcgggggaggacacagaatgacgatttcatttacctaggatattttccttctgtaaatgtctggaacaagttgtcactggacaccgtgatgtacagtgtagccctcctattagaataaataaattatgtggttggactggaatgctacaggcacactatgactggaagtggaaggagagagaatgtttatttaaaatacagcacacataaataataaataaaagtttaaaacttaatcagcaacagcaacaggaccagcctcccctgttccatttatggttcttttcaggaacacctgtatcttttcctaaggataaaaagtggcacaaggagacaaaaggctttggaaggaaagaaaatactttgttgtgactttgtgcttttctgaaacaagaaggcaaaacatgtgggcattgaatggctgcaataaaagactgcacagtgtccacacattggcaagcctcaggtttcagaggaagcactggagccagcagaatgccaaagccttgtttctcccttgaaccagtttggtgttacgcctggttgtgcttctcccgctttacttttactgttgataaatttcttaataagctttttccctatcccttttccctttaatcctatcgttaaaggtgtcttgggtctggtcttaaatcaatttggttatgacactaggtcccagaaaaaaagctgctatctcattagcagcttggtgtgttggaaattcatgtttgaaccacacagtgaacctacactaccagtaccattacttccctgcatataaaaaacaaaaaatgggggccaggcatggtggctcatgcctgtaatcccagcaatttgggaggccaaggcaggtggatagcttgagatcaggagttcgagaccagcctggccaacatggtgaaaccctgtctctactaaaattagccaggcatggtggcgggcgcctgtagtcccagctatgtgggaggctaaggcaggagaattgcttgaacctgggaggtgaagtttgcagtgagccgagattgcaccactgcaccccagtctgggtgacagagtgggactccatgtcaaaaaaaaaaaaaaaagggaaaaagaaaacaaatcacacagaacatgaaggggctgctgaacaatgcagcaggaatgtaaatacattctctttcgggtcagacgtttggccagacggctgattacaaaacataggatgacttcaagctgaaggtatgaaaacaaaaggttacacctcaaaacagaaatgactgttcattgaggcagagtagtgaaggtcttgaagaagctgggacacccataaaagaaagaaaagccctctgctcaggaaatccatgtcagctacacgtggctgagcacggaggctctttatgctccctatacgatgagcgaggcgaggtgtccaaccgcacccagatgtgttactgggcagcctggcccaggcctttttaaagatgtttgataaagctcatgtagcaactaccagagcttcactacacggatatccgtggtattcattgagtaaaaccagcagatttcacataagcagatgtttttatttgttcctaaagtcttagaaagtaatgttatattaacatgtaatatgaattccctgttactctttggatggtttgcatttgaccagtgtcttttcatttttagtaaaagcaaaattttttctagacataatcctgctattgatgttgaatactatttcatcttaccctgcataccacacaataccactgatacattgtatataccactgataacattcttggccactgggaaaattatttttttacattgttattggtctcctgtgttgtaggtaggactatgcaggaatggatcttttctttgagacagagtcttgctctgtcacccaggctggagtgcagtggcgcaatctcagctcactgcaggctctactctcgggttcaagcgattcttc

SEQ ID NO: 57818 - DNA, 3973 bp, Homo sapiens
caatttttttttgttttgttttttgtttttgagatggatttttgctcttgttgctcaggctggagtgcagtggtgcaatctcggctcaccacaatctccgtctcccgggttcaagtgattctcctgcctcagcctcccgagtaactgggattacaggcgcccatcaccacacccagctaatttttgtatttttagtagagacggtgtttcaccatgttggccaggctagtctcgaactcctgacctcaggtgacccacccgccccggcttcctaaagtgctgagattataggtgtgagccactgcgcatggcctaagcaatgatttttgacaagaattttctcctttcaaaaagtgcttaattgtggcaaggtgagacctgaggtgaagataaaggatgggtgggtatttcttcagaattcagcagaaagatttgccaacctttaagtagacacgccgttccaaatttgtaataatgtaaatgctttctaccaaattgtgtaatgaatatatttgaaatggtgattgatattattaatagatatgtttgacttattagaatatcatttaccaacatttagcaaaatcgagatagaatagcaagggtcattgatgagtaagttccatgcagatatgtaccttcctgtaacatttaccagatggagacttttgggtgtgtgccaaaagtgatgaattaaccgtgaaagaatgtgagacaaatgaagtgtgaaggtagttcaaaggtccttaaagagacagaacagcccactcttgccttcataagatttgctagagaaagaagtaggtgcctagtaaagtatttagggaaatctcagtctggctagtccttacaagaaagaaatcctttgaaaggaatacaatattcataatgtgactgttttaaaataaatttttatatgtttaatatttgtaaaaagtcctcattgagattttcctctcttcatcttattttgccatttctgtggtataaaataggtttttaggaaatttgactttgatttactcgtggaccattgcttaggaatgattaggttgcaaattggggattgtctgtaagacaatggctttttatttgggtgaggactgaagaacacatctcatgataggattattgaataaaatctgttgtttctgtgaatgctgaaaatggcagttggaaaacatatttattgcatttcatcaatgggcctctgtgcattggctattttgaaattgaatttacacatttcaaatggtcatataagcagtcattttgtggaatgaagcataattcaagactgggagttgggctatactgcaagttatgaataagatacacactatttccaagggcctaaaatttctttgttaaacacagattcaaaataactgtaaggaccttctacctatggaacaaatttgcaagaaaagtccaaagactggaattttatttaaaattccttcatttgtagctaatttaaaaatgttactttggactgggtgctgtgactcacacctgtaatcccagcactttgtgaggccaaggtgggcagattgtttaagtccaggacttcgagaccagccttggcaactggagaaaccccgtctctactaaaaatacaaaaagttagcccggtgtgtagtcccagctactcaggagactgaggtgggagaatcacctgaccctagaaggtcagggctgtagtgagccagagatcaggcgactgcactccagcctgggcaactgcggtgagaccttgtctcaaaaaataaaaataaaatgttactttgttttgtggaccaagggaaacatgcctgtgggctagttcgaatggcctagacaaggtagggtagaaaaagtaatgtcttttttttaaccccactcattacaaggttcatggctggtgcactgctagggtctgagtgtttgtgtcgcccagcccccaccctcaccccctcaacatttatatgttgaaacctgaagcccaatgtaacagtaactaagaggcggaggcttcagtatgatgaatacgggggttatgtctaatggcagtacacacggtcgaggggtacttagcaaggcctgtttgttcagattcttttctgtgtccctgtgtctacagagataaagacattcctttcctccgggtataggaacagttcctgaaatgaggctgttaagacctacatcagggaaaggtcagttaggttttatggtctgcttcagggaagaagaggcatggaaacaggaaacaaacttcctgcttttgctgtttcctcaagtgccagcgtgccatattttggagtagcatgtcctgagccctatcaacagcatgcgcgtgattctgaggagaaacaggacacaataccttgttctacaagcttaaaagtgataatgcctagagcgcgtagagataccaaagacctgcagtggggacactgaggaacagcgcgtacaggaagtgatgttgatctggttcctggagcacaggtaggatttagcagtggtgcaatgaggggcatgcatcctgcccagagccggaagcacagtccagttattgtgagcagcagacagttcagtgtgttagcagccttgggctgtggaaatgttccaggtaacaaaaggataaggcaaagctgtccctttattttgtttgagtccctatatacacacaaaaccccccaaaataaatcatataggttaaaggaaactatgaaaatacaaagctgtgagaaagcttctttaaggcatgtctcctagctcatccagaccgatgactcctttgagaaaatttttctgtgtagtggagctgccactattttataggtagtcacccattttatctggggagtcattaggctgaaaataaaacccttgcttgtaccccttaccttaaaaaggatattggcttaggattggacaaatttaaatctttggtcccttaaattttgttattccttcactggactttcatgttttagaaccatttttacatttctcagtgagtagtttatggggtgtggttggttgactcaaatagaggctactaaacttattcttttaacctttaacctttccagagttaaaatttactgtcattctttttaaacattagattcccgacttaaggtgacacagttataatatttacagtatcatgttgtattaaatgagatggcccatttgtaatatatgagataacctgatacaactcagaattaaatgtacaactgaaaggtttagcattctagtcctgagccatccaaattcgctcagtgacacaggtcagatcacttatgctgaatgacttgctttgttatttgcctaaattagagaagtgtaacttggttaaatacgtgatagggcaaggtttgaaacatacaaacaaaaatgctgtccctcccttcagtacaccgtgtctgatttgttcacttgagtccttagcatctactacagtgcttcacacatagcaggcactcaaatatttgttggttgaaatatatgtaagagagaagtacacctattttttctgtggtcattattagaggcagaaggtgtatattttcactgtttgtttttgtgtctgtgttggggaaggaacaaaccctaaaacctttacccattacagaaggaaagaacattggtacaagacgaactgttcagcaagaatagatttgaatgtctgatctgtccccaagtcttcagatgctgcagatgttaaccatggcctcttggatgccctcacttgctcattcattcactttgattgattcataagatgagcttgagttcatgccagcaagtaagccatgatcttagagggaaaatgactggaagcagatcacagtgcaatatggtgttagaggtattaggatggatagatgtagaaagtacagtgggagtacaaagaagggaagggagccatcatttttgtctgagcaaatggagcagagtcatatggactcatagaaaa

SEQ ID NO: 57819 - DNA, 1058 bp, Homo sapiens
aactatctttatattaggagtctgatttgcatctaaaaatattttaggtggtgttatttatttccttctcatcaagaataattccacggttttctttgtaagtggactcttgccaccagggaaagattgtggactcgatttctgtgagtgtttagctgttaataaaaagccccaactgaagataaaatgtgaaatgattaaaaaaaaaaaggtttatttcctaacctggtagccagttattaaattcctgatagcattgaggagaaataggcacactgataacgagacatgagagacaagttctctgtgttccaggagcagagcaatgttcttttctctaacattcacactggatgagtaatatgggagtgacttgaaggaatgagcatttgtaccgcatgcaagggtttttactctttctagtaccttcattaagggattagcctttcgttctttgaaatgcaaaatctcagttgcccaaaaagcagagtggaaatgagcagcatcctctcttccttaagagaagtggtctttcttctgtcacttaagacattttcctatagttgaggattttatagcaaagagaattttttaaaccaagttactggttaaaaactttttgttgttgttgttggtcttaatttcataggcacataggttagggccaatcactagtcttttctaagcttttattttttaaaaatcgctaatgctttaaaatactgtcaatgtgataggtcccagctgctgattccttcatactaaatgattgttttaagtaagttttgattcctgtttgtctttgattgtagtagttttgttttacttttaaaaattaaattcaataggatcataaagcatgcttttgaccaaatattttgctggtatcttaaattgaccgcagtacaatttagagtctcagaacattttcttttaagttgccttttttcatcctcagtgttcttgttctgacagtgtatcctgtgatttttaaatttttcttcctttctgggtgaagtgacagaattttaaagtgttttttgaaacatctggtgatc

SEQ ID NO: 57820 - DNA, 1296 bp, Homo sapiens
tccaccatctgttcactccccaccggaatgtgattatccttgctgggctgggaagtggggaaagcaggggagcctgtgctgggtgagattatctgcaatggaccgggttaatgggaggcttgctttggctcgctggaagaacaaatgaagggagttttacttcaaccatttgtgacttctggccaagaggaataaattcagcttttataaggtaagtaaccctagtaatatgtatccagtttgtagtacgtttgtgtgggggcattatctccatgtggtccaaggaaagtgagctctaagctctttttaaagaaacctccagcgtcatacacttctcttgtattgattttatgcagttcaataatgcctatgcaattacatgttgattttggaaaatgaaaaaaaatttaatcttttaaactgttttctgcttgtgaaattgttttatgactcctgaaagtggcaaaaggacagtcatttttaatggtttttcagaatgaattacactggtattctttctgaaatacgcccatggccccaaacgtgttcaatgcctgtccttattatttgaaaaaataactcgggtcagggacgtttgtaggttatgatttaattaatgattattctggcccacatgactgacccaccattactagctgatgttttgaaatgtgatgtttatgcagttttattttgcaatgctttggcacaagtttcaagggcctgagcatgtggaaacaatgtggcagtgctttaaggcatgcatgcaggcaccgtggtaaaggaagggcaagacaaggaagatcagcttctatttcaagggcttcctttgtttttctatttcaacagccccttaaaatgtgtgttgcatattgtgagcagtagaaggagatttgggtcctaacaaatggatgactgacatttttctgtgtggctaagaggttggtagctcaaacaagggacttctatgtcctttgtaaggcagcattgtatccccttccccaaaactgtgccctaaaatataaatgtgaaaaaacaaaaagagtgctgtctatagtctggatacttcttttgtgtaagttttttttgtttttttatcattgaaaccatagggccagtgctctgtgagtctaactgggtctgccatttttacttgatagaggaaaggttgcaaggaaagccttggctcatgcaggttcagtctttctgattgtgctgtgctgctgtcatcttggacatttgtgccagtggctgcccagagagttagaaaaggttattgctaataggccctaattg

SEQ ID NO: 57821 - DNA, 931 bp, Homo sapiens
tttctgatttttcaaggccatgagaaattactaatgtacttataaagacagataaaaatgagtaataaatattttaccagttaaactatgttttgaaataacatatacgacttgttttccttaggaaatttgtatgtagtatttattaattctgtattatttagtcactgaaatcaatgagctatgctggaaaggaaaacataaatgggatatttgaggtcattcaaaatgagattttaacatcttaagcttgtgaatcatgaatctgtaaccaacatctttggtccagggcaggagccctgttaaaatagaaacaaactgttttcccattagcttttttagagcattactaatagttaaggcattagtccatttagaaatcgccctattcccagctgtactttgaatgcttttaaaggttccatgtgcctcagttgtttactttactttgataaatagaagtctctctgtgctcatacactccctctcatgcaatgtactgcagcagtccgtcctctggggaggtgtggcatgttttgcataaggtcgtccttgggcagtaagttcgaagaatgcactgaagtcatagtgcattggtctgagctcctggcagatcctgtgtaatcttcagcctccctgaagctttacagccaggagtgagattttatcacatgaactttaaaagagtaaagccaaatatctttttattaaaccagagtagattaattatcagtatatgtgaaatcatgtccactgatcaaggtaagtggtttcattttctagtagatatatttttttcttccccagcgtgggtcactttataacactgcatgccgagggatgtaaaagtggcagagtttggttttcttttaaagttaataaagctcacattggttttcaagttcaagattaaaatatgtgctattgatgg

SEQ ID NO: 57822 - DNA, 1779 bp, Homo sapiens
aaaaaaatgtacttcccagataaacatcaccttgcgtttcaccgcaggtctgggtgatccttaccttggaacaaatgatagtgttggtgcatttaaagtagcagcttttgggtgactggctggtcctgaggagtttttcctacttagcagtgttcattttatctattaatgccgtgaagcaaaatacaggttgaatgagcagtgttggtaactgcaaaacaaagtgttgcaacacagtaggctgaggtagttttaagcagataaagtctacagaaattagtttacagaaatagtgttaggctgggatgttttagctgctagatttcagatttagagaaatcaagtttagaaaaataaaccagcaaagtagtacaaaattaatagcaacaatgtcaggaagaatttgcttatgaaaaggatctattttcccttttgtgaagagaaacatttgttcacccttggttacttgtgattgagataattaaaaacaattttatttggttttagcagcctccttgtgaaaacttatgaaatattaggcagtttgattttcttctcctctctggacctgcagataaatttgttgtgaataaatggaaaatagtttggcagtgggcagaagcaagggaaaagccaagaatctggtcgatttataaaccagacattgtgaataaatgagttggctacagctcttagaaaaaggcttttgcctttcgagttcttttcctacatctgcttttatttctttcacactttatgaagtcaataaaaattttgatttcattgttacagaagtttctccttgtataggagcttttcatgccctctgttggccataaataatttacttttgatttctcaaggctcctaactggtgacttttcatataaggggatgtctaggttgtttttggtagtgatattatctctttgtacccagagaacacttctgacaccaaatggggggttttcttcacagcaacaaccagttcttcagctctacctggagttagcgtcagatcccataggtgaaacgctgagtcccacaagactatccccactttagatgccagtcacaagtcccaggcatcccgtagttctgactgactcaccgtaaatcagaggttcccatgaactcctcatcagatttaataatttgctagattgggtcacagaactcaggaaagcactttactgacatttgcttgtttattataaaggatactatgaagaatatagatgaacagccagataaagagagattaatacataaggtgaggtccagaagattcctgaacatgggtgctcctgtcccatggggttagggtaggccaccctccctgcacatggatgtattcaccaacttggaagctctctgatccttgtcacttagaggtttcatcatgtagacgtgatcaattattaactcagtctccaggcactctccctctccagaagttgggaggaataggtctgaaagttccatgcttctgatcattacttggtctttctggcagccacctccatcctgaggctacctagggttacgccaagagtcatttcatcaaaagaggcttctaccacccaggaagtgtcaagagatttaagaactctccgttaggaacaaaagatgctcctattatccccaccacttaggaaattacaagagttttgtttttgagacagggtctcactgtgttgcccaggctggagtgcagtggtgcaatctcagctcactgcaagctccgcctcctgggttcatgccattctcctgcctcag

SEQ ID NO: 57823 - DNA, 713 bp, Homo sapiens
ataatcacttcaaggaaagaaccagttcctttggagatttcctgtggttccaaagttgcatgcctccaagtctgttaggttgtgggattttgcatttgagagaaatgagggaggtggagagaatgaagagaaagtggactggcagaattacagaatgtggtttcatctgatcttttaggctgagggctactccatttgtagactccatgcataaaactcaggcatcctgggtcctgccctactgctgctttgtggtcagaacatcgtgagatcatgcagcctcaaggctgggaacatacgggatcaggtccaacagcaggttggagtttgggttcatgatttcaaagtcagggtcgtgagggcacccaagatgattaccgagaagtcaaaagcacgtgccagtaatggcaatgtgaaggtctgggaaacagccaaaacgtagctgtcaggaatgtgggacagagtccctagggcagcttttcccaaaacatgttccaagatatactagctctatgggatgttgacttacaataatatgtggtgaaaaggttttccagacaaacactgagttcagagttaagcaggtttttttctattgcagagcttgtcagagcctctgatatgcccactagtattgtaagtgtacaagatgaagctttaaaattgggcaaataacagatatttcatacagaatcctggatgtggccaggagt

SEQ ID NO: 57824 - DNA, 784 bp, Homo sapiens
ttacttttacctttggaggtttggagtagaggagggatactatctgtctaaaaagaaaaacaacatttagaaatataacagtatgggccgggcatggtggctcaggcctgtaatcccaggactgtgggaggccaagatgggcggatcacttgaggtcaggagttcgagaccagcctggctaacatggtgaaaccccgccccccacccgtctctactaaaaatacaaaaattttcccagggtggtggcgggtgcctgtaataacagctacttggggggctgaggcaggagaatcacttcagcctgggaggaggaggctgcagtgagccgagattgcgccactgcattccagcctgggcgacagagtcagactctgtctcaaaaaaaaaaaagaacggtatgagcaaagagtgagtaaggcagttatcagatgtctactttgccaggaatcaggctacagcaaataaaggtttatacataatattgataataaatgcccagctcttcccctgtaaaactccaatactctaagatttttttcatgaacaccgccccccgctgctccgacccctgcttttttatttatttatttatttatttggtagagatgaggtctcactatgttgaccaggctggtctcgaactcccagctcaagcgatcctcctgcttctgcttcctaaagtgctgggattacaccgcgctcggtcctgaacacacattttgtttgtttgtttgtttgtttacaaaacccctggagaacccgcgtattctaacctgggctggtt

SEQ ID NO: 57825 - DNA, 1568 bp, Homo sapiens
aaaataaataaaaggaagtgacactggataattaagagacacaccattgcgcctttaacacatattcacacccagcactgtcacatccatcgtgccttgaggacaggcataaatttacggccttcctcctgcgctcccggcctgctcctagcctttgactagagcctgcgcagcatcccagtcccaggctagggcccaccggtgccgcgcagcctcctggaagctgtggggagtagcgttcctccgctccagaactacaactcccagcaggccttgctcctctccacctccctcgcagcgcatggcctgccgggagggggcaggtagccggcgggcccggtccaatgggtgccggcttccgaggagagggcggaggagaggaggaaggaggcgaactgtgggccccggccccattcattgccgtggccggcgggcactggggccccgtgttttcagagtcatggaggcgctaattcctgtcataaacaagctccaggacgtcttcaacacggtgggcgccgacatcatccagctgcctcaaatcgtcgtagtgggaacgcaggtgagagcagcaggcggcgttcgctcgggccagaccccggccgcaggcctggtcggtgctgcggcagtgcccactcccgcgccagcgcccactcccgcgccagcctttggggcctgtgggaggagggccttgctgggggccccagggctctccgggctctgccgcacccgccctcccggggcagcgttgcatcaaggcggagaatccggggcccggccaggggcggagccggcgcggcgggcctggctagcccggcgggtcccggggacaggagagggaaggatggggccggcgggcggaactggagtccgctgggaccgggcgcggcctcgtccgcgtgccgctgcctccaagggcacctgggggacgcgcggggcactcgggtctcgctgggctcggtgggctggctgttcccatcactgttggctttcgtgagacgggtgttttatttccctccttgccttgcccagggactgcggagttagttttggaatcgctctgttgaggctgagagacgctacggtgcgtgagcgccagtgttttcctgcagtataattccaccaggtttcgagaacgccgaagcagcattttaaaaaaagaaaaacaaaacgtgtatctagagttctgcgggtgttgggaaggaatatccgatttttctgcgtaggctgtgctttttgtcttccacagttttgtgatcgtgacctaaattgggcatcagtttctctggtcttctcatagctaactcatttttttttgaatgcagaaatgttggcaaaataactgttatttctagagtgacagaggagaagtataattttccttttctctgctacttcgattagagttcagagaaacggattttagaaattagtatattgatattaagtgctttcatttcttaatagtatcttttctattgagaaggagcggtttccccatcattttccaggaggtacatagtatagggtataagtgctatcagaaggaacttactgttcaaagtatt

SEQ ID NO: 57826 - DNA, 2382 bp, Homo sapiens
tctaaacgccttttaaacatgtgctttgctctgttgcacatgagctagccctatccttcacctctctcaagaaaatgctattagacccgcattacttgtcaattatttggagttgaaaaaactttttgagataccaaccaaggactaacactagtttcatggagggtgcagagctaaagcagaggctagctactcaaggaggcccagtcacgttctggtataaacacacaaaagcagtttctctaattagagaggacgacttaggcgaagcaaaacagaccgaccaaatcttcactagtggtctgtttcccttttttttttttttttttttgagacggagtctccctctgttgccccaggctggagtgcagtggcgcgatctcggctcactgaaaccttcgcctcccgggttcaagagattctcctgcctcagcctcccgaatagctgggattacaggcgtgcatcaccacgcccagctaatttttagaatacaccgtttactcttaatacccttaattcagccctttaattcttattagccagtgttattaacgccattatagagccttaatggggataaaaccaacaagagctggaacgaagggcagcaactacaatcctaagagtgaatcacaggctactagtgtgtaaattatttggtcccaggatttccccaaggtttaaaggcacttacttgttgatgaactcatatccggacatgatgttgcctagttgatcagatccgcccagctggaccctgcatccataacgctggaagaggtaatagaagtcataggcctggagcacctggtaaaagaactcggccaagctcatgccctcggggctcttgagccgcagctgcacgctctgccggctcagcagcgtccccatgcggaagtgaccccccactgccgccaggaagtccaccaggtgctgcttctggtaccaggccgagttgtccagcacagtgaagctgccccaggagcgcccatcagtgaaaagctgctggtgattagccgccagggcctcaagccctaggcgcagagctcgcgcgttggctcgcacgcgctctgtctccagcgcctcgcgttccttggtacggccgctcgggtctcccaggcgcgccgtggcgcctcccaccagcgcgatcacgttgtggcccgctcgctgcaaatgaaacaggcccagcagcgcaagtagatgacccacatgaagcgagtctgccgtggggtcgaagccacagtaaatggtttggggaaaactcgccgtgccacggtcgaagagctctgggagctctattttcgtccccgtctccgggaagaagtccttgaacagacctcgagccttctgcgctgccagtaacccctgagcgcccgagtgggccttacgcagccccaagggcaacaatactgagagatttagggtaccagaccaccggccccaggaaaaggaccgcaagatgggcgccgccatcttggtagcggcacgaagggaatgctgggattgcagaggctcccaccacacccacctacttacagctcctagggaaggtgcttcagtgtttttctgcgcatgcccgagacggttacgtagttacggagcttgcgctctcagcagttgagtcccgactccaagtggcgattccgcctcagagccgtcgccttacgttcccttaaacttaatttttccatcagcagtgtggatctgcttatgatagttcctacctcataaggctgttgtgagccttaaaaattaaagcatttggcacataacgcttcacaaatgctaacttgtatttacattttcacgtaaaaagattgtgatgcgcaagttctttgaagtcttggttccatgcaaaaagctgttcacagaggttgagaaaggttaggaattggtttaagttcgcggagagatagggagttgctgctgagacgcaagcaatttcatagtaccgattccctaattgcacctcgtccccagtattcatcggctcttccaggaggtggcagtcttgtccaaggtatagcaagaaaaactcagtgcaataaagtacatgcatcaagtcctgtggtttatttattttaaatacagttaactaggttgggacacagcttagcatgagtggattcaagttagtaatcacatcgtgcagcgtgacaggtgctctgaatactgaccagggatgaggttcttattggcagctggctggcaggtgatctagcttcaaaatcccatgttagagcctgatttctaggaccgctttcaaaatcgtcttaggtagaattccctggactctgagttgggggggagactggtttgcaggagggtaattggagtgtgctcttaagaacaacacctataatggagtgagggaggccggg

SEQ ID NO: 57827 - DNA, 1183 bp, Homo sapiens
gaggcaagaagttcaagaccagcctggccaacatgatgaaacctcgactccactaaaaaaaaaatacaaaaattagccatgtatggtgacacatgcctataatcccagctacttgggaggctgaggcaggagaatagcttgaacccgggaggcagaggctgcagtgaggcaagattgcgccactgcattcctgtctggaacagagtgactccgtctcaaaaaaaaaaagacaaatagatcaatagaacagaatacacagtccagaaatagactcacatatttgatcaattccttttcagcaaagatacaaagacaatttagcagtgaaataaaagtctttgcaacaaatgacacctgaacaattaaatttacatataccaaaaaaaggaacttcagtccacatcttacaatatataaaaaattaaccacaaatggaccatagaacaactaaaatatataacatttacaaaacttctaggataaaatatagattatcttctaacttttgaatagagaaacatttcttggatacacatgaaaagcagaaaccataaagggaaaaaactgaataaattaaatcccattaaaatgaaaacctattaggagaatgaaaaaacagagcacaactgggagaaaatattttcatattatatatctagaaaaggtcttgtatacagaaaatattaaaaaacttacaaaattcaataataagaaaacaaaacaaaacaaaatgggcaaaagaattgaatacacatttcactaaagaagatatgtaagtggcaaataaacacataaagagatgttctggctgggtgtggtggctcatgcctgtaatcccatcactttgggaggccaaggtagctggctcctttgaacttgggagttggagaccagcttgggcaacatggtgaaaccccatctctacaaaaaatacaaaaattagcaaggtgtggtagtgcaccggtaggcccagctacttgggaggctgaggtgggaagatcacttgagcccgagaggtggaggttgcaatgagccaaaattgtgccactgcactccagcctgggcaacagaggcagatcctttctcaaaaaaaaaaaaaaaaaaaaaaaaaaaaaagttcaacccctttgtcattggggaaatgcaaattaaaaccacagtaaaacacctgtacaaacttaca

SEQ ID NO: 57828 - DNA, 625 bp, Homo sapiens
agtcatagttatccaaatggcattcgtgctaagaataagcattttttccttttatttcatgggatgatgaagaaaatacgcatgcaattctccaattcttggcctactttggagtttagagcagattttcatatggctgaggggtagggtcccttcagccagcatctaatctggaacagatggactaaatgtcacatttccatacaaagctgccatgtgagcaggtagcttggcccctgtccctgaggtaaataggctgatctgtcaattaggcagctgcctgaaaagtcattattttaatcacttatctctggaagcccttctctcaagccccagaagtgccagctcatgctgtcagggctgtgggaacagaatgtgctggcaatgactgaactgcagagtcaggaggggacttaccccagctgggagtcagtgaaagtgcttctctcagtgagcagattcccacttccccctgcggccgcctggccgacagtcaagtgcgctctcctcccgctggaatccacggcgacactgggcccagcttccctcagcgtgcgggtgctgtggaaggagctctgatgccaggaggacctggaagccctgttctgagtgacgggctgcaggg

SEQ ID NO: 57829 - DNA, 610 bp, Homo sapiens
ctctgggtctacttgtggtttcttacagttccacggattctgaagcatccttactttaccctcacacaaaacttcacccctaagagatgtgttctcaacatttccaggggtgtgaagttttttttgttgttgttgttaactaccattttgttaacattctatttcacttactataatcagaaggatttctttaattatttttggacttaccgaactcaatctgcttggccctggacaaaaagtggctcacaggccatattacacagacacagaggtgcatttaatccagtgtgctactgacacctcacattcagagcagagggccatgaccctgccacccgccatctcactcttttttttccctttcctgatccctcctactttctgaacgattagtcaccttgctccccagaattgcttcattcctgggattcctttttgtcaaaggaagaatttatgcagaatttgaacaatgtctaacttttttttaacagtagcgcctagtaactacctttcttttgctaccctgagccaattttcaattctctctccagaattcacttttttttttttttttgagatggagtctcactccatcgcccaggctgga

SEQ ID NO: 57830 - DNA, 434 bp, Homo sapiens
agtttaattaaacaatacatacgaaccacccctggtaattgtttcatggcatgctaatgttaaattcctttgaagctgatttcctttttgagtcttagaaagctgaggctttaaagtaagtaggtgttgtttgctgccttatctctctgtctgatttgtacttctgtgtaggctgcagagtgtatttcagcttactggaaagctgctgttgcaatcaaaatatttcaaacgctttgttccttagttggaacagccagtcaagtagttgacccaagcattatagcagaaggaccaagatagtgccctttgttctaccatatcaactctgtgaactgtgaaatattcattctgttccctcctagaatgatctttctccagtcacctccctatgtccagtcctactgaatttttgagatctacctccaggaagcttt

SEQ ID NO: 57831 - DNA, 2695 bp, Homo sapiens
ttgaaatctctggtctggcctgttagaatttttctgttttcctaatagaaactagaatgggttagcctacattcgccaatgcccaagttacttcatacagaaacaactgaacgttgcaggaaacagatattccaacttaattgctcaatttctttcctcttctttttgctataagccaacatagtgcttttataatgcaaactcacatacacagcaacaagaagtaaaacaagggtcactgagttgatcccatcacctgacttcagcaggggagaaaaggatacatcatgatctctaattttcacaagtggcttgccatcttctttcccttccacctcccccgtctatcaatcatgaacatagtgtgcatgtgtgtgcttacacccctttcaccttcgggtttaattttttggagggatcagacttgcatcacgcccgcactggtgggggtaggaagcgcagctaggcgggcacggctgttgccggcagggccaaagtcccctacctcctcctcggcgtgtttgttccctggaccaaagcctcctaactacttttcttcactccctagatccaccactcgcctcccacacagggtggagcgccccgaagtacttgcataagacagcacaatcccaatttataggttgtaggagcgccagtgctgtcggtttttttccccaagatatttatgggggtcattaattatttaacaaatctaataaaattgaagggctccttctcccagaaaaagatcgtacacaccaaaaattctgcatagcatctcaaggtgtttatagactccctgaaccttcaaattaagtccgcaccagtgaggggcgcggaccggcggagtagaaaaagaaaggggtgaaatcttgaagtgagttagttaacattgatagatatgtacaatatttaatatacataggtacctatatgacaaagctgagtaataggttatggaaaagagtgctttccacaagcaagtcggtcataccgaagacggcgagcaacaggtgggcagaacacggggtcccgcactcccagcacgcggggtgagggcgggataggaggaggtgaccgggtgtggggcagggggcggcgccggggagcggcgggctccactcaccgttgcccacggagctgcggcccttccgggcgagggtctgctgcacctgctcctggatccgcaggctcttgactgtctggccgccgcggccgctgctccccgccagcttcagcttggcctcggagggcagcgccaggctggagctgtccagttgtcccaggatctgctggcccaggacggtccggatgtagccgtactcagctggggcgccgggggctgccatggggccggtgggggcgaccgagctgctcgcctgcctctggactcgcgggcgaagccgccacggagctgggggcgctggcgcgagccccgccccgctcgagtccggccccgcccctggcccgccccccgcgccggtgagaggcccgggccgggggggagctcggcctcgtgggccggacgcccggccttccctgaggagggggcgcggctccggccgggcacgcgcagtcgggcccgggggcgggggcgggggcgggccggacccgctgagcgcgcggacacctggagacttgtacccgcccgcggggaggtggggagaggggcgcggttcgcctggggtcgcgcacgttgtcggagtcccagcggataccgcctgccggggccgcgccccgctctgcccacgccccgcgctggacaggatggatttccgctcgatgcagggaggggctgccctgcaggcaggtgagccctcgagagtcactcctgttcttggactgaggcttgcctccgggatccccgagcgagtagtatgtctggttagtcaggctttgtcgcactgttggaaacgtttcctggttttcctggacctgagggtgagaaagggctatttggtcaggcggaaagggcaatatgagggaaatgtgccaagaagataacgtgtgaaataaaagactttctaaagagagtgttttttttcttagtacaacgtcaggactatgtactttttgcacagatgcagtcccagaaacatatgttcttcctcattgagagcttctgttttctcttggatacacaaattgtacccagtactcttgctaacccattcctctcttacgaacacacccacacagagaaactccaacaagaggctctagagaagaaatgaattttaatagacgatgctttttaaatagccctgctaacgttgattaagtcctctttattacaggctctttgtagagagatccacggagagggcctccaactttcaatcgaatcttccacaacttgtatttatcgtgctattaattatgtttcaccgcagttgactactgagaacttgagagctaagctcaacagaaaggatccttgaccttaaagtttacaaccaaagccacttgtcctgatttgcctctttggacttaagaggcagaaagaaaaacatgtatccctggtattaagataatattccctttgattgcttgggtttgtatgttcactttccctcaaatcactcaattgctgcaaaaccccacttactcaagtctgaagtgtttggagaacgcagcttccctcgtctttgttttcctacccacacccttctgcctttagacacacactgaa

SEQ ID NO: 57832 - DNA, 1124 bp, Homo sapiens
ctcgggaggctgaagcaggagaatcacttgaacccaggaggcggaggttgcattgagccaagatcacaccactgcacttcagcctgggtgacagagcaagactccgtctcaaaaaaagaaaaaagaaaaaaggatctttttagaggtgagaacctcacccacagggtgaggatgtatgcagactctagtgttgtgctcctaaatgtagcctagatgtgcttatattccagcagcgagcaggccctgtcatgttcttctcatttcttgggaaagctgcctacccagcttcctaaactgtgagcaaaccctgagataacagtgaaaggtagcttctagctaacaaagcgaagcatggaataaaatgcttccttttattgaatccttttgcggtgtttggctgttttacgatttgccaccttttagtatttaggttcagttttaaaaactcttccatttctttggttttcatttaccaccagaatctgtaaaaagaaaaataaaaaggcaaaaccacaggaatgttgaactggaatgtaaataatagataaccaaattatgaggctacagttccttttgctttgaacctacagtaaagattcagaaattcttgagtttaaaccttgcatttttatttgctttatacactatatagcctcaagcaataatcatttattgttttaaaatctacagttagggcttccacagagtaatctttattttctttaaccatacataaattcctatatgagaaattttaatatgcaaaaaattcaggaagttactagaagactaaatatagtataaatgttggagcagaaagaatattttaatggaaagaacattaatggcaccaaagctctttgatttatattttaaaaataataaactaacattctcatgaatgctaacttacgtgaaatattttctgctactatctctaggctattaatatatattgctttttaaaaacatatttcctaaattagtgtaagggacctggcaggtagaaaatttaaaacaaacctcagaatttagtccctcttttagcaaacagatatgttgccaaggcaattggtagcagttttatcattaaccacatgtaatgaaactggatcagggctaga

SEQ ID NO: 57833 - DNA, 602 bp, Homo sapiens
agatgtgagccaccacgcctggcctgcttcttactttttaaatagagtttaaatttggggacaaacctttttgtatttttctgaaagatggtttataatgaacatgagattctgagacatttatatgatttcattattattattttacttaatgctgtgaataacagtgttaagtgaaggtaagtttaagcaatcacctgtgtccccaatctgttttgattctggaacctgaaacccagagcttagtgctgagttctggcaaatctcccagaaccaccgccctttagttagggcttctgtgtcaattctctaaagggcaaaggccttttgggaaactggattttatggtttcagggataggtctaaacaatacatacttctgaatccccaaggtcatttgttttatctttataggccaagatttcctgcagcaactgaaattctccaatattttcactggattgaactaagttagttcaaatttaaaacctattcagtaatactctttttaagcttgaagtgttcttgcttaggtagcaggaaactttttgaagggatattcttgctacagagccaaagtcaaatagaaatctcagtggtta

SEQ ID NO: 57834 - DNA, 961 bp, Homo sapiens
gagtgaaaaatataaaaatataaaagataatttagatcacaattaatagcaataatttcaaggagttatttctttaacctgtctctcttactttctgaaacagggtctttctctgtcactcaggcttgaggccaatggcgtgatcatggctcactgcagcttcgacatcccagaatcaagcaattcctgcagtctcagccacttggaaggttgagatagcaagatcacctgagggagcccaggaaggtcgaggctgcggtgagccgagattacattctcatactccaacctttctcaaaaaagaaaaataaaggtaaaacaacagcagcttcagtgtgtaaaaagaggaataagaaacataaaagaaaaaagaaaaacaaaatgaaggacaactgaaagtactgtggaaacaattggagaggaagaaacgacgtagtgagagaacgacatctagtggatgcaggtggtagtgctgctgaccagagagatctgttctaccttagaaatcccaagttaaccatcaaagccagcgctcgccgccgacatttggtggacccggcgctcgcggacggaagcgatcagacccagttggaaccttatcacaccgagcctgcccacctttgcggccatctaactccgccgacctgcccgccgttccgccaccgtcggctggttgacccgggctgcggagagaggaggaaagacagaaaggcagtgactggctcctgtcccattcccgcgcgcctggggcgggtagaggggccgtgaccccagtggccaccactgggcatgcgtgaacactactcggacaggaaccacaggggcacaccctctgacacccacgcctcagccattctcaccaggcccgataaatccgatcccagcccctgaaggaggtcaaagcggggtgcaggaaggaggcggaattggagagggaacgacgagcatgggcgacacccct

SEQ ID NO: 57835 - DNA, 698 bp, Homo sapiens
aggatgtgtggtattcatctgaatggcctgattctcattcctctcatccctttggacctctcccctcttctaagcctactgtttctttcaatgctgtgggaccccttctttcagaggtttggattcctgcttcaccctagtccacctcccagtgccctcactctccttctctcttttcctctgcccctgcacaatagatgtatgagtcacctgtttgtgtagagcagtggccactttccaaacacaagttggaggctttaattgaaattgttaatgatttactacaagcaaacactattcagccctctttgtctccatggaactcgcctgtgtttgttgtacaaaaaaagtcaggaaaatggaggatggtaacacacttaaaagctgttgatgcagttattaaacctatgggggtgttacaacccagtatgccctccccctccgtgattcctaaggaatggcctttaattatcatgaccttaaggactgcttttttcatattcctttagacaagtcagactgtgaaaaatttgctttcactataccttccattagcaattcagctcctgcaactagatatcaatggaaagttttacctcaaggaatgattaacagtcctactatttgtcagtggtttgtcagtactgtgttacaacctatctgacagacttttacaaataattacattcttcattata

SEQ ID NO: 57836 - DNA, 734 bp, Homo sapiens
tcctgttgcccctggggacctcgttccctggcccgctcatgcccacccgccccggagctccggaacacacagcgggtgtctctcgccagagcccatcagcgcccgctgtgcatttgggaggcgcccgtccccaccggcgggctttccaagatgccacgcgggggattgccgaggtaggggtggcgcacctgctcgtagttccacctctccgattccacctcctccccacacccctctgggaactcctccaggggctgggatcggattcattgagcctgttgagaatggctgaggcgtgggtgtcggagggtgtgcccctgaggtttctgtcccagtaatgttcacgcatgcccggtggtggcctttggggtcactgcccctctccccgccccaggtgcgcggggctgggatatgagccagtcactgcctttgtgcctttccttctctctccgctgccgggttcaaccagcggacagtgggggaacggcgggcaggtcggtggagttagatgacagtaaaggtgggccggctctgtgtgataagattccaactgggtccgaccgcttccgtccgctggcgccgggtcccccagacgtctgcggcgagcgttggaactgaccatcaacctgggatttctaaggaataacagataactctggtcagcagcactaccacttttgtccactagatgtcgctccttcactacgttgtttcttcctctccaattgtttcca

SEQ ID NO: 57837 - DNA, 894 bp, Homo sapiens
taacctaaacaaacaaacaaacgaacaaacactcctctcactgaagttcattcggcattgacgggtctctggttcttcaagttttcatctgaaagtctcagtctttgctatcacaaccaacgcccccttcctacactccaaggttgatggaatgaaatgtcttggaattgagggtttaattaattcggatcactggagagaaagaaaagaaataacgggggaaaaaaatgtgttaattttagggcttggaattggaaacgtggggaaacgtcgccaccttctggtaagtgatggaaatgagcaggaaaaaagatccaagctaagaagcggcttttttttttttccaaagcagcaagccacgcccctcccgcgctcgcgaaatccgagacccgccctttccggaagttttgacactgtgcgccccgagtaatgtgatggagagggtaatcatccggtccgttatctaaacccgtcactccaggaaacagcgacccgctgttttccggatccgcgctctcccagcatcctttgccttccggtatgtggccccgtctggctagtcctgtctagcgcgcccatttcgagcccaagtttccagctcgggtttccgggctcagaattttccaggagtgggttcttgggcagtggctgtgggagcaggaatggcgcagctagagggttactgtttctcggccgccttgagctgtacctttttagtgtcctgcctcctcttctccgccttcagccgggcgctgcgagagccctacatggacgagatcttccacctgcctcaggcgcagcgctactgtgagggccatttctccctttcccaggtggggtgcccaacctgtccccaccccaggagaggcctgaaaggtcccagcgtccccagct

SEQ ID NO: 57838 - DNA, 866 bp, Homo sapiens
tttcaacaggaatggaaatatagtttgtaaatagagcccaacaaaaaatatttaattttctatagggacaaaaatacagtttataagtagagccaaacaatgctttatcattttgcaaacactgtccagaataaattttccacatgtggacagagaccagtatctctgaatcataatgtcccctgcaaattgccctgtgtcaataaacagaatgattctggttttaattaaaattttgtaaattattaagggccttttatttatctatttttcagggtagtctctggaccactgatagcctgcaaagtctttaccaaatgttgcttaggcagctacagaaactaactagcacaagcttgcacataagtggggcccgttgaatgaacaaagagttttagtctccaatctaaagcaccatcttttttcactttaggtaaggttaggtgttttattatagaaggcagagtagaaggggaatctagcatttggggcctttgctctaataggtaatccattaactgaaaatccctgagagtgacagcatcactgagccccgtgtcactgaaccatgcccacggcctttatttagggcattatgttatcttatggactggaatcagaaagttatttgtatgtatatatattttttaatgtacatacacacaaaatggttttcagaattttttttatgaagacaaggaaatcaaaactttttttgagcaactgaaagcaaatttaatctttggaagtgatttaaatgcaatgtttaattctctctgattcattcattcttttattcactgaataaacaataccctgagaaatttaacataacacacttcaggaaaaaatatttttcccaaaac

SEQ ID NO: 57839 - DNA, 445 bp, Homo sapiens
attcattaccaagaagaactcaaaacagtcacacagtgtactccatcagtttaatcaacttccagctccctgtcctttcagacactctaaatagcaccttcaggcagatgtgacaatattctgttgacagtgtctaactttctggtcagataagtgtagagaattctctaaacatttatatccattacctaaggcgtccctaggcctacggcaccactctaaaggtcactaggcatgtatctcccgttcacttgagcaatatttctagctaatccacagtatctttttataacagttttattcagaggtaaatgaaatactataaaatttgcccttttaaagtgtacaatccagtggttgatagtatattcacagagttgtgcaactactaccactatctaattttagaatattttcctctctcctcccaccaaaaacaccctga

SEQ ID NO: 57840 - DNA, 847 bp, Homo sapiens
ggaggtgactggatcatggaggcagtcctcccccttctgttcttgtgatagtgagttctcaggagatttggttgtttaaaagtgtgtagtacttcccccttctctctctctctcctgctccaccatgtaaagacgtgcctgcctccccttgtgccttccaccatgattgaaagtttctggaggcctccccagctatgctacctgtacagcatacagaacggtgagccaattaaatctcatttcttcataaattacccccagtctcaggtagttctttacagcaaggggagaacaggctaatatagatggctggggttattagcttcatattttataattctggcacccaagaagagactgccagcttttccccacttcagtacaatcaccagatctcatggacttgtcatcacctggcagggtgccacctctgaacagtcattacaactgggaaccaccagttccaccatttactagctgtgtaaactaaaactctctaggcttcagttttcttatctgtaaaaaaggagatgatcatagtatcctcctcatagagttgtttgaggagtaagtaagtaaatataaagtgcttagagcaaacccagcatatagtaaatattggaaaaactatctagaggcaaaggcaaagagaataatgtagagtgggtgtgcaatgccctaaattaagtgataaagccctaaactgtgattaaggaaaaaggtcaaattcattcgaaaatattcattcatgctttctttcaacacagatttattgggcatgtattatgtgccaggcactactagagtagtgtatgggaatagttaagccctgatctcaagtccactt

SEQ ID NO: 57841 - DNA, 1193 bp, Homo sapiens
agagagaaccacagtgtgaacatcatggttttctcaggaaacacaggtgtctgaagtgacttagagtttaggaaagagtttagaggcaaaagtggagaaggggagggtggtgggacatagagagaaagagatgaggctgaaaatttaagtcagggtttggaagatcctgatgactcattatacaggcaactagagggtcttaaacaagggagtaatagtatgatgtcatttgccctttttgagtacaactctaccagctcaaagtacaggattcctggcgaggaggagaaggttggccagagattgtgaggttggaagagtcaaggaacttgtgcatagtctttgcatgggtcagactggcctggacctagttagcagaatggtcagccatgttaaagagacgatacggaagtagaaggaatgggaggatgaggcctgaggctcaactgacagaagttttactggggtattgggggcatagagaaaatgatggggaggacttagtcccttgtaggaaagcaacctagaattttcaggagtgcccataagtagttcgcaaaacctctgaagcaattttgatggtgcctcttgttgacaatagctggtttagaccatgctgccaaaatgaaaatgacacaaccacacaacagttgcattttttaaatcacagcattttatatatgtgctggaaattgttcatcaatcatcatcatcttcaccttgtattaccatttattgacctcattgaaacaaagtggctttataattttctttttttttcctaattttatagctatagccactaatgaggtctgtttctctggaaagacttgatgtaatcagggatgacaacattttaggctaaatataatcaactgagcacttagatacttcagctgttacaagcacttaggaaattacttaggccatccaaggaaactttatagccagacaagtgtaggaaagacatgatttatggatagtgacttgacttaagtaaacttcctcatttttaacttgaacatgtgtaaacaagttctgtcttttcctttttttatagaaagcattgttttccatcttctcatccttgacacttttctttagttggattttgacttttctaaaattttattttacattgtgtggcacaaaatttaaattggtgataaaaaaaaatacagagtctggaagaa

SEQ ID NO: 57842 - DNA, 1708 bp, Homo sapiens
tataaactaatatttttaagggtataaacatataatgtataaacatattcaaattcatagatgtccacattcattcttccaatctatcaagtggcaaacatttattgaaaacctttcatgtgcaaagcacaaagtctggttttgtaataatcaatgataaaacaaatagatatttttaaacttggttggggagacaggcgtgcaaaaacctaaaaaattttaagtcaaaataaaacaaaaagaatgtacaagaaatgttgtctgggaactccaaggaagcaacaattaattccaatttcaagaatctagtaaaatatcacaaattgcactgagtgaggtaaatcttgacaaccaggcaaggagagccacaaatgggggaaaggcttctcaggctgtaggaaagtgtcaacaagggtggagaaagggaagacacaaaggaacgtggggattaacacctagtccactttggctggtgcccatgtctgagataaggctgggaaaggaatctgggcaggatgagtaagtactctgaacacatgctagcatacttggactttactctgtaaacaaaggggacacgctgaaacagtggaagtttctgcaaagaaaaatcatgcaattcaacctttgtttacaaagctaactaaacatgtgaagctcactacatgtgtgaagaagaggaaaaatgattacttcttgagccagagtggagacagcagaaatggaaaggaggtgaccgacactttggagaatggaataaacaagtcttggtgactgataaggtgattttaaaagtaccgaaaccattcataaagcttatgaaatatagtaagtcaagcattataatggtagggaagtaatagcatacatgactcacagtgttggcttatttcattttgaaagtcaactgttccagaaagcccaggtagcccacactcagtgacaactgatcagaggaagcacacaagactgaatccatctgacaattttactaaaaactctctagttgccaaagagacctaaatgattttttaaaagtaacatattagaaaagtaaattactgaaaaggcaccgatatctattcatatcaaacactgttcatttccatgaatacagtttgttatagatttctgttgagagaaaaaactagaacagcaacagcagaacttgacaactcttggggagaatattaaggaaaatgaggacgttgaaatagcaagtagttggtgttagaaataatctaacataatagttctttaaaaaaaaaaccttagacacttgaattagagcctacatttttaaagtctcatgatcacacaaaggtttaagagcctatgtctagaaaatcaagtgtaatatggcaacaaagttaaactgtttggaggaaattaaggttttctaaatatatgttaacactgtcagaggtgtttgaaccagagcaactccatcttgaataggggctgggtaaaataaggctgagacctgctgggctgcattcccaggaggttaaggcatttagtcacagaataagatagaagttcagcacaagatacatgtcataaagaccttgctgataaaacacactgctataatgaagctaaccaaagcccaccaaaaccaatatgacaatgagagtggcctctggtcatcctcactgctacactcccaccagcgccatcacagtttacaaattccatggcaacatga

SEQ ID NO: 57843 - DNA, 2614 bp, Homo sapiens
tgggaatacaggcgtataaactgtactgagccactgcgcccggccgagagtcagtttttacaagcactcagatgtgggcccgaaaacaaatcaaaacaaaagtcgtgacttcccagatcttaggtaaggcatagattcgtctgcaaggagggccgaaatctctacctatcaggcaaaaggcaaaaagcccggaagggtcggggagaagcaagctggaaggctccaggaagtgggtggggaggaagctgccggggttggagccaaccctagcaacagcaggtttgcacacgcctagcagaggaagtcccgggcctaagcgtgcagcggtcacaagagcttttggcagtgctgtccccttcgattccggtcatcacccaaccatccagcccgggtttggggcggaaaaccggcttgtaaagtgggcggcggccggtgttcccacagctgagtcacagcccagccaacttttacagcgtttcccagaaagaaaatacaaagtctcagtcccggagcccaccgcttctaattcccgctcccctgtgtcacctgacccggggtaactccagccccactactgagatatttcccactcatggcgcaacttcttgcctgcgcaaagcctcgtggtaccccgagcgctctccaagtgctaccaaccccacagatgagagggcaggagagaggggaagggctgcgtcctcacctgcaggacacggacacctccacccgcgtggccgggatggcagcgctcagctggttcaagtccccgatgcccgcagtgctgttgtagcggctgtccatattgggaggaggcgccttggacttgtccggcgcccacaaccacagctcgggcggactgagggctagctcccgtcaggcggggatgggggttgagggtggaggcagaagaaggaggcggaggcagcgcgcgggatgggggagggaagggaggaggcggacctccgcgcagagccacgagggaaccgctagccagtcctgggtgaaactgacgctgccaggcaagtggcgcgcggggatcccggtttcccagcccccttccggcaggcagcagcccgggcgggggacacactccgtgatcccctcctggctggaggggtcaggcttggtggacccagcaagcagcctgatggagaaggtggcaccagacgcagacccctaccgtccaggaccgcaagccctcgccggctctgcgtgcttttaggttttgtctccacctctgcacacccacactcgcctcctgggccgcgacagcttccttctgtcaatcaggtgtggacgggaaggtctcgaagtttcctcgcctgagttgaaagctggaggtgggggcacctctgcccgttcctaactgccccgttataaggtccccctccccacaattggttctcacctcgccctcggagctcttgggagatccctccgtccctcctactgtgccctcgggcagatgagtctggtcccagcttctggactgcccactgtcggccacttgagagttggggacggtggggcattgtgacgctctccaaccttggaacacggtggcaaagtggccgatcaatatatgggacaagtgggggcgggggggcggactctaaggtggaaaaaacaatactacttgggatttaaggaagcaatctggattctgtctccccttggttcttcggagcttagaggtctaacggcgacattcctcctacagtaagggctcttctgggtccctcgtttccaaaggcatgaaagttctgacctgaaaatgggggccggggagggtgatgtcacaaccatataacgcagctccttcagccgactcccacccgcaagaactgagacctgacggataaaagcagagaggagtcagagtgagcgctgcgtttgggaaactgcattccagggcagcaagactggtgccaagacggagtcgtggcaaaagcatccggaggtagacgaggcgcccctccactgcagggacctttgttccccgcgccttccctcctgcctcacccgagcgcctgcgggtcccgggagctcgccaccaggcggcgacggagaacaggatgcggcgcagctggaaggcagagggtggagagggggcgggtgtccgtccgatttaacgctccaagcacggagtttccagctggttgggctaagtctgggaggagcagtttttgcggtggaggacttgccttgcgttgtaacattttaatccacttgcagcctcctgcctagagaatctatagaggcgggtgagagtgtgtaggtgcagtcttgccgattcccctgccgagtgtacttcccctgtttcttcttgctttcctttcctgatttccccacccaccgctttttcttctttttttttccttcctcttgtcctattacaaattaaactgtagtttactgcgatttggaaatgccctaaaaccccaggcatttctattatgctgctcaaagttaatttggcatagagatctaggtttttttttaagctcaccagaattttactttacagaagcctactgaagagatgaaacttgagaactttagtagtcaacatgtgggatacttacatccaatttgtttccacttcagtgaggta

SEQ ID NO: 57844 - DNA, 904 bp, Homo sapiens
tctatgaagcacactgaatgagtgtggggatagttcaagagaagtcaaggaaatggaaattacttttcttgatctatggccagcacttacccagcttatttaaaatagactggaaagaaaatttaaaaactaattccttaggaaaagctgcatttttggtgaactttgtcataatttccatctatcaaccctttggatttatgatgggaacttttataaaattaattttgcaattaacttgagacttgaggactagagggagcacaattcttgaatttgctaattgttcctttttattttaccatttaagataaagagctattttagcagcatgaggattatttaaacacaaattacaaaggcatatttacatctatacattgctgaacaatattttcaggcgtggtggcaccaaacagataaaagacaagaactctttcaaaagtccaaaaacttacaggaaaacatggatgtactgtggcgaggggaaaaaataaactctaagtataatacaaatagtcaggaacactagatcactgaattttttctctgttattcacatattaactaagccatttgtcaacacactaaataccagtagcgatatcttgtgtccaagaatctgccaacatttgatgattcagtaactgtgcagggtttttccccagagatttcactgggttgcttgtaaataggcaacaaaattatatatgtctatgtgcttacataatgtcacatttaaagcatggaaacattgttaagcacagataagaaaagctacaaagcatataaattacttgaggcctgttttattcacttcataaattgaaatcctatgttaacacaagcaggtgaccatggcaacatttgctggttaggcatggaatattaaaagagggacaaa

SEQ ID NO: 57845 - DNA, 860 bp, Homo sapiens
agtcttttctggctgttttctagttcatcaatcagcttttgcttaattgcaatttcacaagtaatgtttgccaagtctgcttgataattggctatttataaaagaagaaaataaaaatcctggtgctaggccaaaatatcagaattctagctttcaagcagaccataaaaaccatcaactaggtatttttattcacttagtagttattagaaaaatttcctggaaaaaccaacaaccaaaaggtgaatgagataaagagtgttcattttggtcaaggacaatgctatttgtattaggtaagaatggaaatcacacaatgactaaatccagtaagagaagtaactcatttgtttagcacataagccttggaaggcaaatgtaggtcagtggtcacagaagtttctttcatcaagtatgaaatagagaatgttaagagttttctgtcatggtttaaacaacttcccaaaatgaatttttgcccttataccaaagggcaagtacctttttcatctgattcagaatctgattcatcagaactttcacccccatcaatgtcatcttcctcctcctcctcctcctcttcttcatcctcatgatcactcacttcttgactttcttcctaaaatgtgatttgtaaaaattaatagcacaatattggcaaaacaaactgactccctcattgagagaggctgctggagtacaaagtacggaaacataaaaaaattcacttgtcatcagtataaaaatgttaaggttattacagagtaattttgtcttaaatcaaaaagtatttcatctctcatagtattctacccctgactccccaacacaatgctttcacaatacataagattgagagt

SEQ ID NO: 57846 - DNA, 1406 bp, Homo sapiens
tttacttcacttagttcccctacaatgcttcttctacagttaaagagaatgacaattcttgccaaccattctaacatttgtgtaactgaaagatatgccacatagtttaattgttattttcttactatctacacctctggattattctacagatcaacagaaaataagcacaaaaaggtagaagagcaaaccttaaaacctcacatattagctattagttatagttctgatacagactgacgcagaagaaggtgaaactttcaaacagcatttgtggcatcctccttaaacacaaacgcagcttctggaaaatgatccagttaccactcttcctatcaactcttacattgtcagaggccctatagccactccaaccaaaaatctacaacacaaaacaataaattaaaagacacagagcttccaaagaatttgtgaattcagtgacaaggaaaggaggcagctgtagaagccaggacagcttagaagagctgaatccaaaggtcaaacaagccccagacaggttttagaaactcacagccacaacaagataaaaaaaaaaaccaaacaaacaaacagaaaaaaaaccttttctactctttttttcattagattatgctgcctaacatattttgttgtatggattaatgtactctctttaaaaattccaaatacccctacaaaggaagcttgttggttatcagacatttccactggtatgaattcctttagtcaaatggctttgttcctgagtttgaatttaaggagatcagagaaaaaaatagataattttgaaattgggagtacttcagggtagggcagaattacgtgagaactggaccacataagggaggaacggatcaaggtagcatggggacacaggaaggtcagtaagaacgaatggctaaagcagaaattcccatttttcccccaaagattggcctacacccatgagagggaaagaaggttctttcccctgtcttgccttttcttgctcccttctgaattattcttaccatattataaaatgggcagaaatcattttatgtgagtgagctgagaaatttggacatcatgtatttacaatacttgctagagaaaaatcagtccaaagtttcaattaatttttaattgaacctcttgtatgtgtaaggttgaggtagacccacattttgcaatgccctctctgacaaataaaatagataaacatgaagcatggaatgtaactcaaccagaatcaatgcatccaaacaggagctatcacttccaaggagctcctgtggaaaactgagcactttagtaaagctgctatccttccaaacatttctggaactctaggtttattgtatgctggttctttactaacttgtagggactcctttggctaaatgagggcttacctacatttt

SEQ ID NO: 57847 - DNA, 700 bp, Homo sapiens
tgtcctctggagaccagatgtataaataaacacagagaaatggcaactgcttctcacctggaaaagtctgaagacagaaagtaaaaaaaaaaaaaaaaaaaaaaaaatgagagggcagtaactcaacaagcaagctgcacttttgctgtttgacgagtcacagatatgtgatacttctcattgcccaactggacaaaatgagaatggcccgagaatatgccatttcactggaattttgctaaggaaagttgactacaggggcaaaggtacatttgctgtaagaggctatgggtgtatgggagagtaaagaggtaacaggagccaggggattcccaagaggtcagacagagagtagaactctcatcacagatgtagcaaggaagctgccctcaggaggctttacaaagaacccaagggtgtaatggccagctaatgaaagcaaaagagaactataaagaacatcaagcaaagaactacgaagaacactaagtttaaaaaaaaaatctgctcttcttcctcaaatgtgtctccactccctgttttgaagacccagaaacagcaaagtgagtatggaaggaggaatgaaagagcaagttgaggcagtaaggcgagtccccctttcccactgtaggtcattaagtcttcagtcaggatggagctaaatggaaagaaaagaagagcaaattggatgtttttggtt

SEQ ID NO: 57848 - DNA, 1067 bp, Homo sapiens
aatagctgggcatggtggtggatgctggtaatcccagctacttgggaggctgaggcacaaggattgcctgaacccagcaggcacagattacagtgaggtgagatcacaccactgcattccagcctgggtgacagagtgagactctgttaaaaaaaaaaaaaaaaagaaaagaaagaaaattaagaaatcgttttactgtctgagaaagtagctaatgtgattatagtggctggaggggcaaactaatagcttacacataatgtgttcatacttcatttttggcatgtttcatgggagagccatcaggtcttgtgtagacatgcaaggctctcccagctggactgagggcaaaacccctatctgaatcatcttgcatttccccatcaaactatgttgagtgcacttgatctagtggggctcagtaactaataaacggaactgaactaaattaaaacacatggaatggatctgagctgaaataaattggaatggtcagggatggaagttacttattatccttaaaaattttgtttctttagatatcggaatactttagtaacttctgctgtgcctacaatgaacttggagcaatagctttctttttacatttttactagctgtactttccaaaatgcctgtaatatactcaacagtagtattatctactttacacacaaaaggacctgactcatagagaggggtaacgttatttttcacagggttacttttacaccgctactacctcaaaggaagtcagtgaaacagaagggatttgaactcaaagtccaacagcattacttttcatcatcaaagttcattttaaaatattcaatagtaaaaagaaaattatgcaatgtgcaaataaacatatttgatagtccaaaagaaaagaaaaccacaaaccacaaagatgactgctattgcatcttttttgtttgtttgtttgagacggtctctctctgttgcccagtctggagtgcagtggcacagcctgggctcactgcaacctccacttcctgggttcaagcaattctcctgtctcagcctcctgagtagctgagattaca

SEQ ID NO: 57849 - DNA, 3413 bp, Homo sapiens
gcaccttcttcactttccttgatcagatctcctaacaaaattgcctcttattgggttttctgtctttttccttcccctttctccaccctggtgcagtcattaactggtattaaagggccaaaagagaggtagtagcagtgaataggagaaacagactaatctaacaattggataagtagccctagaataacgaagaaggcctaattaaaacttcaaaagccttataacaggtgattctaaccagtcataaaactgtcacctccctgggtggtaaaaaaaaaaaaaaaaaaaacacttaaaaactcattttattatttaagttaattaaagatacaaagtatacgaaacagccattactatgcctgacccaagatgtgtcactaaaatagtaactatagaaatgtttagaggggagaatttttagaataattttctggaaagactacaagactgggagattgttaatagttcctaattccttggagtgtagattatttttataatccttaaagcataaataaggagaagtgaattaacagtagactctcagagctgtgaaagccacgcacttactctaggatgaatgcttcattaatttttcacacagtgtgatgatgttgcaattttccatgagcaactatcagagctttccttcttgataagtatcaaaacagccgaaattacatcgaatactcgtgcctgtcattggccgaaatataatttcaatactaggatgtacctagtatttccagactcacaccctggcctgggtaacgttacgattacattgtatccaccctgcctaatgtcagtatgtttcacacagtcacccatttcacccttcctctggctaaagagttttcctccttctgtagacctctccccagtggattttaccttaaattccactcccattccaacacccaagaggctagatctgtctcctctacccacacgcgggggcatgtctagatccccgtgatgctgaaaaagatgtctcatttgcacagacatcagaacccgagtgggcgcgcggcgggccctgcggtcgccggcgctgatagtcagatgctttgtctcctgcctgggaaggccggagctgcatggacacgtatgacagacattctagaactaataaaaaagaacaccacagccccgcgcacaggcagctcctcccggacaggcgatagcccaaggcggccagacctgaggtgactgatcccgcgaggggacggaggggagtgacgagggcttttcccccagagaagtcaagacgccccccagggacccggcgccgcgcagccgccagccacctgcaaacacagacggcgtgagggcggcgcagtcgccctgccagcacccggccgcgcgtgccaggccagcggggactcactgcctcagtttcctcagccgcagaacccggccgggacgcccctcaggtcgctccaccccggtagccggtgctccgcgccacagccaggtccttgccgcgccctcaacccgccgcccgccgcccgccgccggcagactgtcctcacctgacagccacccgcacggagctctcgtccggggcgcccaacatgctggcggcgggcagcgatcgagccgttgggcctcggcaccgcagagctgaggcgccactggggccgcgggactcgggcgcagtaggctggggcgtctgcgggcgggcggccggctcacctccgccgcgctccagccatgttgggcgactgaatggaaaggtggcggcggcgctgaggcagcaagaggaggaggtgattcacggctcgcgggcgcccgccccttctccaccgctcaccccccaggatctggggcggggacaaagcgcgcttgaacggcgagcgcgcctgtggagaagccaacaggccgccagcggcctcagggcggccgggtgagtgcgccctgccccctccggtggggacgcggcctcccagcggccaggctggggactccacgcccgccagggcgctccgggctcctcgccccgcactgcgtcagccgccgccgcgcggctcagccccacctcgccctcccccagcctgcgccccgccctgccctcgtcgggacactgcctggcgctgctgggcagggaggcgagggggagggatgcctgccgccggctgccctcgcccgagggcgaccagcctgtgcgcccttccaggctcttctgggagaaggaagcagctagtgcacgcgctgctgccaggtcccttctcaaatcgaagcttgattcagcggcgcgccgggagccaggcagctgctgctgcggttcggctttgtgtcccacgcatagccttattgtcctctctgcagcttggactttgacccccttccctagcccccagctgaacgccctccctcctccctccccggagtcagtcattcatgctaaacggactcccaggtttgtccactgtctctggacagctgggctgttctacagttcatcgcccgtttaccagctcgggtgggatatggaaatgatttattcgagactcctgaatgcttttctgttcaatcatttgtacactggtaaatgaactgcaccctggtactgccaagtgttcccagaactgaatatatccaccaagacctgctgtgtagtaaatccttccaaactgattttctttcccttctggcctttaaaaagcacctcccaatcccaggattctctcaacattgacccattgtggtttctgtttgtcactattgtgcttccacatgccttcagatagctctgtggaaacagcctttattagctttgccacagagtatcttttgtggactgctccatacatctctataaacaaacatgtggcttcatacgaaatagtatcacaaattaaatggcactatccaaataaaggcactacctcaaatgcctgcaatctacaatcacatacctaatcatcttgttcagcagtgatacagcagtgtggctcagagaaggctgcaacactatgggaaaaacaagaagtgtttgatgatttaaacccatgggaaggccgatggggtatataattatagatagttttaaatttattctgtcccttaatctcactacccctaaatcttaacagacatgtaactgggaggtaaagagggcagagatgctgagtatccttctatagatcaaattggtgggaaagctctcctctggctactctttggagggcctttcctagcctcaaaatttatccatcaacaaatcagagctgcatttcaccctgccctggcaagcccatatctgggtggatctgggctggccaccttgcttcttttgttgatgaaagctgcaaggaaagcaagaatggcccagcacatttaacaagaaaactaaagagaaatttgtataattaagaccctctttttaaaaaaagttcttttttatt

SEQ ID NO: 57850 - DNA, 890 bp, Homo sapiens
tgtctctttgatctgttgctctttcatatacctcttggttttcaaaacaatacaggtaagaaaaagagataatcgggaagaaacagagggagtgccagagaagtgagaagcttatttacttctgtttaccctattattacattgagagaatattcctgttgtttgtgtagcaaagcaatttcccccacccacatagaaaaccttggtgattctttaaccatggctaagtgccaacctttccacatgacttggaagaagcttcaagatggtttccctaaagaaactcattgtgtaaatccagatgataagggtagtgagattgttgggacttctctcttccttgatgaagttccttcataagcttatataactttatctgctcgattgcatgttttacacagaacagatcctgccatagtaagtgtcataaatgggggtagatagtaatatttttcattctaaatatattggaatgttgatttttccaaattcctcatgcagcatgataatagaactttaaaacctcacattgcagcccactttggcaactcttctcagagctgtcaggccagtactccactgatagagtgatttcaccaaacaaggtggggccttttaaaacattacatcatctctacacactgagccaaggaaagatcttctcatatggtacctccagagtagcttgtccagggaacatttcaatgactcaaagccataatgattctacccttgcttgagaaaatattttgtgagctattcatcttgctcttaggcaatatagacatattgaattttgagctgcacaagacacttgagatcattaagttcaacccctttgtttttgcaactaatccaagatgtagttggtgaaagaactggaactaaaa

SEQ ID NO: 57851 - DNA, 779 bp, Homo sapiens
aagtcaatttgctacagcaatgctactaagccttccttgtggttaaaataattttctaaaaaaggacatgttaaatgacagatatttatccccatcataaagagaattttgcaacatacctactgcaagcagcaaaataaatagattgctcataattagtgtaaggtaccagattgacttggcagtagaaaccaaatctgtggagatgttcattcattcagtcaatcacttatcagatatttattgcacaattacaatatatttactaggatcctaccagtgctgtacagagacatgtggttgccttttctagcttttaatctataaaagtttgttcaacagtgactcaacaagggcaaagtctgttccagtacaacccctactcccaaagccatatttctttgctttgagggcagcaggacaatagatatgtaacctacatacacattggcacagtacataggtatagagttctgtgaggagctctggattaagccacatcacattcctcctttattccagtggcttttatagacccatattccactcaggcagtggcctgctagtctgcctctttcttaaataaacacactccttgtcctcaagaggtgcaccctgtttgccttttggcagctagatattcattaagaattgacaggtccaaaagctagagacctataggaaaattgagattaagatatttaaaacagcataccccagattcttgcttagatccttttccagaccacatcctcatttttaaaatctgagatcttgga

SEQ ID NO: 57852 - DNA, 571 bp, Homo sapiens
gaagatcttggcccagtccaggtgagatttttaaaaaaattctataggttatttcagcaattgtgatatgctacctaatgatctaaatgtctgaatactggagaaaattattttaaagaaaattttgagtctttaattcttttaaaagctttccaggtgagaaatctatgccttaagaatattttaattgattgcttatgagaatctctttggactgctggtaatgtgactaggcctatgtttgcataacatttgattctgcttgttactgatgagctgccaaggacagttcacttagggattcttactttgggttcacgtgattattgagcaattcatctgttcaaacatagtaaccagattactttatatcaaattgtgatgtccaaccctcacgtggatcccaagatgatttctctttcaaagtatagcaaataattttcttagcaaataaaattttaatcaattagaaaatgcatagattataattaaagcttgaaactttaacatctaatgtcatattgttagctatcatttttttcctttgaattgccagagttaagctagatca

SEQ ID NO: 57853 - DNA, 967 bp, Homo sapiens
agcgctcttacaagttggataatgggagcaggtgggtggcatgagccagattcaatcaggggtcagatgaccacccatccaagagggtctccatctggagactattctcagagcttgggggattcttcccctttcttatacctgtgttcaatcggagtcagttaccaggtctttcattcataaaaggaggttaagctagtcttgtaagggtaactttgtttaaaggtttgtaagagttgcatctgtactgaggtggacgtgtctcctggaaatctccaggccaggttgcctcacactgctactgctaagtggcacatagtgtcagccctgtgaggtgttccagtaggacttacagctatcattcatcttatagccaggaaatgtctctcatagtatgctacatccaggggagtgctagagggcagcaggagatagaataagcattgttttctggggcttatcacagaaactgcaaggaaaaagggacatctaatctgagcaaaaaaaataaaatagacttcaggcagagatcaaggagggtaaattctagacagaaggcacagtgtgagaaaagacatagagacaggaaattataatagatattagggtaatgacaagggatttaaactgactagaatctgtgtgggagagtggtgaaatgctgggaaaacaggctgggtgttacatcagagtgcagctttgagaaaaatatctctgctgaatgaatacggtaaacaatgaattgccaaatagggaatctatctagctattttagtgtttctaattacagagctaaagtgctgtattataggaaacaaatactgaatcagcgcattaagaaagtgtccctcattagcaatactattttaaatagtcaggaggtttgaagtttcagaatagattatttaaggttttgtatatatggagagtcaggaggtagggaggcggataaatagacacagataaa

SEQ ID NO: 57854 - DNA, 2430 bp, Homo sapiens
caaagcattcatttctctcaattgtctacctcatacaccatctattttaaaaaatgaaaatagtttttttttctaatacatatcctgaaaaagaaaattcaaacaacgaaaaacattatgtctaaagaaaacagttaaataaaaatactactactcaaatatggccattgttaacatcttggtgaaatctgtgctttcagcaaagatatactgagtatcaattatggattattctgaatttaaaagaagtaggtatagaaacaaaggctaaccatcccctaatcacatctgctaattggatcacaaagtcataatcagttactcattgctcatttgacagcagtattctaactgcagaaaaaatttaaagaagcaaaaacctttagagggcagggtttgccaactaaagcctacatcatgcttatagaatgagttttctccctgtcacacaatcatttgccagaaaattctggagcactttacagatggcaagcacatgcaaggtatcagagatactaaagatgaataagcccaaatctccctgctccttggtagataaaaggcaagaatgagaaacagatgaacaacgacaatgtaatggaaactgggtatgagctacctggaacaggggcccattcattttaacgatgagagctgggaaccgttttaaatgtgacattgaaaccgaatcataaaataaatttaccaggccaagaggtagagcaaagggcatttcagagaactgcttatgttgtcattaaagatcagtcagcacagacttattaaatatttactgtgtacaagtcgtgatactatgggttgtgaaaggagaaataggtcatctgaaaaagacatccaaaagacatacaagttgtctgaaaaggatatgaaagaatatttcttaatgttcaaaatcaaaacacttttttgattcatgtaactaaatatgaaagcactggtgatagggtttttatgttggtcctttccaaatctcatcttgaattgtaatccccaaagttggaggtagggcctggtgggaggtattgaatcatgggggaaagatccctcatgaatggtttagtgccatccccttggtgatgagtgaattctcactcagttcacatgagatctggttgttaaaaagagcctggaacctccctcttctctctcttgctcccactttcactatgtgaggtggctgttcccccttagccttctaccataagcttcctgatgccctcaccagaagcagatgtcagcaccatgcttcctgtgcagcctggagaacgatgagccaattaatcctcttttctttataaattgcccagtctcaggtattcctttataacaacaaaaacagactaacacaactggcatggtttaaaaattagatttgttatcatttcagccttctccctcctgtaaactcttcctgagtcacccctatttttgaatgacacttcagccctagacaaaaagcaaaagagaggccattcaaatgtactgagaggtgattcagcaatgtaaatataaaattttccacactggtgataagcacactaaactagacaactgaaggctttagaagtaagtacactgagtgtctggctttgagaaccagactaggctaatttggaaaggagataatttctactagtattttgttttgtattctgcccatatgaagttaaatttaacaatactaattgttccaatggccttaaatgatactcatttgggaaaggtcaactcactcatttgcagagaaattattctcaattttatttctccgaaaatatgtagtccctagaaaagttcaaaaagcataatgataaaggctaataattactgagaacttattgtgtgtgcatttcaggcatatgagatgtcatccataacaaataacttcctccaccactcatccaagcgtgaccccaacttcccacttttcctgcttgcttattaaatgatcttcctgtgacctactatgtgccacacactatgctaggtgctgggacatgtgagtgaataaaacagtcactgccctcgtgaagctgatttgggtattagacctcctgatgatcaccagttaactgacccctctacttgctattatcagttttctcctttctttagcttactgaccacttcccatcatttcaatatcctgaatttcccttctcctctatcattccattatacccatctggtaaaaatcctagccctatatgaatgcaaacatttgccttatctgtgacttcagccacacagccaaatgtagctgaaggagtcacactatagagcagatgagtagctcttctataattcatgatcaccagcctcaaacggattctcaaaaatcctgatctagatggctttagtcaatatacacatcttaaagtttcttagccccctgatttctaagtcttt

SEQ ID NO: 57855 - DNA, 1265 bp, Homo sapiens
cttactggtctaccgcacacattttcactaggctgtaaacatttctccaactaacaactgaaattaaggaaaacaaatgaatcattggatgactttaaataatcaggtttaagaaaaacatgcttattgaaaaccaactatctaaacgtcaactacaataaaaaattgttgtattgggcacttattatgcgccagcctaagaactttgtgtgcactgcctcactcagtcctcataattatcctatagtgggtactttttcatactcattttacaaatgaagagacaatagtgaagttaagtaatgtatccaacaacaacatttaaaaagtggcaaagtcccaattcacacccagctctgtttgactccaaagtctgtattacacatctctctaatgccttgatcccaaatacaaagaataatgaatgaattgcctatcacaactgaaaacagactgaaagatgggctcagaaagcaacaaaataaataaaatctgtaagcaatatgcactattaaacatgaaatgaatgaatgaggtcatggaatttcctctaaaagtcttttaaaaaggaacaaatgatcttcaattcaaattctttcatgcagcaaaactactcagcacatgtcatgagctaggaactctcttaggtccttgagactctgagaataatatgacacaatccatccccgtgaagggttcaaagtccactgaggaaggtaaagacacagaggaagttttaaaaggcattaatatggatgatggcataggctaaggttacaaaaatgcctagcatgtatggggctctgatttctagggtatggctgagtatagtgtatattcccctaaaaaaaaaaaatgggagaaggaacttcataaagctgcttttcactctccttgacagccagtgacataatgatattttgttagccaaaaaaagcaaactaggggttaataatttacatccatgatttgtacactggaaaggagccctcacgctaggcgtattggtcactggctcagtgccctgctctgtgctccacaaccaccctctcccctggtgaataataatgccatcataatggactgggacagggagagatgtttgggaaccactcctgtaaatatggacatttatacagttcacccaacacaactatgtaaattaaaacagttatataatcaggaataaagttaattttttaaaaagcaatacctattgagaaggagtttatgaattatgctagcctcaacttccacttcaaaaa

SEQ ID NO: 57856 - DNA, 1461 bp, Homo sapiens
ctaggtttctggaagtgctgagaggcaacaaccacttggactgactggtccgtggcctatcaaagattccacgtgcgctcgagggagactagagtgacaccccctcccccccgaccctcccacctcccgggagagccttggaggctggaccaacaaacagatgggctctggaggccagagaagtggaggattctctgaccctgggagaccagacggggaccccgatgggcaagaggcacgcaacacccagggtcaagggcggtgacaatgggatcccgggcgcccttcacggagcccgaactcaccgatgccgagtcccacgaccaggcggccggcgagcagtgtctccttgttgttggccgcagccagcaccgcggagccggcggtgaagagggcactggccaggaggatggcagcgcggcggccgaagacgccgttgagggcgcctccggccagcgccgagacggcagccgcccccaccgtgctggacaccagcagctcctgccacagcgcgtccagactgagctgccgcttgagcagcagcatggcccctgacaccaccccggtgtcatagccaaacaggaagccgcccagcgcggagaagacggccaccacgtacacgaaggcgggggtctcgtcctgctggaactgccgccgcgccgcgcgctccaggtccccgacgccgccgccgcccgcgcccgcgctctgcaggctggtgctcgattcggcggcagccaggaggctgcactccccggccgcgctcgccgcgtccggctccggctgcttcctgcgccgctcgcccatcaggctgctcaggctccgcagcgtgtactccacattctcgcttgccttgcgggacatagggcaggggcccggggctgcccggggggacgcggctccgcgggccggcagtctcggcgagctagacagcccgagccggcgggagcaaccgccgctgccgccgctttcttcctcccggcttccgctccggctgccacggcagcagccgccgccacggccgctccggggagaaagttgctgcccgccgcgctccgacgctgcggagttggagcccggcgggtctcactccacactcacgccccgcgcctgccgagctggcgctgcggagcgggcgggaggcgggaccgcgggtcacgtgcaaccccgggccggcggggcggggcccgggaaacgtcccgccccctccttgggcggggccaggctcagcccgccccggacccctaaaccccgccctcccggtgggtgcgacctctgacctaggctccctcatttagggctctggcaaccgtatggaattaaccctgccttccgagctgcagcggtggagcaagccaatgtggcgatgccatcaggcaacaggcttccagacgggaagccacccagaatgtttgccgtgtttggagaggagggagagagcacctaaaccagcctcactgtcct

SEQ ID NO: 57857 - DNA, 469 bp, Homo sapiens
gacagaagtggcttagccaaatatgagctcattttccccatgtacaagaagtctaggggtaggcagaccaaagatgatgcattagagatggtgctaacagaactcatcagaccaggctccttctcccttccttctctgccattctagtgtcttttatcctcttggttgtaggatggctgccccacctccagatgtcatttgcatgtctcatatgggaggaggagagcaggatgaagggcaaaggtgaattttattgcgaaaacaatgacattcccacaagcttcctacaggaagtttcctcctgcatcttgtaagtctagattacatgggggcaattctaccttaaaaagagtctatggaggagaatttttaactggacacagtgctgtccttaaaatttgtggaatgaagaagagatgaaatattaggcagataatcagcagtgtctgccacatggatcaagacattt

SEQ ID NO: 57858 - DNA, 2020 bp, Homo sapiens
gtagtagttgtatccatttcagaattgtcatcaggattgaagtaacagatgtgaaaacaaaactaaaattgtgaagtagtaacttccagtccaatcctcttctttgtaagtgatcttgaggacagacacatcacctgaaggatagatcatctttgcctagccttgtctacaatgttcttgctaggtttcttttcctaaaaacacattacttaggtacttaacagaacaaacaaacaaacaatcaaaagacaaaaccaaaaaactttggggttatagacacccatactcataagtatttctgaataccaagagaagagtatttaggtttgcttctctcaacttttcacctttcatttcatgtaccctgtcctttgtctcagctctaatagctctgagagctgattacttttcgggtgtcccaagtatcaggatcctgcctagtgcaactcaaatttccaaaagttaatttagtggccttttggtgaccagagcttcagataactcacagggaaacaatgtttatttcctctcccactaacagtcacaaaaaatcataaaaaagagtagcgggggcagttttgatggctaacccctctttccatcctttgggggaaaattgctcatctccctataggtggaactctaaagacaatgtattcctaaaaggggccatctgggcggtgtcctcttttcccagcgccctgatttctattcttagatctggagataggcggctttcatttttcctgctcccagttcccagaccttccgtggggccgcaggatccccggctggcgggtcgcggagggtggccggccgggctgcgcactgcgcgcctccgctgcggggctccgggcctgtggactcagcggagtccgctgagtcagtttcttcccgcgcgactcccggccgcgccgccgctgcggtggaatctggtcccaggaggcggcgtccgcccggggtccggtctaggcgtgcgtgggggccacggtcacggtcatcccagccaggcccggctccagcagccccacggccgccgccagagttctgcgcggcccgtcgcctcggcggagcctctggcaggcccctgagctcgtttttggggcctgagtgggggaggaggaagccgagcaggagggctccggagagggagggcaacgcggggcggggagctgcctccttcctcataaacaggcgggcgtgggcgccgatggggcccgcggggagcgctggctgcgggcggtgagctgagctcgcccccggggagctgtggccggcgcccctgccggttccctgagcagcggacgttcatgctgggagggcggcgggttggaagcaggtgccaccatggctagtggcagctgtcaggggtgcgaagaggacgaggaaactctgaagaagttgatagtcaggctgaacaatgtccaggaaggaaaacagatagaaacgctggtccaaatcctggaggatctgctggtgttcacgtactccgagcgcggtaatcacttgaaaataaactgtgcttttatttttgcaaactttctccccctccttacatttgcaaattttgtcctcctccccttgaccctgctcaaacccggactcttaaggagccgcaaactcccatatcctttccttagggcagaaagcagctgagaatttcaggaaggtcttcacctttttgacttttctccccgtttcagactaaaaaggagagggggtgctgtggattgtgactttgcttcttttccccacccacttgttttccagcctccaagttatttcaaggcaaaaatatccatgtgcctctgttgatcgtcttggactcctatatgagagtcgcgagtgtgcagcaggtaaaggcattgttttcacttcaactcattctcccttctgtttggaaggagacgttttactggcaatgttaatatagccgagagttcttggttattcccaaaatttggcttgaggaacctctgactgtgattttaagatgggaatattgttaaatcattacgca

SEQ ID NO: 57859 - DNA, 909 bp, Homo sapiens
taggaaaggcagcacacatgtattagtgtgacaaaagacataataaaataacaataccaattaacagggctaaaattcgcaacattccttcacattttgttttctgcacctccccccaccttcatattagtagaaaaaccaaggatgctgggaatgtaataggtctgttaaccatgctggttgtcaagagatactgagccttggttaaccctgatgacctctccaaatgataataattaacacctttgaagagagaaagttaagtactcaaatagagtgcttaacataccagaatgagtaactcttgacatggagttgcggaagattttattagggaaagtctcatagatgaggtgccatgtgaattgcatcatgaaggaaaaggaaaaaaagtttgccagacaaataaaaaggggagaactattctaggcagagacagtactgcattcaaagactcacaaacgagaagaaactaaacatctttagtggacagcaggaagttgaaaaattctgttaacatgaggagaggttataagggcaagttgttaaagaacctatcccaatgacagttctcggaaatcccctttagagagtttgttcaggcagtggtgtgaaccaaatattaaacaaatagacaaacaaaaataggcgttgtaggctttgcactttcgtctctggaatttctccaaactataacctcattgcccactgaggataattccaggaccctggaaagtccagacattactacctcattctctcaggctgccctttgtatcaacaacttgcctcatctcatgactcagacaccacactgatctccttgactttgggtatatgccttctggttctgttcaccataatctctggaaagagctttatgccctcctctcaccactctcaccctac

SEQ ID NO: 57860 - DNA, 649 bp, Homo sapiens
acatttaactgtaaaaggattatacaaccctattcattaccatgggccttgcctgcctgataagggaggcatatatccctgcatcatttattgactttgaccttattcaagtgacttgctttggccaaaataatataaaaagacatgatactgtggcatcaaagtagaagcttcaaatgggactgtgttgttcaatctggcttcttgctcatccactaccacaagaccaggcatatccaatgtatggattgctcctttagcttggatcccaggatgagaagatatatcaagcaaagtcatagccatagacatgtaatgtgtgcaagaaataaatgcttgctattgtaaactgtttagatgtatggggttgttacaaagcaaagcagaataatacaagcataattcccttttaaagtgtgtaattcaatggtttttcgtatattcagagttgtgcaaccatgactcaccaattaaattcctcagtatatactcaagagaactgaaaacatgttcacagaaaaactgtccatgaatgctcagagcagcattattcataatagccaaaaagtatgaaagaactcaaatgtccaccaaataatgagcaaaatgtggtatatccatacaatggactattatttgtccataaaaa

SEQ ID NO: 57861 - DNA, 1848 bp, Homo sapiens
cccactctggcagtgattacgtcctaagtcattacgtcgctttttaaataccaatttgtcaagaaaggtaactccatcccatccaacaacagacttgagcacgccaagtatcgctcatttttcttaatttgctctaagtttcttaataaactgagtgtttccaaaagaaaatttcacaacccgcacaaatgccatttccaaatttaactaaccatggctaatacttagaagtgtaagcgttaacacaggaaaatcagcatgagggacaaaatacacacacatatacactcacacacacacacacaatccttaaacactgaactagggcgccagcctcatgtttaaatatctcaacttgaactccactgaaacaagaggaaattctcactagccaggcagcagtaaggcttttgtggacacctcttattttcaaagaaccctctttttaaaaagttgaaaattaatttctaactgctttaaagggcgcatgactgggtcaaaagataaacacagaaagtgtaggacactctcaggcgggagcagcgcaggtttagccccggccggaggggaaggagggaaatgagtgaggggtcagagacaggaggaaagacgcgggagacgcggcacccaccggcgagcagcccgggctaggccgagcccgcgcccagcgccccgcgcccgccgcgtcccccacaccgggaactgcccgtacctgtccgacacgccgggatgcgctgcggggcccgcgacgccggcgcctctcacggcgccgcgtccgccgcccgcgagccaggaagccaccgcggcctgcggcttcccgccaccgccgcccgttccttcttccagggacacggcgagctggctgaaagcgtaaaggagcgagcagaagccgcaggccacacacagcaccacgacgcgcaggtagcgccgcatcgccccggccgcgctcctccttcgccgccgccgccgcgcccgccccgacgaactggagcggagggaggggcaccgcgcagccgcgggcgcaacaagttcctcacccgcagccgccgccgccgccttgcgcccgctcccttccttccctccccgcccaccacctaggcgagcgcagtcgcggctccggagccgaaggactacccgcccggaagcctggacaccgcctctgccgccgcgcgctcaagggtcagcggcagcgacgcaaccccgcccctcccccgggcgggagggctggacgcgccggcgcagttcgcgtgggagggacgcagggctggcgcgcagagggtggtgtgagtgcgcggaacgcggcgcgcctgagggctatagctagcgcaggccgacgcgcaggtgaatgggagccctgtgggtctcgaccgccgagagagggggagcgaaagcctcagggctctggaggcagttgacctaaattctaattatggtccttccacatggtagtttgtgacattgggcaacctaaattctctgagcatgtttcttcgtccctaaaatggagctactatcctcatcatggggtggttgtaaagattaaactgtttaacgctcgaaaaccgcctaacacttagaagacacttgactaggccagtttcctctccatcctcccccagcctctaagtttctgtgatactataatgtgcacgagccattttcaccccgataagctcattgcttcgtgtgtttggtatgcggaccttacctcttgcctcccagcagacagtgagttcctgtaaggcagggctcttccctttgacctttttgacctccctcacaactcattattttcatgtgcaaaacaattagtattctctccacagagcttctttcttccccagttct

SEQ ID NO: 57862 - DNA, 352 bp, Homo sapiens
tttaaactgaaatgtgataatgggaccaatggtacagccctcaggaaggaaacaaatataaaatatcttcaatacactgtgtaaatatatcatcacttttagcaaagaattctttaagagtaattgagagggcattcactctgacctagagacaaaggaatgcttagccttcagagatgaagcctgagcaatcataaagaccatgaaattgtggaggatggggaagtagagggcagaagaaacagcataatatataaaatggcacagtggcctaaaaaagaccatgaccatgctcagacaatcccaaccttgaaaacagatgtactctttaactatggcaaacagtaaaaaa

SEQ ID NO: 57863 - DNA, 1118 bp, Homo sapiens
gaggccaaggtaggaggatcacttgagctcaagagtttgagactagcctaggcaacatagagatcccccatctctacaaaaaataagaaaattagccacacatggtggtgtgcatctgtagtttcagctacttgggaggctgaggtgggaggattccttgaacctgggagttcgaggctgcagtgagcctggatgatgccactgcaacccagcctgggcaacagaatgagatcttatctcaaaaaagaaaaaagaaaaaaagaagacttcaaaggtagaacaaggactcaatcttctctgcaggtctaaaaagaaaaaagtttttcaaatgtctagaatggcttagacttggcctaacatttggcaatgaggcagaatcagttcaaaggtcagtctgacccaaaggattcaaatcccatctgtgcgtcacacaaacaaatcattagcaaactgcatccttctgctctgcagctatccagtcttggctttagtacttgccaaccttactctggaaattaccctgttcattaataagtcaattatggagaattatttcttccaactactgaaacttttgcttctcaacaccgttctgcagtcctttaatcttgtttttttaacattaccagagaggaaaaatattaatattctgtgatgcaatcaatatcttctctagtaacaataccctgttccacactgttctatacaaacacagattctaccctgaatttcagaaaccactaggaaaataacagataacagagaaattagagctcttaggtttaacttagagccaaaatcaaaagagaagagaattcagagagaggaaggaagaagctgagagggtcgtggtgtagaacacttactttcaggaacacagtgtcccttagatttctggtgagttgcccagagcctcttcagtttcaatccaaatgacaatgcttctctgagtcctcctcaagtaatgtttccaccactaaaaattggatctacaagagcttagatgtactggtaaaaaaaaaaaatgtcaggggcccccatgtgggcctcaagcctcttttaaactaggcccacttctctgtcctgggccaactcccctgtgtactatattccttctt

SEQ ID NO: 57864 - DNA, 2051 bp, Homo sapiens
cagagatcttttcatctcatttgtctaagagactgccatttaatcaaactaaagatataaaggtactttcagtaaaaatctgttcctgtgactgggctcatctccaactacttatttataaaatattagagtactggaataaaaacactaaataaaaccttgatctgacccttccagaagtacatgtagaaaaataagttttaatatattgtgtattctgcaatcagatacttttctttctttaggaacgaaattaaattacatcctttgctcctaaagagattttatgggttttccttgatccccacacactaacacaacaatgcagccaacatttttatacccagaatggggagaggggcattacacccagcgatacgaattaaatcgcagtagctaatgcctcccttaaataatttattctctcttggcagcaaaaaacgttacagcctcttcaattacccctcaccgcaaaccatcgcctgggttgcgatcaatgtgacccagttcctatcgccacagccacctccgtctgcctcctcccgccgggtccgccagtgtcatgggagggggcggcagccgcaagggcgtcctctggtcgccaccccgccggccggcggcgcgaggggcaggcccgggactcaccgggtggaggtgcccttccgcacatcgcacatcatgcacttgaaggcctcggcgctgttccggaaggtgcagacgctacagtcccagtaaccctcatccgaggacggcttcggctgccgcttcggcctgcaggacacaacccggacacgacgcggcgcggggtcaccagcaggccgcgcccggtgcccgggccccgcggccgcccccgccccgccccccgccccaattctgcgacccccgccccgcgggccctcggcgcgccgcgctccggctgagggggaagggagtcaggaagaggcagggcgcgagcgcggccgcagtcgccgccgccacagccgctctgacacccgggcggccgctccggtcgccgccgccatcgcggctccattgtggggcggccggcgccggccccctcaagcggcagcactcgcacaccagcggcgctgcccccgtgctcgccccggtgcccgggcggctagcgaggcggccacccgaagccctgcacgagggccctgccgcccgcacagtccgggccccggggcccgggcgctgttacctggtggggctcttcttgtctcccatggcttggctatcaccgcacgccgagagtcgccgccgcgaccgctctgtttgtcaataaggaggataataagccgggcggaagcgggcgggggaggagggagggagggggcggggaaggccgcaccgccgcgctcgggagccgccgccggatcccacgcagcctccagctgtcggggaaactcctgcctgggcgcacgtgaccctcgccggccaaccagcagccgcgccggagacttcaaacgcggccagcgcggcccagcacccgcggcgagttagccggcgggcggtgcgggggtggccgcggtggccgcggctgcctcgggcgccggcgccgcctctccgcgctgttcccccgttgcccccttggtacccccggctgccggggactgcctcgcgctccagagcccctctgaggaggaaaacgtctgtcccaccgactggcaggggatgctccgtcatcccgtgcgaagcctggtccaaggtagggccggccggcgttcggaggcctgtccaggtctggacagaagtgccagcccgggatctccaggtagaacgactttcctggcctccgctgtccttagctacccagcccccgcctgcagtataccggggggaaggcgggaaccaacacgcagcgccattgctacatgccttaaagcactgtctggtttatgcacacagatgctctaacaagtagggattgtcaaccctaacttagaggaattgaaatcaagactcaagagagattaggtgacttcctctaggctatataattagaaaatgacaaagccaagagtctaactctgttttaattccaaacgcgc

SEQ ID NO: 57865 - DNA, 1691 bp, Homo sapiens
ccccttttagtatgatgttaaggagtaaatttaagctttatgtatcgacaatataaacttctttcgaaacgctaattttgcttattgccaaattatgaaatgatacattatataaataggcttggtgcctcgaagagacagacctgtaggtatgtgtgtatatgtatataaagtttacaaatgtaatcagtaattttcacatcttatcttacaaagtcagcaaattaccgtgaaaatatcaggctcaaccaaattcaaatttctgatttaaaaagagcgtgcggtgtgtatttgagatgggaagatcaaccatcacaaatggaaaaatactgactctatggcatgccaattcgtgaaggaatgagaaaactgcctcatgtttggtgttatgggggaattatttagaaaacttcaggaactcaacatagatacgtcgctttttaagtttctcatttgaaactatgcgttacacgttctgctgagagccgcgaaggcaggcagaggttaaggtcctggaataaaaagggtggcgggagagaggggcagagcgttttggcagccgagtctggggagggggccccgcaggagagaaggccgcagctgaggaggcgtttaccttcaggtgggttgggcctgggagaccagaagagtgcgagccctcggctcagctggggctcaaccccgactcttcgtagccgctcgcagcggccttggcatcacgagtcctgggaggggtcaggcgcggagagcagataatagcagccacggtgcttcttcccgactgtttgagatccgggccccgaaggcgggcccagaggcgagcgcttcgctaacgtcattgcgcgcgccggaagtacctacctgggataacggcggcgagcggacggctgcatttacggggtctcccggagggccagagtcggtgagcgctttttacctttcccagagatggatgcagagcgtgtgcgggctgctaaacgggggggagtgggcgggagttttctgtgtcgggtcctggattctcctgcctttgaattgtgtgacaattctgcccatgcggttgagggtggagagacgcagtggagtttggaataaagggaagtattgagtctaagataggggttcgcctctctgtagcgccttaatatgcaagaagacgactgagctaggtaacttcagtgacccgagaggagtcaggaagtcggtaattttactgaaggtgttcacggtacccagctattaggcactttgggaactacaaaataaacagaccttttatgttttgttttgttttgttttctggtgaagatctcagtctagttggggagacgaggtcaacttggggagagttggattcacagaatgactcatctttagtatgggtatggacaagtgttgatcttcttggcaccttttctcttcctgtaaatctataatggctacgcactgctttttctctaagaggccataacatgcccaccattcctacagaaaaatcagaacgtaatgcaaggtaatttatacttctgcctaccagcacatacagaccaggcctctaaccactccctgggagcctgcgttccagcagcctggaacccacagcctctcctggagcctgcacaatcaatccagagtgaagccgatgtcttctatagagacggaagtacaatccatccagggcgcagctgaat

SEQ ID NO: 57866 - DNA, 656 bp, Homo sapiens
tcccccaagccccagctccgcgtccttccaggatcctcctctgcggggagaaaaactcgtctccgctcagcgccgggagcccgcctggggccggcgatcttcaaaagtaatcagagcccgcagtaaaaaaaaaaaaaaaaaaaaaaaaaaaaaaaaaaaaagtaaccatttcgtttcctgccgatcccgcccttcgatcccagccggacccagctccccgctcccgcccgcgggcggcgcctgcccagcctgctcccgccgccgcccgctttccaggaactgtcactgctgaccgtgcccctggccgatctccacgaggtcccgcgcgcacaattcctcgaaaagttacccacccccttggccagcctagcggctcgagcacctaccgccgcccgcccgctccattctcccgagcccagtgagtgaagccgctaagatgcaaataccctaggacgcttatgtaaacttccccctcccgcaggtgcacgcgcgggccacgaaacgctgggagaatatgaaaggccacctcttaaagaaatcatctccactctgcccataacaatgatgtcagcaaatggcacatttaagcaagttctcacttagaagggctcattagcatatgaattctcttaggactttccctgcatttcggagtg

SEQ ID NO: 57867 - DNA, 1493 bp, Homo sapiens
cctgaaggtgcagtattcccattcaacagagactgctgctgacagtgggcgggggagtagtttgcttggcccgtggttgaggaattcgttggcggaggagggatcctgagaaggtactagaaatactgaacccagtcctgcagaagctacttaacttcacagaaaactagggcgtcgttgccctccagcacgtccaaaggtgtccccgacaaggccagcagctctacctgtttcttctccctcctcttactctgcctgtccaaaggcacgacactagtccacgtcacctttctttgggcgcaaagggtatggatcctcaatgccaacctcgtcaccccccccccccacacacacacacacacacacacatacaagcccaccatcgcgcaagaaactcgaccccgtctacctcggttcagtggaaggcattcatttgcacaacgctgtgcgcatgcccggaagccttaagtgtttcagcctccgacaggggcgtaattaaaggggcaggcgcccacgtaaagacgcgccctacgcaatacgtggagtttctcactttgtggagccgcctggaggcgccaagatgaagcccatcggggaagtggggcggggccaacccggcaggccccgccccttcgcggcgcttcctagttcggctggttcttctgtcgccggcttcagcagcccgcgcccgggcaggtaaggcattccccgccttaatgcctcggtcaaacgtcgtccgaggtccgcttccaggcctcggcacctctgccccagggttgctggggtcggctgcggaacggaaatctctttatcatccgtgagaaaagttagagaggaagtgggttcctttgacagagcttactccagaagaaagacttgggtaggtccccggtaatcaagaagttcgtcggccctgaggaagagcctgaggcttggagggacgtcacccagctgttctggggcgcagtcggacctcaagtttctcacctctcaggccctggattccgtgaacccgactgcgaaatgaagtctcttttccccagaaccaggaagtcaggccagcacctgacagatgcctgtggcgccagcagctcgctgagcctccacacgattgtaattcgcttgtttctccggcctccaagcttccagggaattagaaagtggaggcggcttatgggatcagatgagtacattcgcagatgggggaaaaaagtgtacctgtcagcttggaagccagagggagacaaagggataaaagcaaaccctgtccaggtgcggtggctcatgcttgtaatcccagcactttgggaggcccaggcgggcggatcgcttgaggtcaggagttcgagaccagcctggccaacatggtgaaacccctgtctctactaagatacaaaatttagctggcatagtggcgggcgcccgtaatgccagctactccgggggctgaggcaggagaatcgcttgaacccaggaggcagaggttgcagtga

SEQ ID NO: 57868 - DNA, 2106 bp, Homo sapiens
tatcgaaattaatgcggataaataaaacaaagttttcagatttgagactattttgcttctgcgtgcgtgcagggggatgtgtgcggtggtgtcaaaaatctttacgaataaaacatacaattaagtgttcatctgggagaaagactcgctattaacagtaagagcttgagtttacactagaactcgttaagtgatcgcgagtaacccggggatatattatttgactcttgatgaggtgagtacctgcaggctgcccaatttcaaaccaggaaataatggaggtcagatataactgcatattgaactgtctgcacgcattacatgcaaccatacagatcagtttcccttggggagtatctaggaaaaagatcaaaacacacgcttacactcgagatttctcagaacataactctcattttcctatttggagagaaaatgcgggagagttttgggaagcacccctactgatgtgagaaagattctggcatggttctttttgtaatcaaagtcctgtaatattctcctttggaccatgaaaaagaaaactcgcctggttctcgacagcgtactgaagccccagtcgcctccactgtcccagctcttccctacgtgaccaaaagggggaaagttgggcgactgtcggggacggtggaaggcacgcccccttcaaccaggccgcctcgaaagccaatttccttcgctcccccgaatttcggatcaatctgcaacgtgacggcagcagggaccgggctggaggaggacgcaggccggcagcgcccgggaagcaggagcgcggagaggcgccgaggcccggctcgccccgcgagaccgacttccggagctcccggcccgactccagccctgccggtcctgcagccctcccggctctcccggctctcccggaagccccttccctgcgagtcgcgccgggcgctgttaccttggatgccggtctggtgggacatggcggcggccgctagctcccggctccggcgctgagtgcagccagcggccccggccggcggccccaggaagtggctgctcctccgccggccccggcgcgtcatccgcccgcgacccgcggccgccccgccccgtgaggttgactgagtgcccgagcgtccccgccgccccgccgcccttcctggccgccgggctgcggtccagcccccggcctcgctatcctagttctctgcttggggtcctgcttctgctcttgccgccgcctctcccgcttcttccgggggggacatgccgcagaatctagactgctcagtgctccgacgtctgctctctgacaaccccgccgacgccgccattcgctgcctcagcaaaggggtgctcaaaaacggaagtgatcattttaccaaataggcattttccagcttaaaaaagatgtgcacattatttttcttggtttactcttcctataatcgataccgtttagtgtagaaaagccttctccttgctccattgttttgaaagaattaatatagactgcctctcatcaaatttttccacgattttaaattaagttaatctcagactgttaacttttcttttcagctggacacatttagagactcagtgtatctttctcttcactccggaaagagacagccactaagagattagctgatttgagtatccctctgtggtcgattataccattgcaaatcctgctctgctttaggttggcagtttattatttaatccagtaattattcaaaattcacttggacagatttgtaaggtagcagcagatattacttaaaaatcttttcctttcctgcttttacaaacatgtagttccttcctgaaaggtaatgttagttttgtggggggtttggtttttttttggtactgcttctctactgctactaggtgggaagctagttcttatttttagggccttgaagtgacacatacacaaaattataatctgctaatgaagaaataatttattcaggtcaataatataagtgcaagttaatcactgttccagtactatacgatgtatttttcatgagtgatgaacaggcctgcaattgtttttctttacaagaatcacagcaaacaaggttatgttctattgcctgttatctg

SEQ ID NO: 57869 - DNA, 1510 bp, Homo sapiens
tgtgtatgtgtgcatatgtgtgtgtgtgtgtgtgataccaggcaggttggaaagtaagtggaagacttctcatactcctcatgggctctgcctctccccacccccacatccccacaccaccaacagacaaaaacagaaatcatgttttgcgacctgagattgctttcgaaagtttgtagctcttcgaggacattccagtgggaccctcattggttccctgcaggatggtggattttctgtcagccgccccccaacccccaccaggttcctgagtccgtccctcgcctgcagctgccgctctgcagaggcgggccggcccgggcaggctcggcccgtggcgcacgcggcccgcgggctggagtcagcccgtggtgcgggcgagagggcaggggcggggagaagccatgcctccagctgcagaggttgcacacagctggcatgatcgcggtcacctgcgcggcgccggtgcccttgcgctcgcgttgcccggcccgcggccgcggactttgcggcgggagcgcggcgcggtgaagcaccggcgcggagggcgcccggcgtaggcggcggcgggtgtgggccgagccggtatttatagctccgtgacagcagcagcggcagcgacgccgccggcccgtctcgccgcgcttcccagcgaggccgccggcgcgccgagggctgtgctcgaccgcgaatcccgtgtgcagtcgccccgcgccccgcgcgacccttcgggtgagtacgtgggcccgggcgttgggcgagcctccccagccgttcggtccagccgcagcggagccctcccggccctgccgcccgtgtcccggctgccacctcgtcactgcccgcgagtgcggaagcagccgcggaaccccggcccggcccccgaattctccggcgcctctgctcctgccttcctggggatggcagccaaagaggcagggtgaagtgtcaaggagggaggggggacgcgccagccctctggctaagggcagaggagactcccgggcgaaaggctcttggtgggagtcctcaaactcccggctccagtgtgtgtgcagagatacggcgggagagcagaccttgaactttccttgcttcagcgattcctagcctaggaactgagtaaaagccctatttttcttaattaaattaacaggttgcagttcgtaggtgttgttcttgggaaaaaaacaaagacttgggtgtttgggtgtttgctaacttcatcgtgactaaataaaactattttttttcattcctatttttgaaaatgccacaggcccacaagtgtgttctaccctctgtggaacaatgaagtatgtgtatgtgtgtgtgggtgtgcgtgtgtgagagagagagagacacgggagtaaacatcacatgcttatcaggaaccaaaaaggaaaaaaaatgagtaaaagtatgttgaatataagggtatgtattgcccccaattataaatgatgtattgtctgaaatccaaggaaggacttctaggaagctacagggt

SEQ ID NO: 57870 - DNA, 779 bp, Homo sapiens
cacagacaaatgtacctcctgccaggttcttgattgggcaagactgcccctgactgcagccgagcagggctggagctgggtcacaggtctacttcaggatctacattcagcctgaggcctatttctgggagcatggataagcatgtttcctataaagtcccttggtgggcagaactgctctcagatcacagctgagaggagctggaaccaagttaaagggctctttcagcatctacagtgggaccaaagttggtgggactgccaccagggcatgaatgggcatatctcctggcaggtccctgtgtgggaagaaatgctgtcagactacaggtgagaatggctagagctgaattacagggcctctttatggtcgacagctagggctgagatcagccggtctgttgtacaaagtgcatgtgggcatgactcctccctcattccttggtggatgattctggtggcaggacaaaggccaaatggagttgtagccaagttcatagggggctgaggctgtttctgggtctgtatccaggaccactgttcataagcctggcaactgggtacaagcctgccctctcagacagccctgatcagtcttggacttcgtatctgaatccaaagctcgaaaaaggcacttttttccatagatagctgccaaattattgttctgtgggaggatatgagtagaggatctcctattctgctatcttgctgactcctagaatagttcctttataaatattgtactagatgaggtttctaatttctcagcagacact

SEQ ID NO: 57871 - DNA, 661 bp, Homo sapiens
agatcccagaaaaattacaaatacagtatcccacgtaacttaagattgttacaagagttatttaaatatttaccttggggaaatataagacatccagagctgcttctgggagataatttaaataagccaccctgtgcattttgagggacgtacaaaaataaagtttggacttgctgccacatcctctagatacctgttatattcttcctgaaatttagtgacagaatctaccctgtagtatccaacactgtacaactggcaggtttgagaagtcatcttgagttggggtggtgctaatggacattccccaggagcacctaaagggaagctatgaaggcgactctaggtggtgtcacacacccttgcttccctgggcaacatccgcggggctttgagaatgttcctgggaacgttgatctccgagtgaaggttggagcttcctagtgaccactagggggatcgggagcaccgttgcggcaggctgccctctggaggccgtgaaaggaaagggctccagggatgttctgaggtttacaggctgcacacaccaaacagcagtggatgctgacgctaaaagactattaatgggccaggagtggcggctcacgcctgtaatcccagcactttggaaggccgaggcggatggatcacgaggtcaaca

SEQ ID NO: 57872 - DNA, 490 bp, Homo sapiens
aaatacataaccctacagcagggaacattcttcccattccttgcttcttagagggcctacactgtttaaaagcatctcctctcattttttcctcctatttatgtataactagaccttttggatccctatggaaaaacaattcaacaactttttttaaagactcattgttaagtgaccagattaacaaatattcaccctttagccttgggtagtatttatatcacagaagagataaaaggagaagccaccagcatggctatcatgttcttactctagctgatttgaaatgccctttacactttcatcttaactaccaaaacaatagatgagtcactgatcctcagcaagataagtcactgttcttcagcgaggggataagcagaactagttctcctatcaggatgaggagttaattataaatggtttggttagagtgggcttgaggaaatgctgatgggggcagggttcttctctctagtgtatcctccct

SEQ ID NO: 57873 - DNA, 789 bp, Homo sapiens
tacatgactacactgacaggtttcactttacattttggtgcaatccttggctatttccctagtccatttgctttccagcggtcctagacagatattccacatctttctacttaaaccttcttccatgtgctcactcctgctaatgaccttattttccattctactgagaaaacagaaattcctaaaagatagcttctggaccttgaggatattatgctaagtgaaataagccagtcgcaaaaagacaaacatgtatgattccacttagatgagctatctaaagtaggcaaaactcataggaacagaaagcagaatggaagttgggggaggagggaatggggagttgttcaacgggtacatagtttcagttttgcaagatcaaaaagttcaagagatctgttgcacaataatgtgaatatatgtgacattactgaaccattcagaaacagttaagatagtaaatttatggtattatttttttaccacaatctaaaaagaaaaaaaaaagcttcctgttcccagctaagtctgctctcagctaggtgctcgcagtctacccgcagtctcctgtcttgcagatgccgacccacacagctgtgtggaatggggacccaggccaacaagggcatcaactttgccaaggaaggtggtgctcaggaaccgggatgtggcgtggggctgggcagctgagtagcaactgcaggccaggggcctcagcctgcacttgcacagctggacacccaccacagccaaccatccttgtcctgcacgactgcctccaccaggact

SEQ ID NO: 57874 - DNA, 649 bp, Homo sapiens
tcttacacagagaggcaatatagcaaagtggttagaggcacagaccctggagtcagactgcccagattggagtctcgacccattggaaagatctggcattcaccatataacccagtgatcaaactgagcaccaatgatggtgggacaaccagccagtgtacacctcttacataatgcaacatgaagtacacagcatcttctgtgacagtctcttgccaaaaatgttttacctgaatctaattaagcctttgcctaatgtccagattacagaaaatactggacattgcacaacaccattagaggaaaaatatcacccacagctatcttgttttcttgaaaaagtcaaagtcatggggaacaaagttcaggagcataaccaattgcagtgtgtgaaatgtgactgggtgcttgtatgaagaacttagccatacaagactaagacagttggggagaattgaatatgaattgatattagtcgatttgagggaaatattgttaaatatcctctgtatgaatatattatttatgtagggatgaagtattatgatgtctgcaacattgacatggttcagtaaaatatacacagagagacaaacagataaatcaaatataggaaaatattcacaattgttgaagcttagtgatagat

SEQ ID NO: 57875 - DNA, 533 bp, Homo sapiens
taaggaaaaaagaaagcaaagtaagagggataaggagtacagatgtagaggggtcgagggttgctgacaacctgtttgggaaatttatacagacagagccttataccaagcgacgtggcttggcaagcagagcctgagctagccctcatttgattcccctggaccaggcattttgcagaataaatatcttgcacaaccatacagagtgactctggagattttgcaatttaaataggatggctttgtgaagactttagctagaatggggagctgttggtagttagagaagagagatatggtctgccttatggtttaaaagcattactttgccaaaaaacaaacaaacaaaataaaagcattactttggctgctatgtcatgggtggactatgtaggggacagaggtggaagcagggaaaccagataggaatataatccaagtgacagaggatgatgtcacagatgagacattggtagtgaaggttgggcacagtgatataattctggatatatttctgaatagactaaaaaggc

SEQ ID NO: 57876 - DNA, 3304 bp, Homo sapiens
ggaggccaggagttcgaaaccagcctgggcaacatagtgagacacccatctctacaaaaaaatttaagaataagccccacatggtggtgtgctccgcttgtagttctagttactgaactcccacctcggcaacagagcgagaccgtcttaaaaaaagtatgtggaagaaaaaacatgcacagtagatttagtgttattgtgataaccctagcacttcagtggaaaaaatataaacaatttcaatgagtagacaataacacatataaccaagatttcaaatataccttctagcccttttgagaagtcaaaattgaacaacctgaatgtaccagcttttttgaaaaaagttttgtagacacgcgatccccaaaacctgccgttcaaacaactccaagggtctttaaagtactaaatccctttgtatttgtcctatcggtccctttggtttccaggaaagcattaaaaataaaaataaaaactctctgccttaattttatttcacgactttcttttctcttattatagctttccacattgctttagaagagtttacatctaactctagtggtcttcggcttcttctccctctttgacacagaggactagtttcaattgtacaaataggctggacgcttcagcgattatcttccgaccactccctgtgtgctcgcgcgggcggagtagggggcgcttctccactctccgcgacctcaatgtatgcggaaatcctcctgcctttgtgcacacgtttatttagaaaattctctccacccccactcccgtccgtcccgccccttcttcttttgcttattctctgagttttgcctctcctcccaccccgactccaccgtaatcttaacctacccgtacagattccactttcccacttcggagctagagtaatttaagatccccccattattagctccacgtcgcctttaaaagccattcaaacgagttcgccttccagggttctgcagttgtgctgcagcagcatttccctcctctccagtatcagacgttaaaacaaagcaagccacagtgtgtgtccacagacgaccttggaacgaaaagctgccctgtttgggatcaatgctcagggaacccagtccactcccgcactcacgtgttcccgccttgccctccagctagttcccccgcgcgcaggatcgcactactccctctgcagtctcgcctgccgacttccttctgcgcgcctcgtaaaaccggggaagttcaatcattccgcagcgagccgcggcggccgcactgggcatgctcagtctccgggctccgctcggcaggcgagaggcgtcctccggctctgggctccggtcggtgggtgcctcggctcggctttccccggcgctggctgggctcagcggcccctgagcccaagcgacacacgccccgcggtccccgatccggcccctgggagagccgcgccgttctggaacccgggagcccccaacttcgcgccaagttcggagccgccttctgagggagacatgaaaaagatgagcaggaatgttttgctacaaatggaggaggaggaggacgacgacgatggggatatcggtgagcgaggggtccccgcgtccccacccgagagcccgagccgacgcgggaagaagttcggggactgcgcgggggcgctgtgctctccgcgggggaggttggccgagacgctcggccgctccgggcaggggaggaagcccgctgtccccggctgcttgcagactgaggccccggtgcggcccctgcggggctgaggcgcggggcgcgtggtggccccgaggacaggctcctgacgggcgggggatgctgcccctgaaaagcctggcagctgcggggacgcctctgcgtgcggaagtctccactcagaagcaactttggggtcacttccccgactcgcagagtgctagggttgcccaggagcctcggcactggggcgagccccctgggcggggtccggggagcaggcccgcatttggaggacagggtgtgacccatctgaatcctcgttaaagtaaaagccgaccgacggctctgggaggtttgaggcctggcggggcggccccgggaagtgatttgtggccgctaggcgcgcgctggaaaccctttcccatctgcggagcccaccggagctgtgatcggaggaggaattcccccaggcagggaggaccgcagggcctttttcactcgtcctgaggggccctggggcttggggagcaaacctggggtgacccatttctagttagagttaaaaatgcatggaagtgacaagacgaacggagggagagctgttttaagagcaaaaaaagaaaaaaagggcaaacaaaagggatgagaggaggtgaggaaggggaaaggaatgagaggactagagagaaaatcaggtccctaaagagaacactgtcgggggatgatgatataatgtgtccctccagaagactctaattaaattaccaagccagtctgttgtggcgactcggcttagtctcctggatgccaaatcaattttaaagcagaacatcctgctgatgttctaaagccctgttgttatctaataactttaaaagtaacttaattttaggagttgggtgtggtttttatttctgttacattttgggcacggaatatttcgatcaaaaaaatttggtaacttcttggttgtccagggacaaatcgaatagaggagattacactccatgatttagtttcacatttcattcattcatttaagaacaatttactagttattcatctttaaggagagagcaaatagtagtagtttttataggagagaaaactgaagcgcacaggttggtctgcccagcttctcacactttcaaacccaggttttctgacttgtaaaaccagtgaagattaatgctcttaccactgggtcactctggctgttactactgtttagcaagattaagtagtacctgatgattacataaaaatataggagtgaaatttaaaaagttacaataaaattgacacagtctgtttcccaggaaagtattattgtcttttatggtgagctgcactgtttataatgagtattgtaagtaaataagggcagaagctcaaatggaaactgaagtaagcaagaggctctgagctttgttttactgtgccagcagtagatctcagtttagaaagtaatttggtctagtctgtgtttacctattgaggcatcgtataaattcatcttaagcgtgtggcagtaagctctttttatttttaatgacatgtcattcatgctagttttgtccagtcaaacagtgtagataga

SEQ ID NO: 57877 - DNA, 5333 bp, Homo sapiens
aagattctgtctcaaaaaagaaggaaaaattctaaaatgtttaattttcctacaaaactagaatttttattccttaagtattgttaaagtttgatatcaaatataacttattaaaagagattaatataataccaggcaaaatgaacacacaagttattaccctggtagtttgagtcatttcaaatttactgatataaaaaatgaaatactctctatctaatttgcaaaataggtacgtgaattaatgcttgtcattttgtatgcttgaaagttgggagtgactcaacctataaccaaatgttagaacttaaacactggcaggccctcttcagcattatcagacctaagaaaagtttagacattccatatcatttgggtaggtgagagcaaaatgaaaggaagaaggctgtttttatccccaaatgaagtagagtttaagattattcactttatatttaagcctttcataggagttactttttctatgaaagccaaaattccatctttctcttactgcatttagaattgcagttctcgttgtccactggatttcaggctgtactctatttggaagattgccagaccatctcatattttctgcctccatttaaatttaaatagtacttagtgaccactgggtacatgcttctataacgggcatatcacagcctacaaatcatagaggagacatgaacatttccaaacaggccttttatctgctccaagggtaagcaaacacagcaaaaggcttttgagccatgggtaatcatggttttcctgagagttacagttgcctttactgtggctagtggcctgttttatacttcaaaatacttatttggaagagttcagtcaccatctttactagattatttggcaaagaaaaaaatcatctgaaagctgactggaatttggtagcaatgagtcatcttcataaatcaagcccactactttttgaaaaagtcatgtgcatagagatttcatttagcttagagcactggatttatcttgcctcacaatctttattcagtaaatatgtgcggtatatttaaggtgtagagataaggaagcagataggatcccatcttcaatagagcttatattctaataagtgataaaataaaaactaaaaatgtacacagaaatgcattcatttacctgatatctgttcagcaccttctgtatgtcaggtgttgtgttaggtactagaaattgagcaacaaagaagactgaagtggcccctgttctcaaagtaggcagcctagcagggaagacaaacataccaacagaataacagcagattatatttaaagatcgtgaaaaaagagactgaaccaggatagctgagaacagaacctgggcatatccaaaactagttcaagggaatgggctctcactgggagatggctgacaagtgcacctgttatttttataattctaaaaataacatggccttagattatcaactctttacaaaacaggtctatgagaaggctcaagatgtacattagattactgcgtaaaacaccacaaatgctttcaggctcacaagtccagtcgtactcagggaattcaccatgcagaggttttgtttataatgatttctacagctgttaatgcaccttgcaaagtggtactattgctagtggttccagtgcccctttgttccttgctgaaataatagccctgggttggaaggcaacaaaactcggtcagtcaccccagttctcttcattctttctttgcatttcagtttagcataattatcttcctttcttgtgctaaaggagaggccatggagagcttggaccgcagcaattctgtgtagcttccggaagtttccaaaggaggaagaaagagagggagcaggtacatctgttccctgcactccatcttttcctcttgaggaagggagaggcagggagctagaagccaacgggcctctggattctcagccagaaatggctctccagacttctactctactggctgtgggatgtgactcattcctgtctggaggaagagtttaacctgacttcggctgggagtcacaaccaagcacgtagggcatgaatcacaatctgtgagggtggaaaatacctactgatgactctgatatgcttctctcaatatttgttgcccatgaaaaatcctaatattagagaatcacactggggatttcctcccctgtgaatagccaaagcaccctagtaatagagtgatatggaagatgcaaattaaagcttgctttgttttcagttcatagggcaaaaaataaagggttgcaaattctgttatcacttgctgttaaacagtcctgtgacttatttttctgtgtagggatctttcatatgtgattgaaactagcaggtaatatatctgtattattgttatatctaatacctctaattcctttcaaattgggaatattgtctttataaatgccattgagatcaagtataagaaatattaacattatcttttgcctgtgctcttgtctgaaccctctattcctagtactgcttatttagtccagtgatatttttggttaacattgtaaaagcatattttacatatagtaaaatgtactgttaactgtttaagttatgacagttgtatagccaccacccaaaacaagagatggaggacatttccagcacccttgtacccctttcatgtcaaccttcctccacatggtccctgcaagcacttaaagacttcctccataaattgattttgcccattcttgagcttcgttctaaagaaatcatgtaaaatgtagttttttgtgcctggcttcacttagcacaatctttctggggattcatctgtgttatagatatcagtagtaatctagtgtattggaactataagaatatctagaaaatgtattttgaattaaatcttgaagtattcgtttcttataggtagcagactaacaatccttaaccttctaattctgtttttactttaaagtcaggtagcttttggtcttagttatttttgtaatctctttaagcagttcacataatgccttgccaattataggaaattagcaaatgtgttcttaagttggaagagaatgtgtgaggaaaattcactcctatctcattttacagaaattcagattttaattgtcctgctgtaattgtgaaactgaactgcacattcattctgaggattattgcactgatgagtttactgatgagtgtgacactggttcggagggaactgtttgcagactctccctatgtataaggagttcatgtgtaataatttatttctccagaaggtcaccttttttcctactgatttttttttactggtaaaaatattgcaaacagatattgttagtctcgtttggtaactgaaagagctctgagaacggaaaagttagagtgacctatccaaatgaaggagcagttcagtgttggtgcaggatattagattccaaaatatttgttcaggccccttttccaagttcccagggaagttactgacactgatgttggtttcttttaagaatgactcatgatttttcgagcctggtttccactcttagtcatcttccctgcctgagttaaaacaggctttaggctctcactgaattccagccttgacagaaccccccacccccacccctgggcttttgattcccacttcctagctcagctacattccagtctctggaaccaattctgactccaggcaggcaagatgagacaattcagcatttactatcagtccagcagtaacctttcagttctaataatttggcttgtccttttcctcctcagttgttcagactcctttctcagaaacatgcctaggacctcagtctctttagttctttggattctgtgttgctcttgtcagtgtttactatcagtccagcagtaacctttcagttctaataatttggcttgtccttttcctcctcagttgttcaaactcctatctcagaaacatgcctaggacctcagtctctttagttctttggattctgtgttgctcttgtcagtgtttcctaatcaccctcttgccctggaaataaagtcctctccaatgtggtgctacttctcctccttcctgtagcagactctggttgtggcctgtctgtgcctacagatttagtgacaggagctgtacttttctgttcccttctttagctgtcatactggtggtatcttaaatcttagccctaaattgtgatgaaactgttgtattttcacaagtcttccttagtcatattgtgctgtctgttctaagtagggctgtgaataagagtggggtacagtttcctgcaataagagatgggaggcttaacttcagcttggcacgtaagaaagatcaaatgtttactgcaatgtgggaaaaccacctcctgggcataatagaaatccaggcctggcagtaaacaattctattcaaaagcagcttctcagggctgaggaatgacctagttgagtggcatgacatctgagcagaactagcaaggaggcttggtggtatgccgccttttaactccagcacctgtggctcttgagcattctcctcattcttcagtatggaaaatggatattttctcagtcttgtgcaaaaacagcttcaagaaaagtcccctagtcaaaaattccagtatttggaagtgtaccaggagtccaaaaagttgagaactactcctggctttttccttccctccctcacactgacggcattcctgaactagcatgcctgtctgtctctacatttctgggtgactgcctcatcccaggtggccttcctccagctgtgagctgggtgtgttcccaggtatttaatccacccttggggcaagttcttccaggcagcctccagtgccccttccgggatcctggctggatcaggctgactgtccttggaagtgaaagaggctacatatgaaggggagaagggtcctctctgcctcaggagaaggaaattagttacaggtgcatgcataggcaaaatagccccaatcctgttgtgatataacagaatttagaagacatctggctcaaattttaattttcaaaaagtgataaattctgtgaagaggtaacctgtagagtttattgtcaaattaatggtagagctactgtatgtgccactgtcagttgttaattattattattatttttttaagttctagggtacatgtgcacaacatttaggtttgttacataggtatacatgtaccatgttggtttgctgcacctatcaactcatcatttacataaagtatttctcctgatgatatccctcctgcagccccccaccttctaataggccctggtgtgtgctgttccccaccc

SEQ ID NO: 57878 - DNA, 1267 bp, Homo sapiens
gagagagaatggaaacaccatatgttctattctgaaaataaagtaagagataaatatgtgaggagaacaggaaagcatgtacagcaaccaaagcaattcagtggcaatggcattaaatagactgcgttaaaaggctgcaacagcactagcctcccacaggcactgtaggtcagctcattcattcctccatggcgagtaaagagatgtgggaattatccaactcctcgaatcctgcccaggcagattcagtgtccttctttgccctctgtgcagctgtaataaccttgtatatacttttgttctagaacatactgcactgtggcagaattgttgataattcttttcttccataaggaaaaaatggctgatttttgaaagccgagcacttagcgctgggctcagtacatgtttactgaaagaaaaaggttgagttttatagcccaaaggtagtgaagtcagtttgtacagttcagcctgtacaaaggtaaccttaaacagctgaagatttccattatccttgctttgtcagcttctttcctcctttgcccagtgaggcactcaagtaagagctaatcaaggaaggaagcaggcagatcttttgcaaagataggggctgctcttttgaagggagggatttggtgcagtgttgaatctgatgcaatctcagactcgatcagcttgctaaacaatgttggcaattgcaaggcaaagcaaaggacaaaggttatgggagcaaataggagggcactgtgggtcacacttggatttgtttcaggggcactgcacaccctcatcagtcagaatcaagtaacctcccaaagcataataatgtgttgcatttttcagagctctctgggatgcatgaattaggtgctagtcttatgctatcacaagtcctgctcagagggattcagaggccatccagttaacagaatgtagggagagcttgaagagaggattgagaggaaccactgatacgtttaaaggaatgaaagattttatcatttgtattgagtttttagttttatttttatttttatttatttttttttaagagacggggtttcttgctctgtcacccaggctggagtgcagtggcgccatcttggctcaccacagcctcaaactgttgggctcaagcaatcctcttgcttctgcttcttgagtaacgaggactgcaagcatgtgccaccgcaaccggctgttttttttgtttgtttgtttgttttgttttgttttgtttttttggtagagatatgggggtctt

SEQ ID NO: 57879 - DNA, 1088 bp, Homo sapiens
aagagttgttgtgaaaggcatttcattctttcctgtcctccagtacctgaccacatgccaatacctcttcttcctgcaataataggaagggaaagggctttccttggcaacattaggtcatagtcctccccaggaagaaaggtctgtctggatcattaacgggcatagactatttttagctaaggaaaacaatttttcttgtaagaattgctatttccgtgctcagggcagcacatgcatcctttctggctgcttccacccattggcaaggggccagctctctaatggaatgtgagcagtcttactgctaatcaagatttatggtggagaccaggacgcctggccgctcattggatttgcagaccctccaagctaacagcggcagccttgagattaagtgcaatgcagaggctctggtgctgttcccaggccctcccttcttctctggggccagcttcttagccacaggtatcatctggcattattttataagctgtgccatagtgcagatgttcttttctgaggaattactttcatttctgactcatttcaggaaatgagacagtctatcagaggtattcttcatttccagacccctggagagttcattttcacctgggatttctaaccacatgggggcagtgctttatttacccagatgtgagaaataacagtaatgaatagtcttcttctaaggcagcccttacttccctgcagaatccagtgtgaaggcccagaggtagcttatgcccttattagtgtaaatatttctgaggctttggttttgtgatgcttgtggacatgctgtgtgtatgggctttggtgcaggaaaaacataatttagcaacagatttaaaaggtagtctggagtgtttctaattactgtttgtttagttcaccattgcctaataagtggatttaagtaacctcgggggtagggaatgtaatgttcatattacagtcaaccatgcaaatcaatttctaactaagtattgcagagaacacaccgtggagccattttatagaagtattccattgaatcttaaatttagacctgagagcattttggattgggcatttcccactgg

SEQ ID NO: 57880 - DNA, 738 bp, Homo sapiens
actgagtctgagatgcctgggacatttccaagtcaagatgttgcataggcagttggatatgtgaatctgtggctcagaagagatggctgaaatagagcaatgcatttggaacctttagtctacctgtgttaacagttgccagcagacaaagaggagcagggcttggatggagccctgaatattttcagaagtcaaggcgcagtcaaggaggaggcaccaatggaggaaatcagagaaatggaagaccctctaagagaatgaaaccaagaggagagagtcttcaaaagaagtcgtggccagccgtgtcaaagctcattgagatgtcaagtaaggcaaaaatgtaaaatgggcattaggtttagcagcatgcaagtcactatggaccttagagccggctggtgactgatgggggctgagtccatggtagaggagtgccagcgtactttgaccttatcagtagtagtaaggactatgttataatgcaataggtgcagtggaaaggctgattaaagttgttttaacttttttgataaccttttatctttattgttttattctgattacaaagcaatatattttacaatgagtcattgtaaaagttctaaacattagaaagtataactgagaatcatctccataattgcattctctcatatatagccactgttaatagtttgaggtgtatccttcaagacttttctgtacatgtgctattgctcgctctctcatacacactta

SEQ ID NO: 57881 - DNA, 1471 bp, Homo sapiens
ggaataaatataatttggttgattcagttatataatttaatgtttccatgtaatagcatctattttttctactctgtctacataatgggagctaagatttcctgctgaaactggtgaaggaagagttagatttaaaaggcccttcttacttagtgaacccagtaggtaaagtcagacaggactcgtagtctaagcatttctcatcttcctttcctatgagcctgcagggcctgttgattctaataccttaatgtcaccggaatccatgtatttctgtttatccccactaccaccatcactgttattccagcctgggttttcctatcacaacaacctcttagattgtctctcacttcctcttatgcatccataaggacatggtttaggggtgtcaaggccaaaggaaaacttcccctttgctttctgaaggtttgctgaaaatcactgacaagaggcagattaataggataaaaggcatacaaatttatttgatcatagttttagatgatatggaaaccttcagaatgaagacccaaagatacaggggaaattgtccatttttatgcttagattcaagaaagtatagacagccatgtagaaacacaattggaaaaaagggtctgatctaatgcgaatagacagaatggggaaacccagcaaggcctgtgtgtccagacgcttcttgacctctctaagcagcattccttctttctgggtaagactctctggaatgtggattttaacctacagtcaaacagtgtagatcagataagtactttatggccagaatcttatggccagaatttctttatctccacctttctgtataattttgtaaaaaatccctcaaaaggaattctggcttctaaactcatcttctagtttctgtggccagcctcaggggagaaggggattgagagatacgcgggcaggagaaggtcagagaaaaacttttgcttctaaggctgctgctaaggcctttattttaaaaggggtgttgtttgctgatgcccaccaggggctacctcgtccaactcccagccaggctgctttaggagtctcttcttgggctcccccagccatttgcaggcatctgttctccccagatggtcactggtatgttttatttacctaaagccttcacacgtaaaataccttagtgactgttgtcgtgtatctaagacctactgtaatgcttagctcatcctgcatgccaagtaaatgatagttattatgtgtgaaagtctgatgcctgtataaatttggcgcataaaaggaaaggacaaggacaaaagcaggcctcagatgaaaccacaaaggaccagtaatttaagacatttaatcctggaacaagcctcaggattattactccctagggaggggcaatctgagttatatgtcatttctgttatttctgtaattaacatgttaagtgcatatttaagaaattttaagtagcttgaatctctaa

SEQ ID NO: 57882 - DNA, 511 bp, Homo sapiens
taatgactggtgagtgctggcattcaggtcaaatattagatgtatgctgagatccagttttcagaatggaaagaagagtttcaggtacaagacagcgtggcagatctctagatatcgtgcccaatctggatatgtgaacatgtcctcattctcaaggtgatatgggccattcctttgacatttctttagttgcgtacgttgactagatcatagaattcctgaggttagattctgtaccctccttatcttgatatctgtacttacatcatctagctcaatccctggcacacgaatgtctttaaccacttgccagagtattgtatctgtttaccctgtggagctttcccattagttctaattgcgaatgctatataaatttcactacattgtttttttcttttttttcttttttccaaattgtattagtctgttatatctctatctggctatattgaagcagttatttgctgatttttaaaatttatatacaatactattctaatttcttcta

SEQ ID NO: 57883 - DNA, 559 bp, Homo sapiens
agatcctaatctgactgcttttattcagatcttggacaaataatttaacttcagcattttaactatctgtttttatttaggccagttccgttatttgttacatattctttccaggctagtgatattagtttctccctttttccccattatgtggtagaatgtcttctgccaagagataggaaacctggatttcacagcagtagagactggcactcttttctctagtattgcattctaatagtaccatattggagtttgacctacttattacacacaggcaaatgttgccaagtcagtgaggttttcctccaaataaagggccatggtcttgcatcacacatgggaggtttgcatgcagaccagattatctgggagctaactgccaacctgtgccactgtgcaagggaagagtgcctggagccatgtacagatgtggttctcattccaggcctaattcttcagaacttaacttccgtgagctcctgctggactccaccaaaggcaacagaatgtgggctacagagaacaagttgctttttgtacatttttcagatgtttg

SEQ ID NO: 57884 - DNA, 712 bp, Homo sapiens
agcatgctgggctggaagttaggtaatgagcgtaaggagcaccttaaaagtttggaacagctccctagtggatagctaggggccaggaaggagacagcccaactgtgatgggaaccatgaatttgtaataaggccattgaacagagttacatgatttttttccctaccagcacttattgttaaaacactcatcaagccactggagaagaccctcttctgactgattctcctactcttctaatgaagacatttgtctccaagagctaaaattcttgggcctgagctttcacatgctaactgaaattcatgactgaattttagaggataccaaagacacaggcatggatcctgctatgacctgctagtgagaccatctgggttgccctttgtacagcctcagggtgagtcatctcccctgaaggaaagaatgtcacagtgtctggtcctttcagaatactccatccctctactgtaccatgttttaggttttggtctaacacgttttccctagtttgcaaccactctgttagtcaggattcttacttaccagtatcataaatgagctgtaatttaagcagatcaggagtttatcagaaaaatgttagagaactcacaaattctcctgatgggttagataaataaggttagagataggcagccagaagcagtaccttaaatcctgccacaggagaaaaagcacagttgctgtcct

SEQ ID NO: 57885 - DNA, 1670 bp, Homo sapiens
tagtaagaaagacttctaagatgacctgatatgagacggaagcgccagctgacacaagtagttgccaggacagaagtttcatcctgaatctgagctttgatgtgatttagagcccagacagaaaaagacctgcttctctgagggcatggaaaggattcagcaagaggcggaggctagaagtttgggaggcaaagcaaagtataaacaaatagaaaccacacccagtgaccttagagttcggtgtcatgaagggtgatggacatgtgtggtccttggtgctacctgagtcacccccccccccccccccggaatgactgcaaaactgcagattctggagcttatctcagaccttttagttgggagcacaggaagctgcactactcacaagcattccatgtcatgcttgtatgtgctgaagtgggaaccactgatccaggtggcctggataactgagccaagagtctacgtaatataggccatatttacacttggcctcagccagtgcagcctgtattgctcaacagaaaatcccattcagcaggttttgatgtgttaggaaacgtgctacatccgttacctattttgaatcatttaatcctgacagcagccctgggcaatgtaggttttatcaccccgttttatttttttaccaaagttaaccagctaagaaatagagtgtggattcagattcaggggtgtctgaactcatatcccatccactttccacagcctcctgctgcctctctaacatcatcaaaaagaaagaagtggggaaagattgtgaggtcagagacgtctcctgtagtagagataatttcccctgagtaaagcttcagtagcagtcagtgaaaagtgagccctgagatcaatagcagtgggaaacccagcagagtgagccgtttgtactgcctgtcttatgctggctgggtgtgcacgtgtgcacatgtgatggagaggatgagggtctgcctggttttcttgcaataactgtccttaaccatcatgcgatgccttctcattgtcagagtttgaagtccacacccacatgtttaatcagccagtgtatccagatgttagatctgtatttggagttgttgttatgcctcttctgatgactccacaggtaaaccacaagctggcagttgcttgaggggacaacagttctctatgccacaggtgcacacctcattttactgccaactcagatttcttttccagacaaattgccataaaaaggggggaagcacttagccacaaggattctgagatagggaaaaaaacatgacataaaaaagagacagtgggtagctcagcggggcagtatccacgggtggacagagcgctgggacgcagtccaggctgttttctcctagctctgcactatgacctggaggaggcgtttcactcctctggtccttaaatgattcagcttaaaataggaattggacctattttatctaaagtcagattatgtcactttcctacttggtgccctccaatggctcctcatttccctccgaggaaaaaaatgcccagatcctgacagtggtctcttattcctaccctgcgtgctgtctgtgaaccatggagacctgctcctgcctcagggtctctgtcatcaccgttccctctgcctgggacttcttcccccaggtttcccactcctttgt

SEQ ID NO: 57886 - DNA, 1135 bp, Homo sapiens
tagtttatgcttttgttgtcattataaatggtatcttttctcttttggatttttaacaaggtttactgataacataatcctaatctctggcttctcttgaacaatcaggagatctggcaacatggagccctcattccaacatggcaactatgagctgtccctttccataggacacacgcttgctagtttaccacagttgacgggctgactccacacatggctattacttgcatgccctgcgggctgatgagttatttagggttgggtgagtcatagggaagttgacatcactgcttattgctgctgctcatgactctgtagcatcaccaactctggtccttgcctggctgacttctctgcatgagtgttcctgcctggcctgtgggacttactggatccttctagccctgtctgctcttctgcaacatgccctttggctctctgaccagaagcaaatgccagctctgcttgcctcgccacaccctccacagccttgcccttcctgacagagtcatccctgccccttgtctgagcatgaggcctaatggaactctatgttttcctcccatccacagttttagttacatatctgtagatgtttcctctgaaggtctgccagttaggagggcagggtctaaaacttgaggatattttcttacttcttcctctccgtggtatcacttaccccaaaatctctgctgccccatttttaataaggccgtgtcaattacaaacaaggagaaaagaacttctaagccaccactcaaattttgacttattatgaccacaaggactgcaactaacttcaagattcttaaggaaggatattataatttattaagacacttttatcacatatatttctgtgatttctattactgtcaaattctctgaatgcactgcatttgcatttgcagactcaggggagctcactcatttgcttgttctcagcatatttcttctaacgttctctaagtatagccttcccatgggtccatttctttttgtctttaacttgttagataatgccacaatatttcttttttcttaaaaaaaaaatcctaaaccacaaatcttctttcaacattctatttcaacactgagaatgaataatatgcttatgatgtctcaagtt

SEQ ID NO: 57887 - DNA, 523 bp, Homo sapiens
agttgagagtttcaaacgattacagggagattgattccaaagaaaagtcatagaaatagagaaacttcaagaggtccaagaaccaagataattcagttgttaatactattgtgttattcaagcacaatctgaagatattgaatgatggcaaactagcacctcacataacagggacatacaaagataagagatgtgaaatctcagctgaacagtattatctaaaaatattccaaagttctctgcatcgattttaatggctggtgagttcaacagtggacagtatgtaccaggtaaattaccaattgataaagtttgtgaactgtaggtcatcaaccttttttcctggaccatagagttttacctaaaataggaggctttaaagtttatttagtccaactcctcaaagccttcactaactcagattctcaatgatgcaaccaggaaaccagaaataagcccaaaataaatgtttgtgttacacctagtggagcctctttacaattctgcatcaaatctgcttatt

SEQ ID NO: 57888 - DNA, 1007 bp, Homo sapiens
taacttcactgagctgtagaatgagaatgggatttggagttgaagacttgggaatgaatcccagttctgccacttgctagaagtgcctctatttatccatttggagaataatagaaataagtatactatgtcatgaagttttgtgagaatcaaataagaaactgtatgaaaaaaaaacgtagttaacatgacaggcactcaaaaattttagtttcttccctggcgttgcaacttttagatcgtcaacctctttgagctttagttttctcatctcaaaaatgagagtactctctgggttgtactaagaactaaagagaaatgtatcaaggcactctgcaaactgcaaagcattactcaagtggtagttattgatttgtatgaaacatttggcatttttggtttctcagcacataaacacctcttctattggggggaaatcccaagataagtggggagcagctcactgtgacagccaaggaaaggtaaatattccatgagttctggcaggtggagcagacccaggcagaggctactgcttggactttgaaacttaatggagtaaccgaaagcacaaggtcaaagattcatcacagcagctgctgtggttggactgcagcctgttgatggcacaggtgcagggtggtgctgccagcagcagcagtgccagtgcccgcgactgtccagtggcaactgtgccagtggcaggatcctaaacagaatcagcctgtggtgggatcttggctgtgcctcatcttgcttggaaactgctcaagttcctggctctccaaccttcccctggatcctttttgcatgtagatatagagaggcagctatatttttgtaattaaaaaaccattattgatacacataccatcacaatccctaagctcaaggagtataccttcaaattgccaatgataaaatgatttatacatatgtagttatttaatatgttgtccaaaacccaaaataaccagatccttttagtatcagataaaaaaaaatca

SEQ ID NO: 57889 - DNA, 520 bp, Homo sapiens
aaaaaacagaaggaagttcattggctgaaatgcggaatagaagggaaaaattgaaatgaggctggagagatagacaagagtcagagattgtgagccatgttaaggattcaaaagggaagcaactgaggggttctaaaaaggggagtgtggtagccataggatgcatcattcaaatcatcctccaaaagaggaccagttgcgaggagcatagtcagctaacagcttcttccagctgtgcaccttctggttcctctgtagtgtgcatgctgaggtcatgcttcccttgggctgcttccagccaatgactaagcacaatgcaatgaaggtattagagccaggccattgctgcccaacacgggactcctctcacaggccatctacttctccatcagggtagccaagagtttctcaaaagtgtgctggcatccaaggtgctttctacctaattctccttgctccctcccccttttctataacatggtctgaggctctccccatacactcctcctcttccctttgt

SEQ ID NO: 57890 - DNA, 1387 bp, Homo sapiens
ttttattttattgcttttattgctcaggatctagccaagggctagagatgctcagcagtgtttgttgaactgaactggtctgaatttaaaacccctacaaactaaaagtgggcatttttagtagaagtttaactctcattgttctttatttcttcccactattctgcatttctttcaaaagaactttgagaataaagagaggacaggaaaaaagtttagagacttcatttgctgctagcaaaatttccattagaaagtcagtaagggcagggaatgtgtctttttatcactgtgtccttagcctagcacatagtagccaatcaataaatacttgttggatgaaacacacacacatacagacagacacaccccaacagtgtgctctttactcccagatgggacccatggaaatatatcccatagaaggaatgtctacataaggtgagagattggactagatcagttttatcacactggaaaactagttaaattattcacattggatcccaaagtgaaagaaaagagaaggaaagagaagaaaagcactaaatctcaattgtcattcccaaagctgaggcaagacttaagtagtagaaatcttcctcaaatacccatagcaggtagtaaaaaaacagcaggctgcatgacctctgcagtccctgacaaatttaagattatttcattctcatttatggatcctaaatatccaactgagaggctgtatttcaagacactgattgctaggtctagaattctttaaaaattattctcagcaataaggatatagctatacaaagagagacagaagcctgggcaacataataagaccctgtctctaaaaaatgtaaaaaaattatccagacgtggtggtgcatgcctgtggtcacagctactctggagactgaggtgggaggattgcttgagcctggaaggtcaagatcataacactgtattccagtccgggtgacagaatgagatcctgtctcaaaaataataataaaataaaataaaaatagaaagagagaaattattaaccaaatggagtttatatcattctaatggactatgggttgggagacaaatgataaacaagctattttagataagagtgtccagagaaggtaccaagagaccaggaagtggcaaaattaaagaaacatcatgacagtggttacatcttaaaatgctaggctctgcagtcattggtactagttaatggggccttagagtaatttttgacactaacttgttaacacttcgaagatctattcttttctgagtgtcctactatctaaattccccatatatgttgtttctaactgctcccgcttcttcactggtttccagctttcctctcctctgggcatatacaaatgactaaaatttt

SEQ ID NO: 57891 - DNA, 5910 bp, Homo sapiens
cctctaattacggcgtgcagcgtttgcagttacaaaagcaacactacatttttcccatcataagcgctttgtcatcaaaacagtaaactatacaaattggattgcaacaatttccactgttattggtaattttttaataggaacactttccattaatgcttgaaaactacgaactacattttattttatatcttgtcaaattagttggagaatatctattgtaaagctgtcagcacatctctaacattactttgtcaggatccacctgctctatgctgcccactataggaaatgcaatatggtaataagaaatgtaatagaaggttactttagtacaatctcataaaaaacatactctgactctacttggatgctaaatgtggtgtttttgcaagagatacagactgattagtggcaatcaaatttattaactgtaaaggacatcaataagaacagacaggaccagaaattgtatcttggtgatccacatgccaggagtagcgcggcagaggatggagagtggaacttagcgattgaggcgcagcctgcagaaagctgcacttctgcactagagattaaataagagggtcaaaatcaacataaactaaaccctttttcaaagtcatgtaaacacaaatgattgctgcaactggaaaacaacattgaaaataaatgattcgtgtgatgcatatcgatttcaacaaacctttccttaaacctttaacgttactcttacaagcaaataccgttaatagcttacttctgtcttaatttttctaaccacaggaaaattgaaacataagtaatctgataaacatcaagttttacgttgatgcttttgaccacagggtatatacagtgttaagaatttaaattctatccatcagatatactttaggactccattttgaagatagcctcttctacagaaaagaaatttttaaaagtcaattctccagtttctcatcacatcttaatttttttaaaaaggcttttaaacactagtatcactccaagtctttagcctttgatacttgctctgaaaacacactatcgtatgtttgtgtatgtacacacacacacacaacagtgacttaaaagtggcaaccgcctcttgaaaagtaaaaatatgtcatccctccattctgcccttaaatgagaaataaagacaatagatttgcccactgcagactgggataccagaaaagacgttctaagtctcgcctgagacaatattaacctgctatcttaagtcccaacttggatgacttaaatttcagtgtacgtgcctccgttcccactcttgccccatcagctccatcagcatcgtcatccccggctcggatcccggccgcgacccgccagggccgccggagtccgcgaataccgcccgctcccagcaacgaagctccccggctcccggccgaccgcgagttcctggagcagcagcctccaaggttcccaaagcccacgattcaggcgagcggtgccgaccgggccgtggactgtggcattttaaaactacagaagtctcactgcacgactggcgcggccgaggtggcccaggagaccctccaagagattctggtcagctgccgggagcgtggaagagcaaccaaagccaccaaggcgccgcgccaagtccccggagcagtcacctcagctttccgttctccctctagttacaattactccacaggcttctggcgcttccttcgagaaaatgaaaaactaaaaacgcgtagaggtggtagaagtcgttggcattttccgtttaatgtgatcccccaggctccatcccttaagtggggtttccaaactcggatgcatcctcagcagaggttttccatgttgacagatctctcgcctcccacaaaatggggccggggaggcggccgcggtctcctctatgggcgccgccattttgtgaggcggcggcggcgcggcggcaggagcccggggtgtgtataatggttgaatagaatgaccccctccagggaatccccggcactgacggttacgtaaggggctgtgcgcaagtgcggcgtttagggaatccgcacagcccgggccacgcagctccgaggcccacatctccacttcccctaagaggaccgatgggggaagggacagctgaccgggtcttcctcgcagcagcctcacccctagtcttccgcggccggcgagcttctccacctccccgggccgggtctccgcccctcacaggcttccgagacactcactggccctgggttgtcaggatcttcctagccacaaccttattccgaccccacttaagagacaaactttagttgggaaataagtccgtttcctagagtgagcaccggaagcaagctgcactatattacataatttttcacctccaaagcaatgttcccattggaacgactacctgaaataacccatccagacccctactaccctgtgaccttgggttaggcagtgactttgcccgtggtggccgtcactaaaatgggaataataatacgtttcacgtactgtaatcttaattaacatttgtagcaaagagccggctccaacacccctcgtaaatgcaaatttaggtggtagtatttgttgagatgttttgactcatttaagcaaagggtttttttaaccttcaaaatattttaaacgaggattacatttaagacatttgaaagcaaggaaaaacgttttattcggtatttattttaaacgcagcaatcttgaagagaccttactataaaaatgtaaaccttaattattattgtcgaagttcgatagattgcttcccaaccagtttagttagtttgcataactttgctcatagaatactccagtttgatatgtgaagccaaccagcggcaagatgaattaagagcattactctatttccacagaactaggacagacagttcacattgtatttaacgtatagtttgctaaagttagcgtgtggataattcatagaaaatgtgctaaccaggccccaaaatactagcatacggctcataaaagccgattcctttagattttacaaaaacagaaggtaacaaattgactttattccgatctgtgaatgttgcgtagcgtgaggggctaccccggtgagcttcctttcccttcagagcgccacaccggttctgtcgggcgggcggggactccgaggcggcccttccaacagccgggccggggacgcgaacatcgcctccacccctaaccctggaacaaccggtagtggccgtttccccgcaccgcccccctttccgccggctttgtgtgcgtgtgaaatgtgcggcacattgcagacgaaccctaagcccggcgagtcgagtctattgttccccgcgaggatctgccggggcggtgtggagccaggcgcagtgccgcggccagccctcgggggtcgctgtgtggcactggctgccaggccgtggcggcggcagagagggaggctggcggggagggaagcaggcgggcggcgcgcagcggctcagctgccgccggtgcttctgcccggggacgccccggcctcagcggccgaggccgcgcgtgaatgtgtgcgagggccccgcggagccggggccgaaatacacgctgtcaccgcgctttccacaaaccaccacacagacctccccctccccacccccagccccgcctgccctagccccgccgccgccgccgccgaaactcttgggcctctggccgcccagacccctcaccatcggctcgccttgcccgtcgcccgctcgcgcgcccccggcagcagcaccatgttgaatcgcgtccccgggctgagctgcctcagccggcggcgctgagaggcgggcgagagccgggccacggggagggagggaaggaaggggtgggggccgcgctcgccccgcggcttcgcgcggatccggcagtcgcctgcccttctagtttcgctccgatttctttaaacttttttagaaattcccctccctccttccctcctctccccctggcctcctgctccctccttcccctcctcctcctcctccccctccctccctccctccctgcgccgccgccgccgccgccgccgccgccgccgccgccaccgccggcccatgactgagccccgccgccgccggccgaggaatgggctccgggctctggtaggaagcgctgggagcggggggcgcttttaaaacaccgatctgggttttttaaaaacctcctttgaaaaaataatggcaaactcgacggggaaggcgcctccggacgagcggagaaagggactcgctttcctggacgagctgcggcagttccaccacagcagagggtgagagcagaaccgggggggcagcgccggggcgagccggggcgaacggggctctcccgcccgggccgggcacggggtcccggctgacaagtgcggggctttttctctcccgcaggtcgccttttaaaaaaatccctgcggtgggtgggaaggagctggatcttcacggtctctacaccagagtcactactttaggcggattcgcgaaggtgagtggaagttttaatttgtatttccctctcgctggcctcctccaaaaagtctcctttgaccccggagtgggcgcttggggctgggggggtggcccgcgggggcaaaaggcgttcttttcgctcccagccggtggcacggaggcggacggcggcggggctgtttttggcctggtggctcgcgtgcgcgcggcgggcgcggggctccggcgggcgggcggcccggcgccggctcgcgccctgcccggtgcccggtcgggccggcggggtctgagcgccgcggcggggaatgcgggcgtgcggggcgccagcctgagccccgcgcccgccccgctcccgcgccgcccgcccgctcgctcgcgagtcagctctgccgccgctgccgctctagcacaggcggagacacacagagacacacagactctgagagcagttttcgtgcaactcaaaattagcgcgggcaggtttaacatcgataatcggctgcgaaataatcccggcagccgggggcacagcctcggccccgtcgccctcggtttatacagctaacaaaagaaaccaggacctgtctccaaatagccatcttaggcttcaaggctaggcagaagctgtaggcctcaaagaagggcctatggagatggatagatctgggagagggatcggaatcggccccagccccggccccccccccaacccgcggacgtcgctgtccggaactgtattgatccttttgaacttttttttttttttttttttttagtgtaaacggaccgcgttgagatttaaaagggggcgacagagggacttgcgattggttattgtccgggcttcaaaaacaaaacaaacccaccaaacccccccacccccaaacaaaacaagtggtattaaatacagggctctctggtgaaaacacagtgattcaagaagcccttgcttagtaactcttaccgatcgatccgaaacacccactgatgccttaggtatctacagatctctgtagaatgggtatttatttcatagttaggttaagattttcttagattgttcacgttcagacaactgtgcctgtgttttaccaggtttctgagaagaatcagtggggagaaattgttgaagagttcaactttcccagaagttgttctaacgctgcctttgctttaaaacagtattacttgcggtgagtagtagtgacttttccatagtatttggaaataagggacttatggagagatttgtttttagcaaaaacaaaagcaaaccttgcacaccaaacagttcttaagctcttgttcatttcagactgagacacatttaatataaataaagtgagattgtaggaaggtgaaagtcttcctcaccaatttcaggatcgtttacatttttcataca

SEQ ID NO: 57892 - DNA, 677 bp, Homo sapiens
ataggtatactaggcaattctcttagtactgaacaaggcagaaatctctacctttatgttctagtggggaagacaaaataaacaaaatagtaagtaaaatatctagtatgttagacgttgagaagtgctatggagaaaaattaaaaacagtgtggctattaaggaataaaaaaagaggaagctgttgtttcatacagaatactgagggaaagcttctgtgataaagggacatttgaactggcaatcagaaagcagcaagggagacagttatgtgaatatcatccagtgcttccaggctaagcattcttggcagagagaatagccaatatgaaagtcctaaggcatgtctggtatgttcaaggaacaacaacaaagagatgaatgactggaatacagtgaaagaagaaaagtagatgaggacagagttatattgcactgctgtatattattattttttatttggggaaattcataccatactatctccttcattatcctaaatatctgagaataaaaaaatattaaggttggagttaactcaatgtgataaaatgtcatttgaaagttaacacagtattttaaaaacctaagagatgttcagatgtaatatattatccctttatgtaacgcaatgatttatttgtcctatttaatagtctaacctatgctattttcac

SEQ ID NO: 57893 - DNA, 3655 bp, Homo sapiens
aaagcaattgtttagaaacagacttgattacatgtcaaaattttaatacaattactaataaaatacaaaaaccaaccgttattttaaaatgtactgccctgatattctgctgctgaggtaggtggtgatatgtagaaattaatttttcttttaaaacgaaaaaataatgcatttattaatatgcttttcccaaaattcggggaaaattcccaaatcggagaaaaaaatttaacatcagcatctactacacaaagcattaaaaacatttttcagcagttttgcttaagtatcttaggtcagtggtagcatgttagccaaaatgtaatccaaaatgaatgaacaacagtcagctggtagacactgtatgtaatacaatacggaaatatattggaagtatttcaaaattcaacatttgaatccgtgaatgtctaaatcaagtactctaaatcaggcgtctacttttgaaacaatacttcaaaatacgtgttggtggcaagaccgccagccatctgtaggaaatctttttaatggttcaaaattcctaggtctcagaaggggcgactgattaggctaaatttatatctcccggccccgtagttgtcagcccaggtagcgaatttaaaacactgggggtggatgagtagtttgaagttcagatcaaggagtgaaaaaggctgatgcttagaagcgccggctcttccccattcgcgcactcgagaggtcacggcgtagtaaagtttggtttcactagcgggcttggacgctcgcgaccaaagtctcccaagaaaagccgacaccgcggtcgggagcgcccggaagctcagcaggacacgtttccactgcagggaggagggtgtctgtggcggttctggcgtggagccccttcccccccccccgtaggaccctgcacccggacggggacaggcttcgccagctaaggcggcgggagacgcgtaggccacaaggaggaaatgggacagagtgcgacagagaggcggcggcggcccagggccgggccgagcctccctcgcggggcagcgagagggaaaggggccctcccggccgcagcctcccccacttcgagaggtagctccaactttcctcccagcgcacgacgtcgcacgggccgcgcgagattccgaaactttgtcagccctcgcgtcgccctaggcccgctccagcgctctgcgccggccgctaaccctcgtctctcccagacagctgcccaagcccatccaccccgcgggtcgaccagtgtttacctcagaccgaggtcgaggcgctcggtccggccgcggccccacagtaggttcccaggtcccagtcactccgctgccaagttccccaacatggactccttcgtccgctttgtggtgttacagggtctctaggacactgactccgctggctcggtccggaggcggcggcgaagcagggagcgacccaggttgcgctgctccgcgcggcttaagccaccgctactcccccttcccccgccttgtctagcctcctccctcccctcccctccctgcgcgtctccctcctcctcccttccctcgctgtcggcgcgctaaggtgacgacggcggcagccggactcgccacattctgcttactcgctcgctctggccctgagtgcatgttcgtagtacccagttgggccgcaggggggcgctggcaaactgctgtttgagaccgagaagcgtggtgggtggagtcacgtcacgcggcctgtgagcgggaggaagggcagctgcgctggaggggccttctgggaaacgtccttccagcaccgcccttcgcccacactgcggatggtgcgcatgcgcagcgcgtggactttggcctctgccctcctttggcagttttacaggctgcgtcgcggaggacaatgaaagaggctttaagggaactggacaggaaggattttgcgcagggtgtgctccttatctttatggtaatctgatattgaaaagagtgtccgcatgtttgcggtggattgagtgttcacctggctgcgctgcccacctgaaatgcagcctgtggagtgaagagtcggcaatttggaagcccacctttcctcctttctggtgggcatttttttagatgccagggggagagctttcccgcctgactccccgagcctaggggctttcccatgtcttaaccccacatcacaaaattaaatttgggccaggtgcgcggtggctcacgccggtaatcccagcgctttgggaggccgaggctggcggatcgcttgagctcagcagttcgagaccagcttgagcgacgtattaagatctcgtttctacaaaaaataaaattaaccggccgtggtggcgcgcacctgcggtcccagctcctcgggaagatgaggtgggagaatcgcttgaacccgggaggcggaggttgcagtgagccgagatcgttccactgcactccagcctgggcgacagagcgagaccctgtctcaaacaacaacaaaaactttatcattatttacttaaaaggcctccgcgttgtggttagatagtgacgtgtgtgccatcctccactttttcccccggcgggttgttaaatgttttgttttacctcggaggtattttgactttttcaaagtcactgattatttaacctcctagtttctcttctcgtcgactgcagcaagcttccggttgctctgcctgccctcagtgtcccccatctaccagctgaccttccagtcctcccacccacgcccttgtcctgcttgcggctcccgcaggactaagctctgctccccgcgcgcggctcacccaggtcccagtcgctttcagccgcgcgctcacacgttttcctgtcgcctgcccccgttctgttcgcgcgtgctgcgctctccagccaccctgacgcctgcccgggatgagtttcctccccactttgccgcggccccgccgaccgaccgcttcactgccgccttcctgcattctcgcagactacgttgcggcgtcccctgctcccgccctgaggacgtcgcttttctggcactttcatcctatgcattctgttgagtctgctcactgtctcacactgtgaggattgggacagtgtcttatcactttcataacagcgtctggcacttgctgaaggaacacatgaatggcggtcttgtcgctgtcaaagtctttggagtttttcagtgtactgtttttgatatggggtttgggaatttaggtggctttactgtatttgggatatttgaggggaaaatgagctagaggcgttaaaatgctttcttctgatggaacaacaaaattcttatgaaggacctttccctgtcaaaatcagagcaaatagtaaaggatatatactatttggatataaagaatgattataaaggatgattgttaagagaaatagtgaaaattagtgtggaaagctataaccagatcaacatttatgagccatccaacagaataagggtgtagcttttttatgtatacaatctctaggattcactctagagagtgtaactcctgatatggactcctggtgcaacatgcttctgtgtatgttttatattttaaaaaatctatatatatttaaaatctaaatatatttttaaaaatctcagttttgttttaggaaagtgttttttctcaaaatttaagcccaaa

SEQ ID NO: 57894 - DNA, 387 bp, Homo sapiens
ctgcttttgtaaaataaaactaaacattttcttcctgcttttcactgaactctcccccaccccgagtttaaacactgtgactgagttacctttttgacagcaatgtagttatttgcataggttcaacaagagtctttttctttcccggtgcataactggacaaaattgaatgtcaccatggccttacttggaagatcatatgtgaggatgatggtcatttaacaggtatgtcaaacaactccaaggaacaaaggttaattttatttctgtagccaatgcctacaaaaccctggcttagtaccaaccttctagggttgtaacctagagcctagtacctaaactggtctataggatcctattatgatgggtggtgacaaagagcacttc

SEQ ID NO: 57895 - DNA, 3352 bp, Homo sapiens
ggggtccacaccaggtcagtaccccggaattggctgttttgcaagatttcgggagtaccaaattggcatgagacatttgacaacgaggccagccatgcaccgagctcaggttttatttccgttgtccttctgacgtcagaaaaagcacgagttgctgcacagtttcttttatcaaggtgacaaattacaccctcgctgggccctgcattctgcaaaccataaatttattttcctcctcccccttatattgaaaaatgtaaaaacccactgcagagaggtcaaaaccccttccaaacgcaaataaataccgttttctagcagaggcgtcttttttcacttttgctacacacatcaccgcggattcgtccgagaaagtacgtgatcctggcggcagttaggtttctaacagagaacgagggtttgtacaaaccccgggtccgcgccgcagagcaagacaaaggactctgaattgtagcaccaccttccccagcccaaggcagcctgtgaaaggcactgggagcggcgtgacgcgggtaccgcgaaattccttttgctgccatatgcacttgtgccttctctaactacagttcagcacaaacctcaggcgggcgatttggcaggcaaacggtgcccaggcagccgggtaacctactgggtcccagtgggtgctggggagccccatgcgccaggaggtggataatttagggggcaaggggctcgcacaagggcgaagatgcgctctcctcccggcaccgacccacgcgtttaaaggcctctgcggcaacgtttagggacgcgaactaggtgccgggggttggggaggaggtgggactggaagcgagagcagtctgcgcccaagaccgcgcaagaggtggccttttgttcgctggctccagcacatcccggctctcgaaaaaacactacctctgtcccctgccaccctctgcattttagaaaatcctcttcagggcaggaaaggacagtgagtcactgcaagcatcctttagtaatttctccccgcgccctcctacttccccgcgttacagaggggcagagcaccaggaaggacggcaaacatgccccggtttagtggtggtccgcggccgctacccagccggccgcacgcagcaccccccggacatcacacgatctcctctgggccttgcggacacaggaaattttcaccaaaggccggggattcaaacactcccagaacacggtcgcgccctcgggtcagctgcgctctccctccagacgtgcgtggttcctggctctcgtaaaaatggaaccagatctggtaccacactctgccacagccacaggaaaacacaccaaagtcacaggaaaacaaaccaaaaagtaagccacagcccacgcaaaggtgaactcgggggccctggcgcttcctcccgctgccgcgtgcgttcgggaagcacaggagacctggacttttcctctcctaaaagcaacatccgaaagcatcgggcacagccgagctctctctgctttcacgcccgcagagatgatttctacgttacctcctcctccgacatctaaatctccccttgccgctcgcccagccctccccgggaacggataatcaccttacctccggaaataaagggaaaggtggcaaaaggcgatgtggaggtgtccgcccttccggggtttttaccctcggcagtttgatgtcctttgtgtcaaggtctggctgcggaggccgggaaaatgtggcccccgtcagtaagggttgggcagggagcttggcgtggcctggcggatttcggaggaaggtgaagggcggaggctcctggcgaccttctggcggagtggcgtggccgccccagtccgcgctcgcctggctctcctcctttccgggccgattgcatcagaatctcccctcaccaccaacccccactcacactctgctcgccggcctcgcacttacatcgacatgcaccggcgctgagggtcacgaatcggagtcattctcctactgggggacgcgtggcccttccgcaaccatggcttgtgatggtttaacgcggacaggccattcctccccgtcccgcgcgcggtctcctcccctcctgtgcgcccgctctttaaccaaagctgcgtgtcagtgagccgtgccggtcacatggtgtcactgctggcggccgcaccttgctgcctccctcttgcagctctctgacgatgcagcgaccgcggctggcggagattgagcaacggggaaagggtgagggaggggttgcggggcgcgcgtgtgcccggcgcactgaagctggcaccgggagcagaggctgcgcgccgccctggcacctgcccctctccctcccggggcccggcggcgtgttcggaacccagctgcggctgcagctggagaatgagagcccttagggatgggggtggggcggctaaaggggcaccggcggaggacaggagggctgtgcgttccgctggggcctgcattttgggtacgccagagccccgccggggccgaaggagcgagggagttgcattgtgggaagggcgcagcatgaggatggccgcgggagtggcaggtccgagcgcagcccggagagccgcgggcagcgcctgggactacgggcagcgttggagcggagggctggccctgggcacagcctgcagatggcccgggttggcgggaaggggaccgaagtggcaggggcggcggggagctcgggcacctttaaaaaccctttgtccctaacctgaagcgggaggcacctcccctcttccggatccagcacccgcagacctggtcagcccttcctgagatctgccctgtggagctctgctttggggactgggtgtgaggtgaaccagaaggatttgctgagcaccgagaaagcaccggcctaggcgcaaagagccgggggccagctcttggagggcctggagaccccacgtggtcccgaccgaaggacctggtgcgtccaggttaacggagctggggcgctccaagtccgggggacgagggagcggcatggaggggagcaggggcaactgggcctggttcccttttttcccgcttactctttgtttcagacacagccccctttcactggctgggcacttgcttgcagaggagttgtgtcttaaaatggcgacaggaaatcccacctgcgcctcagccaattagactgtcatagcgcgaatttgcagggtggaaacgcgagctttttattgatagggaaggttcagtctcctgttcatggttcatcaaaacaggaaagggaaggtgaatcataattcaaaaattaactacctggagcgtttcaagtagacagtagtcattgtatttgggtgaattttgctttttcat

SEQ ID NO: 57896 - DNA, 3144 bp, Homo sapiens
cttatagctgttgtggtggggaagtcagaaaaaatgtgatttgaggaagcaatcaaccattgaattggggcaaagtcataaaagaaggttagtgtcctgcatggaagcctagagaaaagaaatccaaagaaaataaatgtatcaatatctctggactgtttcattaaacattttgggggttgccttcttagctagggttaccaaccattcccagtttgcctgggactgtggtttccaggatgcaggactttcagtgttaaaacaggacagttggtcccagttttctagcctatttctagtgcatgaccattgtacctctcctctgaaaactattctgcccaccatatgggtaggtcctggcagctatttgtactgtgttaccctgcccaccaaactacatttgagattagggtggaatcttgacccattactggccgatttgtattgagaaattgaactgaaaacaagaagctcagaatctagttgcatagttctatagtgaaatttcacacatttctgtcattgaggtctctaaaacaaagacagtttttgatttttggaagctgtttatcttttaattctctgaggcatcccaatcttttaaggagttctctccatctgccattcttgcttaaactaatttaaacggatttttttgttatcagaaatttgactaagccaaatgtccaggtgtatttctaaatttctacgtcaagacaaacagctctggttctttatttagaaatgttcctagaatattccttaagcttaatggaaatctctctggaatagctagctccctggttagagtaccgtatttttatattcagtggacatgtcaacccaatttctttcctttctcactcccttcctgccttccttcactcccaattttttttttttttttttttaacagggtctcactctgtcacccaggctagagtgcagtggcatgatcacggctcactgcagccttgacctccctgggcttccaagtggcagggactacaggtgcacaccacctggctgatttttgtatttttttgtagagatggggtttcaccatgttgcccaggctgatcttgaactcctgggcttcagcaatccaccctccttggcctcctaaagtgctgggattagaggcatgagccaccacgcctggcttcacccagtatatttctaattgtagataaataaatttgcattctggttcactttggtaattttttgtattttatttatttgagacaaagggtttcactatgctgtccagattagtctcaagctcctgggctcaagtactgctattgcctaagcctctggagtagctaggactacaggtatgtcaccacgaccagctggtatcatttttttctaaaaaatagcacatttgaaagtgtatggattttgttagaactcgtctgacacataaccctaccctctttccaatgagcatgttagttgcatatggtaggtgttcagttagagcttgcctatgaatacttgaaaattccacaagtcattcttcaattgatttgttgcaaattctgctgcctttcctaatccttctcatttgaccatcattagtaactgcatattaagtttcttggagacgtttcctgactttggaactaccatcaggcatacttgactatcccaaggtgtggtcttttctgtttcagctctggttatttcatttcacaagcctcaagcttttcggacttatcagtaggccatacctaaactagcctgtgtatcttagtaaccttcccacttccactgttgctcaagtaaaaccatgctgttacacgcaccagcttgtccattaattcctcttttcctgtgactttttcaccaaactgaacatatcccaacttctttccaggccacttgattgctcctggagtttgtgcatcattatcacccgagtggccttcttaagtaaaaaaccagatcctgggctaccctacagctggacctttgcaatcagacaaactaggcacgtttcagaaagctgtggttttaaaaggctctccagttgattctgatacattattgacctatttatttccatcagcagggctgagcctgggctcttatgatgcattttagcatcttcccccaactctccaagactttccattccttctcactttggaaacttagaatctctgggaacctaaactttttttcctgaccattcatcacaaacatatggacacctactaggtgctaggtactgcagttacaatgcaatttgcattagacactgcctatcccattacctgaaaaaaacaaaacaaaacaaaacaaaaaacactgctactcaggattaagcatgtatttattttagttcagttaaaacaaacatacattgtttcattgaaacggtgtagcactctttgccaacaagccatactagaattgttggcctctaacagtacagtggggatatttacactatatacacaaagttaatacacccaggttctcaaaggtcttccattacactagatcacattttatttcattacactagatcacattttgattactgcattttgaaaatgtattccttatttaaattttaaataagagatctgaatttgtaccaagatttcatgaaaaaatttgatgttgtttattgcaaatacaatttaaacaagttttttttagtgtttgtacacaatttgtcaatttttcaatattcaattttctgtacaggtacttttgggacaattcttatagttacataatgtgaattcatcaaaatgcagttaagaaacttacaggaatatatacacttgaacccaagacccaaacctgacattatatacaacctatttacaaatacatatggacagacaatatatgtacatagattatcataaatattgaaaaataggttagctttaatggattaatgttgttctataaataacattacagttgtaactgaaacatccacggaagacagtaatgcaaaatgaggtgacaagacagtggttttaatactgaagactgctcattaatgggaattcattgttcaggaacctcaaggtagacaagatagctcccagaaaatcatccattggaattttccctaggcacttgattttgaaccttaaatagccagaggattgg

SEQ ID NO: 57897 - DNA, 10565 bp, Homo sapiens
atcatacccaccacaatcagaaagaacaccatacacaacaaggaaaggccactggtatatcccaaatatcctataaggaggggtggcaggaatcagtattagtttaatgaaacagatttaaggcaaatatctttttcccactgaataactcaattctgctgggaagactttaggcactaaagtatgtgtatagcactaaatttctaattcttatgatactaaattatagatttatttaaatatacttgtcataacccaagctaataaaaactatcatttgcattatttcttacaaagcacaacatatagtgtcaattaaatattttggctcctaaattttgcatgctgtaagtcccaaagatatacctttctactttctagggctttttcattctgattaatttctattcagagaaagcccaactaactggtgagaggctcatttcaattctctttagagatgagtttgctcacctaaatttctaaacagcgacaaaggaagaatgaccaccaatgacaccaacagaaccaaatagttcccgttcagataccacaatctaaagaaaacagaaacaaggtcaaaacagtcacaaatatcctctgaaaaatatacacatcttctaacaggactcatttcataggaataccatgaaaacaaacacacaaaaaagacatgtttggaaaaagtttcccctgttcaagataggaataactttttaattttgtgtgctagatgaacatttactcaggttagaagtcgggtataaaacagtgtaacttttgtcccactacttgctctgggaaggctgccagctgattcataacacaaaatgcttctcaaagacttgatactaatgcagggaacaaagcttgtttgttaagccagtaatcttatctttaagcactttcagaaaaattgtacaccaactttggtacagctttagcatgtaatttctaatgctggaaactaaaaaattttaaaacaagtttttttccagatgcgttagcaaatattattaaatatttcaatgaggaaacgttttcataaaatgcacaggcaaactgccccccccataaaaaaaattataaaactcagtcccccaaaccaggacttattccaggttatcagagtatgttgtgacatcttgacccacctttaactccaaagacagccaaaaatatcccttttgaactttagaaaacattatgtatatcctctaagcctttttctttttaggtaaatcatgaattgcactgtcttctaaatcactattttcaaattctaattgcctcatgaattctgttcacttcagcagtaagcactctgcagaacaccaacacttaaagatcagcttaaaaaattaaatttctaaagccacatctgagataacagcacttctctattttgacgtaatgagctgcacatagggtgggaagtaaattatccttccccatgtttactttagataaatacctgtgagttcactgggatgagtaactttgctagaagaaaatggtttctatagcatgcccaaacattttctggcacatgttgagtatcccttattcaaaatgcttgggaccgaagtgttttggactttggagtacctgcacatacatatttgaagtatcttggagatggcactgaagtctaaacacaaaattcacttatgtttcctatacaccttcttaaacccatagcctaaaggtgattttatacagtattttaattaattttgcacacctgtcacgagatcaggtgtggattttccacttgtagtgtcatgttggcactcaaaaagttttggatttcagattagggatgtccagcctgtattttgcattgaacagattaagtcttaagaattccaaacttacaaaaataagacggattaatttttaatgtaattcaaagcttcagtcctcacttaggatatatattaaaaacacctataacttctttaagtatgaacataaagacagaaagcaagttctagaaaacctgttttagaaattaagatatccaaaattgtagggctagctactatctttcggcctttccttctccaaagttcgaatcagtttacggggatggggggccttcttggtcagtttcaaaaggaacatttatggataattaactaatcattttgtatacaactttgataaaaatgtatctaaccacttttgactataattgtttcttatgagtaaccttacttagcacctacccagttttatcttcaatgttcgttaatgcctggatcaccaaaggcaactcatatttcactatgaagaggtagcttgacatagctggaggaaaacaaaattataccattacaagtgcaaaacgcggcacgtgacactaaaacgcatgtgtcaccattctgtgctccacaatgagcataaagtctacccaaataatcttttgaaaaattcttacctccaatgttctgcattgtaattgatccagatgctgcaagctttccaactaatccaaatgccttatatcccaattgttcatataataaagaccctacaatttgaagacagaagcatgaagccaaggattttaaaagagaaataaaatgataggtatacattgttttagaaaaatcaagaatgctatcatacctccttcattggcagtcttcaaaaggagatgaacagaatacagggaaaatattgacacaaatgtcaagagaattctggtgagagaaggaaaaggcatagggttataaataagcatggctatatttaaagacaactctttctggatgtttaaataacattatgtgtgcaacttgtcctatttgtgtcaaaatgccctgaagaactggcatttcctctcctactaactggaatggcaacactgtctcttggctggcagtaaaaacttgcatcatttctcaggtgatagttctacagcattggttaggaacaaggatgtctacccactgagccaaacatagcatgagacactggaaagctcaacttcccagtgatggagtttgaaacttgtattttgattctggcaccacaataatgagctgtatgcttgccacctttctgcatttcagtagttccccttatctgtaaaatattagtaatatccgccactaaacccagcccacaaggttcttgggaaattcaactgagacacgttcaggaaaggttttaagaccacatggaccgtatacacaaaaacaggaatgacaggccaggtgcagtggctcatgcctgtaatcccagcactctaggaggctggggcaggatgactgcttgaggccaggagttcgagatcagcttggacaacataacatagggaagccacatctctaccgaaggaaaaacaaaaagccagctgtggtggtgtacacctatagtctcagctactcaggctgaggtgggggtatcacttgagcccagcagtttgccactgcactcagcctggaggacaaaatgaaatactgtctttttaaaaaaaaaagaaagaaaaggaaaagaatggtaagggggaaatgacactaacatgatactaacattttaagaggcactacaagctttactaacaactgggcacaaatcagagaactaaccattgtgatgacatactacattgcaccccatggcaaggaatacaggcccactattgtcacagttaaacaatgtctgtgctagaacaagtaggctatcagcttgactgtctctaagcctttcctcccttgaccctttcacttggattgagcaacagaaaaaaaataaataaataaggtaacatagagtgactaaagggaccctaatgtcacctaattttcctttagggtaagggttctccctcattccagctttactttccttccacctaggagagcccagagatacagactaattttttaaagaaattaaataacaaaacagggaaactcatagaaaaccttgcaaaggagaagagttacatgttttttaattccgtatgaacaaactgcacgcagtaccatgtaaggtgctgacaaagaaactgatgtctattagttaaacagaggaagtggctttacactaccattctaaatgccagaagttttacaggacctagtctgaagtgacactatcaacctcacttctaactggagaaaatatgttggtttaattaaaaacaaaccaaattaagtccttccatgtcttatactgaaatgacaagggatgaatagactttataacctttgaggtcactttcaaccttcagattgattctacttaaacaggttagctacagggttgctgaagtgcaccgtggcagccatgtggtttttggcccattttcctctatacctctaaatataaagtaagtactgatgaataaaatcacactttagcaatcttatttagccattaagcaaaatggtaaatcaatgacataagcacctattaaagtataattccaagagtacaagggttacatcagaatttgaccttcacttatgaaacagaggtgccatttagtatcatttcaattcttactttaactacactggctgcactctaaaactgcctccagtttttataccaagtgctaacaaggatttcaaatattcgacagtgatgccattcaggttctccactaagaactcctgagattctaggattctacgtaaatcgctggtccttcaccttagtaagagttctctcaaaaagcctcatcctaattgaagcaagccagagtgaatcctagcatctagtactcaaagccaggcttaacctcagtgtggaatttcacaaagcagagatttgcaaaggtctgcttttcttttcatgaacattctatcgtgctggagaaaataacttgagtagaaggcaccaatcagctaagtaaaacacatctgtcacaaagggacaattccatgctatatacatatggtttccttatctgtacaatgaaggtattaagttacacaatcctccacagaaattgccttagccaggggtccacgggtacttaaacttaagggctatgacacaaacatcactgaaaaatacatgcttaagattgcatgtatttttgttttgtgctttttccctggaaataagatccacatttttctatcatattctccaagagtcagtgacgcaaaaatggctaagaaccactgctctgaagtcttctgtacctccaagagtctatccacgtatttatgctggaaagcacagaagtaattaagtctaactgtgcaactgtggggggaaccatttaaaaataagtacttactaaagtattcattttttgccacaacatgtggcaatcgaacaggtctgacaaaagcaaacattaaaaaaacatgtatggattgcttttcagggtccagaaaattatgacctcctcgtcttaaaacaaacatgttccaggctgggtaaataccaccacaccttgtatgtttagagaaattttcttttccttattcacgtaaggggccacaggtccttaagaactgtgtcgatttaccaaaatgatttggagcttattaggattttcagcttctgatttgccaaaacaaaatttatacctaccctggctttagccatagtttttttaatatctaccatctgttacaattttgttttaactattcccactgacttagaagacttctggcttaatttgtcagttttaaggactgccctatttttttctagttggctttcttgatattgtgcagtatgtagtagaataaagagattttttggggtttctcatacttttaattttaagcaagtaacttttgagtcagctactccaactgtaaattcagtttctggagccaaaatatgttttaccatagtaactgccctgcatggcagactcactacttacacatacttacataaaaagagcaattccagtattagccatggcataagaaagcccaaggattccactgcccacaatcgcattgctcagattaaatactgacattccaaaggaagtagtacctggatgctacatagagggaaaacgataaccaaacatataacaataattaaatggagaaaaccagctttgggcaagttagatttgaattctaaaagtaaaactattcttttactccataaagccactgacagacaaattactatttttaacttacaaattctgtttcatacttcttcttccccaaattcgattcaagtaaaaagttctggttttcaggatctacatctgcataatggctgcaaaaaatatagacatatataattgtaaactggattgaaatatctatcattacacacaagactgctttaacataaaataccctccaacagcatagctctgatacaacatctttacttaatgtataaatattaactaggagttgactttcacaccagctatcttgtcattacaacaagataatcggatactctttcagagattacgcaccttctctaaatgctatagcaaattaaagcaatggaagcagagtcctaggtaactccctgaacccaacccatgcaagccgttttttcaaaagtgtcacaacttctcccaccttttcagagcagcttgcttggtggggtaggagtagttgaagtcgctgttggaactgtagctgctgctgtcttcatccggggaaatactgaatcgtcccatttcggccttcttcatgctaagcactgggaggaatcgggtgcagctagtagcgctgggctccttttgtccttggcggtgggtgcagcggcccgcgagtcggcctgcgaaagtagaggcggcgcgtcaggaccgcagcgccagcccgccgcggtcacgtgacgccgcccggaggcgcagcgcggctgattcatcccaggccaggcgagtggaaaagtaccagccgcgcgcgaggggcgggggcgcgccgaggggcggaaaagtacagacggcggagccgcggggagaacaaagatgatgccaccgctgtgttgcggccgtcgaggccccctactccggcagatttcagtatttcaccctctctattgtccctcgtcggagtggagggggcgagggggggttctgttttgctttttcccagtcgctccaaacttgcacaggcactcagggcacacatccagccccgaccctggctcgtgtgcatgcaacctaggcgcacggctttccgtttctagcatttggaacagcaatgctgcgtaatctgtcctttactgcccggagtccccacacggagaaatgcctctgccgcagacagccttccccaggaggcggaaagggccgacactactcctctctcgaggggggcgaacgcccgggccccgggagctgggggtttgtttacacacgcgcgccagtgccctcaagcacacccgtccacaggcagctggcccgcgagtgctacgcccgcccagcccctcctatgtccggaaagaaaactgatgcaatatcgatcgtcgattgtcaaatgttcccaactcgtcttccccaatcttggcctctcctgtaatacatgcccaagcccacctccgccgcccccagattcctggctccctggacttaattttttttttttattaaatgcaaatcagtcacaagacttgccgcagcagagccgctggccgggctagctcccctccccctaatgggaagatgcggctccgcaccgtgcaggcacgcggcccccgcccagcgcccgctctcctacccacgtcgcgggcgcgacacccgcgcggcgggccagggtggaaggctggccagcccaaccgacaacgcccgcctcgaaaggaaacggaccccgcggccgccttcccgcgcggcccctcccggaagcccctcccccactctcgcccgggccccgcgcccttcccacagacgcccccccgcacgcgttacctcggtggtctctattctcacgcagacgtcttcagtgggtttctctcagtcaaatacaaatcataaaaaacaaacaaaaaatttccccaaatccaacaacaggcaggaaaaataattttaataaaaaaggaaaagacaaattgccgccccaatcctccggcgtccgccgtgtcaagggaaaggcgcgagcgtgcggtaacgcgtggtcgggctgctgctagcagtactggaaaggcgttctaaggcggcggcgtcgcgcggctgtggagcagccctgcgagcggcgggttatagcggcaccccggggacgcgtcagtgggcgggaccgcggccgcccgggcgccttctctttgtgtatcaacaccacctgggccccgcctccgacccgcccagacctaggccccgcctccctgcccctccctctgcggcccgcgcccgcggcccagccccgcccgcaggcgcccccaagactctcccgcaaagcccaagcccactctctccagctttctagatagtctggaaagacccccagatgcttcccctgcctatccttttcagccagggttggtgctcaacacatgcggttgtctttgaggagccatctccttaaaattttctcctgtccgagtcaccagcagtccttgctttcgggggacacatcaaggcttttgggggacaccaccctcccaccaaacactttcttgattgttatttttgtgatttacagtgaagttttgtctcacaaacttgggccaaggcagcaaggttgtcctgatggtttgttgttctttcttttccacctagacctgctttcactcttcaaaactagccggaggtcggcgagcagctccttttcgggatgtgctttttgtacggccatggaaactggactagcggaaaggctaccttttggccagcaagccaggccccttagaaagaggccccagtggggagcccggcgctcctaaggccgtttgggagtccccagttttccactcgctgacacgttgcttctcttatcccaccaccgccgccccgggcaaaggcactgccttgtctgaatgcgggtctgaggcgctttctgcggagcctggtcctttcccttcaatggtgatgtgtgtggtcttgctgagccaggcaactagggggacccttcgctgtggaaaaattggtgctgcgggaaaggcaagactcactcccttgcaggaaacaaagaccccttaggagagagaaatgttcatggaatgaatgaataaacaagtttgacctactgctctcttccttttggggacttgggagaaattgggcagggcatagaggaaagggctgggtgtgatcgcagtttttgctttcaatgttttactgaggaaatccgtacaactgcctatttccgccgcacgtgaggcttcgggtgccctcgcctgcaccagtgtttatgattgacaagcgaggtcccgatttcccccatcacactcctgtgttccctaccccaaaccttctactctgttcaggccagtcttccctaccgcaaaccttctactctgttcaggccagtcttaaataatagccattcttgctttggtgtccaatctcctctcatccccttaaatgccgctgtcatgcaaggcttagtcttcgagccacaggaaagcgccccgcatgccttaatccctccgtactcagccctctttttgcaggtactattttctaaaacaatatggtgacggacttttaaaaatccgtgctgtcatgcactcaaaatcgttccagactatttgtagtatcatctgcccaaagattgtgaactccccaagggcaggtttggaatttgacacacaattagggctgaaaaaactatcttccttccacatacattccccaataaaatcaatcaactcttcttgtcacaacaatcttggtagtggtaggttagagaggagtcccaggaagtttctttatattaggtttcaactgataacaatcaaaaggtcttaaaccactttttcattccagatgaatctctggtcgtttcctctgcccagttagaggtgctaaggaggccctcagggttggtagttatgggtggcaagtggcactataagtaaatctcatgtcttttggactttttggtggtttgtattgcaacacatatttaggagaagcacaatacctgtacagctgagggcaaagtggagggcaggggcgggggggggagctgcaatattgatctggtctctgtatgatcagaacttgaacagtaaatgacaaaaaaagaagggtggaggggtgaaacttccatgtttttattgccagtttgattggtcttttcgagggccaaactgaggcatgcctgctaactccatcagacttccaactgaggcctgatgtgctctgagcaattgctgttatgctttgggcttgaatgcattggacacagtgtcctcattcaatttctgggaaacgatattgccaaatacctattggtcagtgcgctataattttgtttgatttctaagctaatgttctagaagagcagcattttttaaactttcagaatgggaccaagtggtggatagtgatgaattcagtggattagtactagctttctattttcttcaatgcagtagaatagaataattttttttaaaaaatcagtatgccatatgtactattattctgtaaatctttt

SEQ ID NO: 57898 - DNA, 6313 bp, Homo sapiens
atacatgcttaaggttattcagaatgtggtaaggtcacagcaacaatcaagaattaagctaaaaaacaagctgtgtatattcttagtaaagaaaatagaagttttattgaagtgctccattgttttaaaaaattaaaaatttcagatccttacaattttccaaaacaggatcattaaaaaatacctttattttaatacttgttaggggtcttcttgtctaaagagaaatgacagtgactgaaagaaggtgtgctacccaaagcactcgtaggccacgatgaacctacattcctggccttcagtcagtttccggatctttctttgcccagggctaagatactgaaataacgatttattaaaattaacacacctgcaattctggttcttagatgggaaccatttaatatatgggcttggttctgagatctttactcaataaaactcccaactgttttgactgacatcgttggcacttcgtgactgattaaggcacctgcctccggttccatgtcacttcgtcttgggacacgtggcgctaatgccacttttcaaccccccaccccattcagcgacattaacccgggcgacagtccagggctaaacagttgctgaaacagttaaatgtgtgttttattgaggtgaaccacgtacacaacaaccccctttgagtgaaacaattttgttgtgtaaccatttgtcacttctacatggatgaggtcaacgaaatcctcaaagttgctgtctcaggaataaattttgttcgtggttgggaaaacgaagtggagaatgttatgggatagagaaaatagcttattttctcagtggttaagtgggagtgggtaaaacacaattggccttgcatgtgctttgtttaaacggcggtgcagtaattctaaatgagaagacaagacgcccatcgtcaccgtcttctccctttgtctcacattccgcccggagatgtggggggtctcactcaatgcggaacggaggtggcgggggtgcggcgccccagaggcgaaggcggaggcgccaggacgccgctcctggcctctcaggataccagcaggctacacgcaaggtcgggggcaaggccgcgtggcggcttggagccgcgcgaaggaagcgagggctggcggccccagggcaaaggggtctggcggcgccagcctggggcgctgcagcgggcggggcgtgcgcagcgccgctccccggagagaaaggaacctccgcaatgtcggggcccggctgcgaccggaaaacggcgggggaagagagaaaaggaggagggagggggaaaaggaggtggggatacgaaggagcggggaggcggcgggcggggcctgcggcgcgcagccccagtagatctccggaaattttccactaacgctccgagcgccagagccgcccgggcgcagcccgcctctgcgcgcccgcgacccacgtgacggtgattcattcggcaccgcctccccagcccgcgcgcggacttggagccaagagtgggagcaggggtcggggggaggagaaggtggaggaggaggcgaagaggaggcggggaggaggcggggaggaggggggaagggttcggggagagggaggaggggaagcagaggggacgatgaggtgcggaggcgttggcaggtacctgggccccgccgcccgggtgtgtgggggtcgggtcgggggtccagcaaagccccatccagtcgagcctgggcaagctgagaggctgtcgggtgcgctccagttacgctcccctgcgtcgtggaaaacctagagagccctacagcgtcagggctaatcccgggacgcctcgaggccccgcggagttttcgcgaacgcgccgggcggtgcagggatgtcctgcttgggagagtgcagggttggaagcgggcacgccctgttggcagctgccggcgcttgtgtacgtggctgctgacgtggagaactgtagctgtggaaagcctgcgccccaaggagggacgcgggggtgcagtcgcggcccattatctgtgcccgggaagtcctgaaggctctaggagctgtcagattaaacccccagacccacaagaaaatccctgaagcttcggtgagcgtgggatttggcgtgcagttggttccgtatggttccccattaagacttggaagtcggcttaccaagatttcctcttacccttcggctgtgttgagtagatattacacagacaccccgcccatgactctgctcttgcaggaaaacatttatttcaaaaatactgcaacggtttcatctctcatgtccttttaggttctttctagtaattgtgaacttttcctctcaagtcattccatcaaagtcttggaagcaaatgaaaaaaacatactaccctgaaatagagttcacatctttctttaccaacttgcctttcccaggaagacatcgtggtgggtttgcagttcaggtttcctcacagcctctcctgggggtctttttccctctctggtaccttgaggcataggacagaagggagctgctgaagtttctggatgtcgcttatttttcacatttgttttaacttcttttggccagaactgtgtattgttttcgcatagatttctgcaattagaattattgtaattagaaagaataataatcttcatataaggcttagggtacgcactactttaaggtctttgtaaatgtgtgcatattcatttctctcatcaactctgaggtaggggctattcttaccccattattgaccttttacaaatgaggaaactgatgcttggagaagttagataactcgcccaaggccattccttctctaagaggaggaactggaatttgaccccaaactgtcaggtaaatccaatgctttgttcactatgcaatagaaattctttattaataaatttaattgtgttgaaatattaagtttacattttggtgggattttccccctcgttttattaaagtggccttcctgaattttattgtggagggatgtttaaagttagtttgggtagaaagccacacacaattgtaaaaaggaagtcttatgaagaaatcatgcattccaaggcagtgttacatttttcttaaagggtagattattgaaatatttgacctaagaactcattttttttctcaggagaaaggtttgtcttcatacacctttagccccgagcaaatggtgaatcctccaggagaatgacgatgaggctttttagtcttcagggttcgataaatatatatcgattgaaatgtattcaaaaagtgaatacccttgaaaggacgatgacataatgccaaatgaaaaggaaatttcccaaagaaacctaaataatggatagatttgatagcaagatactactggttttttccttctggaaccttcttttctgcacttgaaaccttccctgtccagccaagactgggttagaagctccttttgtgtgttcgtgtggcacccaaggtctgcccctgtagtggtactgaccacggtgtattctcgtggcctgttcacctggctgtgcttcccaggagagtaagtgcctggaagagcaggcattctgtcaggctcaacagagtgcaacagcgtgtccccagggctcaggacagttgtttgtcctagagctatgggagttattgagctaagcaatacttgttaaaagcatgagcttacacaattgatcagccatgtcttgttaggatgtactgaattggaatttagcagaaactgggagagcaatgtccccgtcaggaaatgtctgttcaatcttggtctgtgtatatcctacttacccacatgttattttgcacataatagtttttttgatgtttattaagaacaaaaacagcctctttaaaattgtgtgttcagttagctaactgtatttcagcatccaattaataatcagaggtttaataactacagccttaattctggcctcacaatgatagaatgataaaatcataggttttttttttttttttttttttttggctgaaggagatcttataactgctctgtccaatacacaaccactggccacatggctatttgaatgaattaaaattaataaaattgacaattaagttcttcaatagggcattttaattgctcagtagccacatgtgactacttaaataaaattaattttattaattcattcaaaaatggacagcactgacagatagttccattattgtaggaactgttattggacagggctgataagttaccgaaggaaaaaaaacaggtaaaagaagatatttgagatagcttagcattagcattgttacatacaaagaacattacactcatattcaaagtgtctgctgttaggttggtgcaaaagtaattgcggtttttgccattacttttaatgaggaaatatttcgtatatgataaacagttttccttagcagttgtacctaaattaatgcacatttaaacatattcaggagaatgaatggttcaaaaggattcctttttgcattcctttaaagtgaatactcattccagttgatcctttgtgagttctatttttttttctgtttaaacatactgaaatcaacttgagtcactacacaagtttgacattcattagatttggctgtgctttttaagctcgcatgattgagaaactaaaatactcagtaatgttggtaaaggacaaatgccagatagttttggacagaccaaatatatatttaatgacatcacacatgcaatacagacagttctcaatttacaaacactcttgagaagcagccataggttaaatataaaacatactgggtgtaccttctttaaaatcctcttaagaacagtaccacctggatatccattgtatgaacaaattagtatttaaaaataataaaaataagtcttagaattagagaatgtatagttttgagctgtggaggcaataaagaggctgtgtaaaactcagggggagttagttgaggttatttccacagtagagcagatttgcttaagtaaccccctgacaaaaatagcttagttccgcctccccgcagcatgcctgcccctccctgctgtgtgcatttcccccagtccttcagtcgttaaaaattttcccatttcatttatactccagtttcagttccgttgattcaaagttttgggacttaggacaagtttgctagcttctctgagcctcagttttttaaaccgttaaataggaataacagcatgctgagtgccaagaattaaagaaaaatttatgtgaaaatatagattagaaagaaaactaatataaatgcaggggattatgatcataatactcataaaacttcagtactccctgggaagatccaatggccgtcagtcatgtgcacgtgatcagaatctgggccatcatatttttttaagcaagttgatggcctgagggttcttggccaggtgggaggaggctgctctgggatgttgaagagagattttaaaaaggagatggaaggctgtgaaaacatagttcaaattggagggagcttgggcagataccaccttttcttttaaggaatgaatgtaattgcttgcattttgtctctacttccttcctctcattgatttattccgaaggctagagtttctactttacattctaattcatctgacatagcgtgtttttaaaaaacttagcattgcttgctttgattttccagttgacttttgctgatggagcctctctgaagggcaaattcaaagtacagctgggtgctgcagcactggagtgcgaacttgtggctgtggttatgaaggagcctcgtcagctatgcctttagcccctggtgaagcagtgccagtcacactttgccagtcaaacggagaggcagcagtagtaagaccagaccaaatcaaaccaaaccaagcaaaccacggggaatggaggtaggtgaatagcgccaaagagaatgatggctcacaacacttctaagcatggtgcatatatcagttcatttaagccttatgatgaccctatggggtcagtactattatcgttattatccccaactgaggcacagaacaactgtgtgactaagcgactgtactcaatgtcacaccactgttaagtgatagaagtgacattttaactcaggcagctggatctggagtttgtcctcttaactactacattagcaattctcaaacttttggtctcaggacccccttgcagtcttaaaaagtattgaggaccacaaagagttttgtttatgtggactatatgtgttgatatttatagtagaaattaagactaaaaacttaaaagatagtcaatgtatttaaaagtaataaccaactca

SEQ ID NO: 57899 - DNA, 802 bp, Homo sapiens
atatatgtaaactggaaaggattttagagattatctgacagttctttttttatggatgaatgcatctgaggccagacaggaaaatgacttattgctggttgaattgctgattagtggctggattggaggtagaacccagatcatctgcctcttcattctactcatgtcctgtcatggaaattagtcaatccaattattattattatagaagtctgttttcaccagaaagtttgtgaactgacaaccgtaaaatctgtggtaaattcacaggcttcatcaatgacactatgaaatattgaccctcagcttcccagattgcaactccccaagtcttggtctgtttgctgttaggatttgttacaacttcttccttattgccttttgttacacaagcagtgctgaatatgggctggatattggaaagagggcaagaaaatgagaacccacagttctgtgacgtgacaacactgattggccagtcactgttatctgcaggatgtgcttttcttaaggatgaacatattttggtccacaagtttccaagacaagcacattcctgccaacatgatccttggacaaactgttctggaatttgaacttgctactggaagagggttaagtccaggacacacacacacacacacacacacacacacatttcagtggggggcaagccatagttggttatgttagcacctcattatacaacagtttcaagataaagtgattccagatgtgctctcagtaagtacctagtacttatgtttttaacccattaggctaaaaatctactttcagaatt

SEQ ID NO: 57900 - DNA, 399 bp, Homo sapiens
attgctttgtgagaaaggagggtgtgggagtgaggtttagccttcaggccaggaagctaattctaattttaggaagaggtgacaaggacgtgaggaaaagcaattatttatagtcaggccacaagggcctcggattttgcctctgattggcacttgtctccttctgcattcctgctttctcccactggtgttgtcctttccatgcatcatgatttcccaatgccgggagaatgtttaattgggtaattacccaggttcagttctctgaacttgcttaattccctggataacaaaaaaaaggaaagaggggtaacttaccagtcagatatctactcccttttttaatgttatatagacctggatgcttagcttgtttgtgcaaccctagtcaatttgcac

SEQ ID NO: 57901 - DNA, 1783 bp, Homo sapiens
ttcaggtcagtgggatgggaaaaagagcaggtgatggggcacagggggagctatattaagataaactaaacttgagagatgtaaacatgaaaacaatgtgtaattccgtattggatcctgttgggagaacaagtttgagggacaattgggattctgaataaggactagatattagaattattattataggaatccctaaatttttaggagtgataatggtattgtggctatgttaagaaaactccctaatttttaaaagatgcatgccaagaggtttacgagggaggcatgctattatctataatttactttgaaatggttcagtaaacaaatgaaaaatagaaggatgaatggatggtttgatgaataaatggaataaatgtggcaaaatattaaaaaactgttctcatatgcaattgcttatgaatcagacttagtttagtaaaaaccaaacagcaagataaaataaattggatactgaggttatttttagatttgttattactgtcatgaataatcttcaatttcaaatttatgttccttaaaacttattgttaccattgattaatcttataatatatgttacaaagttgaactgataaaatattctaataaaatatttattttgctgtcttttatgttgtagatccacataaggtattctttgaaaacccagtttagttcacaagaaaaatggaaaacagatttagtcttcttgccttttacgttgcagacatagaacttgtcattgtaaatgcagtgtcagtaggtcaatgacccaaaagtccccgttctttgtgctgaaaaatatctgcagagagggaatgttagatttctgtaagtgaaattctgaacaatactaattgtttgcttacctgcaatgtatgggttgttaagataaaacagggtgggaacctgatctacccaggcatatctttcatgtgaatgtgaaggaaatgattcattgacaaccccaaagaccttgctgggaaaacacagctcagtattgcatcatcaagcatttgaaaacaaagtgtcaggaaacagtttagaaatcagtctctatcactttctcttattaactagttgtttgtattaataagagtaaccaccacttgtgttttgttttgtagtttattaagtgtatttgtgataacttttggaagtagtaaggtaggtctcattactcatttttcaggtgaggaaaatgaggctcccagattttcagtgacttgttcaggattacacaggctgaaagtggaagatccatgtattactacatctgggtctacctaggaaatgggagggcatcaattgtgtaatataatctcatagaaactcggttttctgagctctaaggagggcataatgcttattttacagtattgttataaaaataacatgaaattatataaagaagacatctaggtcagtattttcatatacatggagttcggtacatatttagtccttttttttttttttttttttagatggggccttgctctgttgcccaggctggagggcaatggcacaatctcagctcactgcaacctccacgtcccaggttcaagtgattttcctgcctcagtctcctgagtagctgggattacaggcgcccaccaccacgcccagctaatttttgtatttttggtagagatggggttttccatgttggccaggctggtcttgaactcctgacctcaggtaatccgcctgccttggcctcccaaagtgctgggattacaggcgtgagccactgcgcccggcccttttttttttt

SEQ ID NO: 57902 - DNA, 1302 bp, Homo sapiens
gagacagggtcttactctgttgctgaggctggagtgcagtggtgtgatctcggctcacaacagccttgacctcctgagcgtaagtgatgctcccacttcagcctcccaagcagctggcactacaggcacatgccaccacacccagctaaatgaggcacctggcctcatttactttttagtgccatgtttatagtcctgtagctgtaatcttaatctgtaccttaaattttccactgtctaattccttatataccatcttagtaagttacagtattgctatattgaatcttcagtatagtacttttccaggagactaactgacagcaagcttctcttgctattttagttactaattccttcccccacttttgggcaaaaggccaagagtattttgaggagattaagatgaacctacaatttattgaatcataccattaaatagagtcagagtgaagttataatacatttgcaaagtgacatatctaaaggggcagtaagcagcagacgtaagcaaagtcatagaaatccatttatctgccaacacatttatgtaagaaattacactactggtcaggaatttcctgctgtatgtcattttttttttttcttatggaacttttcaatagcttgtaatgggctgttgtgcctcctcttcaggcttggctgttatcagtgccactcagatatcccttcctattcagtgtggagtgctttgtgacacttatgaatgggtgcacctattttttaactattagaatgttgatttatatcacagaagactcatcatttctgcttccctacacataggcctgttgtaagaatttactggtttcaaacatgtattaattatatgaacttgcaggaaaagaatgccataaaattgaaagctacatgtgagttttataagagataattttctaccaaaataatatgcaaaggtaataattggggaaaatttctaggcagatggggaaagaaattcaagtgtttctaattatgtagataatgctgagtgaaaggaagagcactgtagaaggaatacttgatgtgtagcagaaaaccagagtttgagtctaggctctgccgtctgctagatgagcgtgggcaagacacctagggctgcagtctcatatacttcagctgtagaaatggccactgaatcatatttcttaacctctgttttattttattaggaaaaatgtaacaccccaggaaattttagtttgcagacgtggtgtaaaactttacttatgcagccttatttcagtacgcttgcgtatacaatcgaagtatttagcactt

SEQ ID NO: 57903 - DNA, 5373 bp, Homo sapiens
tggatagaaaaaggcctgctatcttttagcttaccttctagtaggaggaagcagacaataaacaattaagccaataagtagacccaataaaaggccaaaaaacatgaagtaagagtccttgggagagctctctactgaatggataagaataatgtgttaatttatagctgtttcaaggaagagtagcaacatttattgagcacctgctaagtttcagctagtttatctgtactctttcatttaataattgtaataaccctgtgagtaggtccattttataggtcaaaaactggacattcacaactagaaagtcaactaacttcccctcaattacccagctgataaattcaagagtggacctctaattcttacctcctacttcttcctcaagcccagtaatctcttttaagtaggaaaaacatatctctttctgcttaccctcacctatatcctcagttaggcttttttagattataagtgatatttttcttagaataaagttaaatttcagctttccctgcatttacaggaaatattctttaaaaacagagcactggacttaaattctggagaactaccttcaaactactgtcctgctactcaatacccatgtggtttccggcaagtcactcaacttctatgagcctgtttactcatctgtaacaggagatagtgccaggtataaggttttatgatccctagttttgaactagtggggtctggcttcacagattttactatactttgcacactaatattgcacactgacatagagtctctctctggtgatgtgcacaaggatttatataactcagatcacttccacagcacagtgactcagagcccctggagtatgaaagactgaatccctaagtctggctcacgagcagtaagatctccttttcctctgcattttacctaagtgttttttttttttttccaggctgggagagtttgcctctggcgtgcctctgctcttgagggtgaaatgggctcagagtgactttaaaggctgctcaacaaaggcaggaacaccagagaattatcattttctttttcttcagctgactggataagtgtagctgtaatagagtatggttcaggagggcaaaaccactttggaagaaaccttgaaagtgattcaatttcaagtcacaagatcaattatgtgaggttctagaactactgatactgagttttacagcagattcatggcacaggttcagaaggtgattcaggatgtctctttccttggacattaaagctcattacctgaaaattactcagccttggcccttagggaaattttaagtgcccagcccaaacggcataatcctatttaaaataccaagattgcatgataatgaacaacatcgaaagaaaacacttgtctgggtcagatctcatcaattagacaatttccaacagagaacacatctctagataactacatgtctgtcatataagggatatgtggacttccggctatgtgcttacagtaaattatctcaagaaaactaggcagcaggtagaaaaagagcaatgcaatcccacttttttaatgctcttgcctatagtctttgatggactgaacttcatttgatgaccatttctattcttgcctgcaatttgggaatgttaaatcctatctcataggagtgtgtatgggtagcatgaactaaggtagataaaggcttcacgtggtgtttggcatggcgtaggtgtagattggacctcagttttctgcccatgtttgctcttcacgtacctgtctggtatctgtatgtgctaagctctgagccttacaaaccatagggagagatatgcaaacttgccctcaatgagcatgttgtctagcgaggaagatgaaatgcatagacagacaactagaggtggggtttgagggagcccaagaaataagcacgcttttcctggcccagttgctgacaaggagattgagagagggtcccagaggtcagtggattctggagaatgtggcatggatgtgttagctcaggggacttgccagtccttcagtcaggcagtaagaggacatccccagttgccagtcattggaaacctaaagaactacaggcttcctggggtagggggacagaatgggtgctgcaggctggtctgcagagggcaggcagaggtgctgagcaatcgcactggttgagagaggggagtattgctattgtggaaccttctccacatggacacatgaaacagcagaaagggagaaggaaaaaaccctaataaatttagcttgcaatttaaattgaagggctaagaataactgacattaatactcatgcctcattactggttgatttatttggttctcaaaccatggctgtgtgtcagaatcactcgtggagatttaaaaaattacaaatacctggctccacctgttggagattctaaaccagaggatttgggaagaggtttagatatctacattttaaaatcccactacaggtcattctgatgggcatccagggttttgacccacaacattaattaagcaacggtaggcttggttaatctttaaaaatacaacagtctttaaaaaggaccagtgctaattgcattatgcttctgtgtaaaaaaaatacaaaaccctcagatttatttgtcctttctgccaaaacagagataagagaagatcaagggagtagacagataaaaaggtaagtcctgtgtcttctgtcttaggttttcatagaagtaaccagaagatatatatttttttgcttatcttttttctatagttagtatgatcaaagctaacatttcaaaagctgatcttccctggaaacatgaataggaacataatacattcagttgaaattttatctaacttttagtgagtgcctactgtgtgctagaactatgcttggcagtttcctgtgtcttcccaggtgaggaggtcaggccataagtgtagtaggattaatgacggcattctgagctagtgagaatgtttaggaaccatgacttaaacgtttatctgcatatgattctcactgctgatgaagatatggtgatgctgcagcacgtatgtattgtggagacactgaaatttaatacaactttttgaacaaaaatttgataatgtatcctaagaaccagatctatataaatgttcttaacattgcacccattatttcaatttctgagaattatcttaaggagatacttttttaaagtaacatgtttcaggtaagaggagaataattataatgtattttaaatgtagctatatctggaaattacataaattttaatcattaaggaaatgataggtgaattattgcataatgacttttagacacttaaatctggtcattataaagcctctggaggaacaggtaaaatgcttaagacaaaaagccaaaagaaaaaatatgtaccaggatagtaattaaaagttattcattaatgttggaaggaagtgtgaagatgagatgtagtttgtgtgtggtagtagaattctgagcatgttttcctttttggatgtggtggatgcacattgtccggtcttcccagcatcccttcccaccctatatgcagctaagaggaaaggaaacctttcacctctggccagtgagctgggatgcagtttgcttgcagtcatttgcagcctttctccccctttttttttccactgccaaatcaaggaaacttgcccgtagtaagagataaaaaactaaaaatctagagagaggctggagtcagagggatgaacagatgtgtggagaaaggggtagagagatggacgggcccacctgaagagacctttaagttggcgagacagtcttctaaatttggcacctatgtgacaccgtacaatttctttcttatactagttaatcttgttctagtctgctgacaatcaaaagaattctgacaatagaattggtttaatttttaaaagtttttaattctatgttagagtctgccaaggttgttgtttgtttttaaatgaaccttctttactttctgaagtactagaacattttgtacttgtgtgtaaatactgcgtttatgaatcatttcccattattttactgatagaatgttggtctttattgaactgtcatttcctttcaggtcttcttctcagcttttcctgcaacataaccacattaactgtttttccacatcctgattctgacaatagccatcctgagaatgcttttggaaagggtagtctgaaactacaatgtggattcaaatctgtataaggcagaaatgtatggggaattctgaaatcaatcaacaaacagtaattgagcacctattatgtgccaggttctagggctacaatgaaaataaaagtagacagagctcctgtccttaacatgcttatctctgtgtgtgctgtgtgcattcactggaggtccagggaggcttagtctgggagtatatttagcacttaatatttatttaatacatctgcaaaacgtcaacaggataacaagcaacatttatggacctttaataagataaggtctgtgccatatcttattttccccattttaccagatgaggaaatggaggtgcaatgaggatatttaatatatccaatattacagagttaataggtgccaaaggtggatttaacctgacacagtctggctccttaccataggatattgctgcttacacggttgtaagaaatctgctcagaaatgctgaatctgttacttaaattaatttttaattttttttggaaaaataattattaagttaaatgttggtggtgagatatacagatatctgactggaataagacaggagattcccttttcaacttgctatagtttgagccacaggaaaaaagttctgaaaaaattagttcatccattaattcatgtattcaacagcattttcagcatactacctgctactaagcaaattttgtagaaagcccttggtttgttaagggtaaatggaacagaaacaaatccttaaaatataacataggatggtaagttctgtaataaaagggttaaaaaggaactttgagagcattaagaggtgaaaggaggggaaggagggaggaaatgttatgaattgtttgacaagtaagctaggcgttgaaatatgaggaggaattcttccatggacttgggagtgggtataggagtagtggtgtagaaagggacttctgcaacaggatctgcttctaagctcagtcaatcgtgtcctgagaattgcaagtggctctaagaccaggactaaaaagataggttgtgccaactgagggaaagcatttggaattgtctttgaggtcagggctatataaactcttttaattgcatacacctaccagtaaaaataacttgagcatatactcttcaaata

SEQ ID NO: 57904 - DNA, 910 bp, Homo sapiens
gcaatttaagcttacttcctctcctacttctgtttaaactgataaccttgcccaacactggttaatcccaagaaagatattgggacaaaggtatctattggaacactctcttttggcttagttgtcttcataattcctcttgtaggtgactggttatcttgatctctcccacaattggtttggaagcctgctcagcagcccctgtcactcaactctcaaagatcacttttgttttcaagcaaatactaaaacaggtggaacctgccaccagtaatatgacccactgagtagagaaggtgactcagtcttggcagctcaagtcaggcttgggagaggtgactgtgggaatccaaatgaacggcttatttccaaagaatgtgcaaaattccagtgtcaaaaatgtgaacaattcagtgcaactggacacacctgacacacctctgcagtcttcctcacacaaagccacctgctctaagtcagcttcaggagaatcttgttttctagcacccacaggagcagttcctacaactcaagggagagttcagatggaaggagtgtttgctccaaggcttgatatgcagctcagagttggaagaagagtttccagtgaagcccatgatgaaagttgattatgaaacactgatgtttctcactttttttacactttcattttgctgacctgttatcagtaatttacgtgttcctcagtgtcaaaaaacatgaatagttcttatagccttgcttccctctcttccaagtctcagagcttctgctgggtcaggttaacccaagctcaaaaaaatcttggagtttttccaggtagtcagttctttctgctcagctgccaccatgacttcttaaatttatataaaggaagaataatctagtggggaaaaacttggctgtatta

SEQ ID NO: 57905 - DNA, 2749 bp, Homo sapiens
ggaaatctatggaaggatattaagttggggagaggcattatcagatttgcctttcaggaagctgtctctggtgaaatggagaatacattagaggagggatggttagtgggcagttgcagtaatttaggcaagcaatggtggtagcttagaccacaggagcagtggctctgggaggggagacaagcagtttgggaggtgttctcagcagaacttggtgattgctacctctgaatcccgtcaaggaaactttggagtaatagaaaaatttatgtttctcaattaatatgtgcacaatgtctgtaggtgcctttggatacttattacctggtatgaatgaaaagcctgattctgattcatacaattaaatgagaataaaggaagatgatgtcgtcatcttttgttggtttacaactatgaaggaaggaaatattttataaagttttctatgaactgggaccaaagttatttaatgtctgagtgtgaaaggctttgaaagcataattatgctgcactgttaagtgttagtgaccaaagtgttgataaattgcttcatgttaaatgaccagacattttaatgatttagacattttactcaggctaccctcacaagataccttgcacagggaggccccatgttaaagtatagagaacgatctggctgcatatactgcagataatcttcctagagcctcatttcaccaatctgtttggatcttcagtcaagggtaacagcattatgatagtattcttatggttcctttttttttttggagatggagtctcgctctgtcaccaggctggagtgcagtggtgtgatctcggctcactgcaacctccgcctcccgggttcaatcaattttcctgcctcggcctcctgagtagctgggactacaggcgtgcgccactatgctcagctaatttttgtatttttagtagagacagggtttcatcatgttggccaggatggtcttgatctcttgacctcgtgatccacccgccttggcctcccaaagtgctaggattacaggtgtgagccactgtgcccggcctcttacggtttcttttaagtggagtggattataaagtgtggcataccctgttttaaaatgggtgatgtctaaagtaattataggacattgcaaaactacagggatagatatcaactcaagtgaaaagaagctgttcagttccgtagcaaagagttcctgtcatctctatccccacgtcactggtggcgaatgttggcattgctggtatcattacaggtaaaaggtcagtcacattccaacttccttagtctttagtatttcctgtgcagactaaaaatatactgggagaaagttggctgagttcaaagggtaggagaaatctatttcgtcctgaggagcagtggctgcacttttttcagtgtttaatagtggaacattaaaataaatgaaattatttaaacaactccagactgtttaattcaattaaaaagcattcattggatttttgcttatgaagatgttcctgattcttttctgcctgctctgataatctaagagttgatttccatcctcccaatccttcttgaatctagcaaaaaaagtacaattaagaataaatctgggtctttgaaagagtatctttttagctgttacaatttttagaaggttaattgttaaatatgtcatttgtctgtaagtgtggctagtaattttaccaattttatttatttactatatatttattgaatgcctactacgtataggactctcttgagcagtcaaagtttttcaaggacgtactctgctgaggacaaatttttctaaattctcacagtccctattttacatatagggaaaccgactgttctctagtcaggaaaaaatgagttacccttggtgacagagggatcacctgatcagagatccacggatgagccagatgagttgtttctcaatctacccctcttcattaattttcatgtcatgtgtgattacatgacttagaataatgtaaaatagccacaacacataaaatattattttaaataggtattcttaaataattttaaataggtattcttaaataatttgacaataatcttatgctttgccaagtctttaaaaaaatacaagtttagattagattctttaaaataatatgcaaagaaataagagatataatttaaaaaggcaagcttatttctaaagattttcaactttttgtgtgttgttattaacaatgaatagtttattaaagtttttaaggaatctatttccagcttaaaatcatagaaaaaacaagtaggagaattcaggagtgtgattcagagttgcttaaagagcatgctaaaagtcaacttttttattccttagacttgatattcacaacacatttccttaaatgtcagcattttagttcaatttattttttccattcatagtttatttttcttttcaattgcaaagtaatacatgtccagtctcatgatataaaaatggataatataaagtatgtagaatagaaaacaccataatagcaaccccccgtctcccccatctttctaccaattccacctgggaactctttattgtttatagtttggggagtacctttccaaggcttttgtctgaatttgcaagtaattctatttctaaaatgcgactgcattttgtgaagagaatactgcataccctcatcccactttcatgagaaagaccctgcaggtgaaataaagagtggaaggtaagagcaaattcat

SEQ ID NO: 57906 - DNA, 2641 bp, Homo sapiens
ataacaatttttatcaaattccacatggtatttatttggattggtgtgtgttatttggtaggtctctatttacctattttggaggaaaccattatttcttccttttatttttatatatgcaatgtccaatttcagagtctcatttgcctgtgaattgagagagttcagtggactcatggaagacttgggttctggctttcgactgcttttttgcttccatgcatctctgatattcttactcctagtaaagatatcctagtaaagataacctcccactaagagtcagcaaacaatcagcagaaaagattgagtttctccctttccaaagccagttagtcagtcaacaaacaattcctaagtgcccaccaagcattgagctcaccctggagacactgaggcagacaatcgtgattgtgcagaatcagttggaacgaggttatctggatggtggtaagggagacagaatgagaggaaacagaggatttgcacataattgatattttcagttagatgaaaaaaatacatttgaagtttgggattcagcatcccaaatctagaataagggaccaggaaggcccctgcgtgctttatgaagatcactgatagattgttaccgtggggcccatgggagtatcagcaggagggcaagccacacaaaaatagaaaagagaaaaaatgtccccaaagtatgtatataattgcagttttacacttaaaaaattttttctatatatgcaaagaaggtatgttttaaaaaagattgatgattgttagagccagaagtgactttaggaatgcttggatttaggaattttctaactttggtgtacatcagaatatcttgggagtttgtaaaaataaataccaatgcacagatcctaacctgatggccaagatctgctttcctaggtaactctaaaatatactgaggtttgaaaaccacttattagtccagtttttattttacagagaagaaaactggcatccagaggggttaatatactcacccacggtcatatcaattcccttcctagtttaatctctattggctgtgtgcccagacaagaaaaaaatgcatccactttgggaattgtccagagataattttttttcctgtcttatgatagaaaagaaaggaaatgtacaagcaatttgggaaaaaattactacatatgtatttgtgagtatagttgctagacatatagatatatattgcaatcaggtagcatagattcaagttgccctgaatatacactccccttagatatcttttatggctataaaattttatgatagatgaaactattaatagatattttctattttctcatttttgcctacaattaagaaaaagatatttatttttcgaactatccacgccagggattatacggtgttaggcatagttaactgaatttcatcatcacccctaatataggtaagtatgccaggcttattgttttagatgaggaaacaaagagaagtgtcatacttatcacattaaaatattaataaatttattagaattataatggaaatggaaagttcctgacactcttgttagtgctgggcctacaacctcagttttcataaaagatctagagttcaaggtaccaaattttatcaaaataagtttgggtttaagttcaccaactcgcctgtggcctactcgtcctttctggcaatgattaacactagtgtttaatgcacgttttaaagtgtgttctttaaactcttttaccaaacagaacttcctttttatgtaatgagtcagctctccgggtatttgtagcccggggaattgcctctccagtggtggagatacggagcccagctgccagggtaaacagccacttcctaatataattgctcagaaatgctggaggagaaaatgtaagaaaagaaattgctctgtcttgtaaacagtcaactgtgttttacaatagcgtaccagcactccaaatcattcatcaacttgagtaacatggctggatttcactgttaggtttacttggtagtcacattaatccttctcttctacataatgtgccagatttctttgatgacaaacagtacaccaagggtctaaatatggttttaggagcaagcttttaaccagactcaaacttatctcagaggccattttcgctttctctcttcttgagtggggccagagctcaagtttgactcaggaccatttagggacttttttctttattttaatttttctaatgatatcattacaaattattttttaaaatagcagttaattaagatgggaactaagccagaatcacataatcatggcctgcaaagaagctcctaggttcatacatcagtgatttgaattgttctgttcctctccgcaggagcaatggtgctgttaccactgtatgtgtgctttctgtgcacacaagaatgttaagcgttcatccagaattcatatttatttatttattttttcttttttgagacggagtctggctctgtcgcccaggctggagtgccatggcttgatcttggctcactgcaacctccacctcctgggttccagcgatcctcttgcctcaaactcccgagtagctgggactataggcatgaggcaccatgcctagctaagttttgtatttttagtagagac

SEQ ID NO: 57907 - DNA, 1161 bp, Homo sapiens
ctgaaggagataaattgttttctgctagttttaagaactgtgctagcagttgttcccttttttatttcacagaataaataatagtttttaaagataaggtagcaaagctccgtattttctatatttgattttaaggtggaggataattttttaatgtctgtagtataagtgaattataattttaagcaaaatatacatgtttagctgacaatcttgtattgtacaaataatactataacaacaataacagaaatcaaccaagaaaaaaagaaaagagaaaaaagtctcttatcttgccattctaaaatcagctgttttaatgtttccttccagttactgtcaatatgttatctaattttcacatagttacaatcttagcatagacaagactttataatcttttttttgcgtctaatgttacataagccttttttttccacacccacttcacatttttaaaccctaatgtgcttttgtaataaaattgctagacaataatagatttcttcaaaaagggtcactaagttctggaaatgaaaggttttccttggatttctcaacattaccatattgtggtgaatcacactttactgtttcagctaaagacaacagtctgccaggggtcaaacagagctcctaagataaacagtcctaggacacaaagggccataacatcatctgtgaatgctgagacctcaattctccttacctgttctaacaagagtacaaagctcattagattttacccttatgtcattgaagctactgcctaatttaatggcaagtaaagtaaatgcatctcgggcctttggtttgctacatttactaggtactcaataaaataaaggccattgataactttagcatagattctaatgacaatgcagaacctactgtgcattcagtcttcccaaagctcccaagctattccaccaagggaaagaccgttttgtcattagaggcaaagggagggttttttctttttttttaagagacagggtcatgctctttcacccagggtggagtgcagtggtgtgatcatggctcactgcagctttgaactcctgggctccagggaccctcccacctcagcctcctgaatagctaggactgcaagtgcgtgctagtactcttagctattagtacaggcctggctaattt

SEQ ID NO: 57908 - DNA, 4373 bp, Homo sapiens
ttcttttgaacagattttccgtgaatattctgattacatatgctatttccatggtcaatgctaagcccttggaaaaaaacaaaaatgacattttgccccccagtgatctcaaggtaagataaatattttataattgtaatgcatggtgtctttaaagaatgtacaattctctgcaaaatttataacccagaaatgctttcaggtacatttaatctttacaattcaggtaaagattgttatttaattaattaattaattttttgagacagggtctcactctgttgcccaggttggagtgcagtggcatgatcatggctcactgcagacttgacctctcgggcccaattgatcctcccacttcaacctcccaagtagctgagactacaggcacaagccaccacacctggctaagattgttatttatgctatatatggaaactaccaagtaagagagagtggcttggtcaaggtttctaaaaattgaaacagacttaaaaaagattgggttttcaattccattcttggagtttttaaaaatgcaacatgaaaattgatatttaagtatttttaaaaatgagtattagtcatggagataagactgtccctacttccctcctttgtttggctctaagctgatgctggactctgccctagtgtatccttaaaagctgatgttcatgtcacggcaacattccaatccacaatggattgagttttccagttcatcaacaaaatctcacttacttgagaaaggcttgtctgaaatcagtagtagtggtagtaataataataataatgataataaacaattgatatttatcaaacactgattgtttccaggttctgttctagacactttacaggtattaactgatttgatctttccggcaagcctatgaatagacaccattattatctcaattttgcagatgttgagactgaggcacagaaagcttaagtaacttgctccacgtaacacagttagcaaatggccgataagttacatttcgatttttgttgttcttattaaaaatgtttacaatgatcatttttatataataactctagtagttcagttatttgttttggggcaaagattctccttgaacctcagttttcaactctaaaacaattgggttgaagtggttgaccttgagggtttgctctagttctacatggttaccaatttatcacatcctctcacatccttcttatgctctgtggacctaggctgtcctgtcacactcagttcccttccttccctgccttgctcgatttccagggataaacaaaagtcacacatttttatcagttttatttgtatataaacataagatgagctagtccttcaagactttttaacttggggaaaaacaaggaaactaaataaccactcctgctctccctcttttctctctcccacttcttaaaatatttgttttagcaaacccgtttatcaaaggtaatacaaagtcctccactaaggaatatgaggtccaaaaatcctacagttctttcctttatcccaacatgtttatacagacaaaaccaggttaaaatcgacacaaggtcaacttgaaatggggaaagaggaaggtgacgtcacaaaataaacatgaagtcttgtgtacaagcatctgcagaagagttcagcctcaccacttgggtaatgctgttggaatgtggtctgggttcactgtatttgaatgtagggccgtttaatatcagctagttcaggaccacccttctcaccccccataaagtgtgagtcccagaaattctgcccatatgtgagtttaatggtaggtttgggtacggtttgaaatggaatcatcagaaattgtaacttccttgactcggaatcaatgagcttttcaaatagttacagacattggaatttgtaacttttcatatataaaactatcttatgaggtgcatatttaccaagccttgaaacaaacccaagtactgagataaaagttcaaactatatcgagtgcattgatgctgaaaggaacagaaataattgtttatatgtgtatttgacattccacccagaaggggttaaatctctgctctagttgatgtattttcttccttatgaattaaacactaaagtatgtccatttcatcactttctttacacacctaactctccctttattgtgccttgtctccacttgtctgcagaaagatctctccatattttgcttctgacgccaaataaccgtgatcacttacgatgaaagagtattggttaataagattgttgagaaagttctgttttgtttataaagtcattcctatgtttttcataatgtatcttttatctttggaccaagagcattgatcccacatcttttttttgctgagtgttttcatttgaggttgattgtaactatttaaggacatatggtaactacttaagggcttaattattcaatcatggagagttgggtggaacatggggacacagaggttcgttgggagatagatggaggtttctccttactacctatgtgtctcccacaatccttttacagagggagagtggtgaactgtctcctggaaaagagaaagatttatccttacataatttacctatgtttgtgcactgagctgacatgtacctctgtatcaatgctaacatcatttctccctcccttttagataggacttttatgaatcagagcgggattctgttaattagaaagatgtgtgtgtgtgttgagcttggcacaccctcttttcattagtgatagaagtgcccgataaggggcggggtgggggggggtcatgatgaccttaacctgggttctagttcaatccataacccagaggcaaaggtaatgacgtgtgtataatcaccacttgaattttctgctccactgtatttacattagagggaaacaaatcttgtaatatgtacgtgctttccattaaggatgcagcacaaatatcaacagtgtccttctaagtcaatatttgctaggaaaagcacaggatgttcttgttgtcatcatggtaccaaggcttcacaaactaataaaaacattgaaattgttacatattcatacacaagtactatgaagcataacaggaaaaaacaggtctacattttcataaaattaaattcacacatgctctgataggcaaaaagttttgtacttacatagatcatggatggaatttctgctctgtctcttgtggggtaaagcagctttaatattttattggaaaataaaatttcttctttgttggattctcttcagatgaaactgaatagatgaataatgtatatgttttatgacaattaaaaaaaagccctgtaatttgtacaactatgagtgagaggagtcaattgacatttgaagcaaaaaagatagataatgagaggataaatggatggaaaattccacagctcaaaatcccaatggtttcttcaggacaagattgttacttgagaaggctctgctgaatttttggcattcctgcattatctcactttgaagatggaatgtaaactatggttttcagccagtaccactgttctctgaagtagattcaattttatttgctgaaagtttttggtaacaccgatttctctaaatttaagtaaatagttaatgtttcaaaggccattattagtctctcttagtggaaaagagcagtctcatttttgggaagtccatggcaaatttcctttcatgggactcttaccattaacccagagactcacttttatctacaaaggctttgttgaaaattttggctacttgtatattctactgcaaatccttatgggatattgttaaaaattcatttgctatagaaatcaggaggattgccaacaggtatgctcagtggaggctggggaagaatccggtgctgatggtgaagatgagttcctttgtccatcatcctgagcagagcagtttcatggatacatttggtgccactgataacacacaagacttgcaagtttaagttacttttactactttctgctgcagtgtacgattcgataattttctaagtatcttaagcattttcaaatcaaaacaaaaataccaaaggaaacatctaataaaacttcaatgtcttcttacttgcatatttattaaaaataaatagaggaaagattttcatgagttattatttattattttactttattttatttaattttaatttaattttatgtttttgagatggagtttcactctgtcgcccaagctggaatgcagtggtgtgatcttggctcactgcagcctctgcctcctctgcctcctgggatcaagcgattctcctgcctcagcctccccagcagctgggattacagacatgcaccaccatgcctggcaaatttttgta

SEQ ID NO: 57909 - DNA, 5241 bp, Homo sapiens
gaagactgacagaggttaaaagcggctcattaacttagcagagaggcaggcttgaggaggagcctccagtcttctgagccccagtttgggtttgtttccggtaagatgacaaaggatttggagaatgaggaaatgccaccttatttcccttgttagtagttttcctttctttccccctgcaatagtttcataacttgcaacctatagatgcagaaagaagaagggagagcatcttcaaacagttagttaggactctccttctgggaggaaagtggatatcaaagtacaggattgttatatcctcatgactcagagccctgcatcccaggggtggtgacaaatctgaagctctgatgaaattagaacatactgctcacccccaggcaggtaggtgtcttgagtatcaaagggttagtatcaacagtgacagtatttaaaacgaatgtgctatcttactgagaaattaacatgtaggcagatgtataacttttaatttagttatttactaaataaataatgttttatttagtgcctgaaaatatcatacatagaaagatagttttgaccatctggaaactattttggggaaattaaaagtttggagctcaattctatcaataatcccctcctgcctttattattattattattattattattattatttccctgttgccttgtcctcaaatcagatcctaaagcttgtttcctataaagcagttcccaacaaatttgtaagtcagactctgtccaatgtcctctgatatttagacattcctctctgattttgctctgagtcacatgaacatatcacagacataaatgttcttgcttttttgctactcttagaacatgtggatatgatttacttcctaaaacaggattctttgaacacctactttctacaaaatccaactcccatgaaatctgagagaggttttcctctaaagtataaaccacaagcataaccaaatgaattttttttattatactttaagttctagggtacatgtgcacaacgtgcagttttgtaatttttaaaaatcaaattaggccattagaataatgttctgtatcactgggatgggaatttaatgctagacaatttagggtcattattatcatgccaggcacaactgtcttcaattagttatgtcaaggtggggatataattgttggacatgttggcttcttgtttcattcggcttccatgctgcatgaagattccagaaaaccatgattaactggaatatttggggaatgaagacttaagttttatttaattttttagtcagcttaagtttaagcagaaagcacttggctttagtttttgttgaaaaactttctaaaataagtttattttcttgcatcaaaaggatagcacagtggaaagctgttttcaatagttaagaacattacgagtcccttgggatcattttctgactcttataaaatgttaacagagagagggttttgagatgaaaatggatatggaaactagttaacaactaggcccctgggtcaaacagctagttatctctgactttaaaaagtggacgataaactatttattgagcacctgctattttacagggcatagacttttccctttaggagcctcaattctgatggggaagagaggggtgtgtttaaaaataattactctacaatgttgtaagtgcttatgaaggtatacagcaagtgctattgtagctcagggcaaggaactaccaatggcctaaaggagtcaaaggccttcctttgggaaaaatgatggtctgggccttgacacacacatgagttaaatggagaagaggatgtaggacatccttgatgtaatgagtgaaacctatgtagggcatggtgtgtatgtctttgtgacagggcaaggagagactggtagcagatgaggttggaccagcagcctggggaccatttatacagaattcaagcactattttgcaagtaaggtatgacagtggaataaacaatctgacttgtgtttcagaaagattactcttttggtggtgggaaagaaggaccggaaggaggaagcgacaattttgataaattatccagttaatatttcaaaagaatctttttactgtttgtttattgacctaaattatagtttgtattttttatttacctttaagtaagaaaacatttcagttctcttctcttacttaggtgctatgttattatcatcattctcagtattgggaaactgaggcacagtgggcatgtgacttccccgaaattctgaattgaatcaaccgagaaactgactcaaaaccagtctcgaagtttcttccagcaactactagaccacactccccactattacggcatatttatgatataattaactttcagaaagccatatggctttcattacaaagactaaaggaatgtgcttttcataacaaatggcatatggcctccaatagctctttgcttgcatgttttaacaaaatgaacatgtacatgaattagatgcctcaggtcagttaacaaactgaagttgattttcttttgctctccctaattacagctgcatttctgacaaatatcaaggagttttttggcagcctgtaggtgcaaaatacatagcacctttttctcttatggcattgctcctttaaagagtcaacatttttctcttattcacagtggagtgtgccgtttgtggaaatggagtatttttgatgaagctgcatgctttcagaatggtggaaaatttaattgacttaaatgatacaaaaggcaaaggaaaaaactaaatgaaaatcattgagacaaaagttgacatttatctttggtcacttacatgatgcagaggagagagtacatgatagatgctcacatgctgaactaatttaacagcagttaagcgtgagggctcactcttaatctcttagagttatttagaagcctttctattttaggtaacatgccttaaagttctgctcccttagttcgcactgtgcctcatcctattgtttatttagcaggttttttaatagagtctgagaatgagcttcttgcaactttcacattatcatattacaacattcaccactgattatctgtactcaaggtcaatgacattatctcattggaattccctggactctggatttataataagatagtccaaaatgctcttgtctgtgatggaaaaatacaacacaattactgtaagtcagttggttcttaaagtgtttgagtttcaaatttggctactcatcatattggcaaattgcttacttttcttttaaatgcttgtacttatatgacaccaataaaattttcttgattaatgaagtggaaatatatctactataaaaggaaatttaaaacatatatatttctgaagtaactaaagaagtaaaaatacattttaattaatattaaagtatttaaatccttctattcaaaagctcatttccttaagaacaaagaaaacacataatttaggatgatttactcattaagaataaaccaaatgttttaaataatcaattaaacttttagtctcttttttttcccatctaaaatgactcactcaaatcctattcatacaaaaggaaagtgttaatttgtatcctaattcaccttatatttactataatgtatatttcttctttggacaagtcatagcttctcctttcataaaataatatcttccattatgttacaattacaaactatggctcataggaccggtgaatcatagggttggatggaataagcccttcagcagtcattttcacctccagggcatctctaaaccatgagttgaacaacaaggcgagtgagtaaggtacactttcagtcagaaatacagctttggctagatggaaaaaaaaagagtaaatctgggaactctttttctctttagcaaaatacgtctttctttctttttgtcaaagtgaatcttatttcaaactgatatcattagaataataaccccacgacaaaaattgttgtgtgagaccatttagattcacttcatatgtgagaatcggatgctagcatctgtaagacatgagataagcaatgtttgaagacagcagattctgcccccacctatgtcagcataatttattacatgactacaaaatacaacaacagtgcataagtataaaatgtgtaaaaaaattaatgctgcatacgtctgtaaaaagccaaacaacaatttagaagagaaggcaattagggtaacacttatgtactaagaaatcatttgaagttgggatacaatgttattttcttaactgtcacaattcactcatgttaagacactcctatcttgcttttatcctccatagcatgtaaggatagttacattggagggaaaacttcgagatgctgagccagggtggctgacagtgtgaggaagtcaggaaaaagtttcaatcgaacctgatctccttgatctttatatgatggtcttttcacgattaagcaaccatgagcacgaaaggagagacatgactcactccaataaccttgaatagttgggttaatttgaaatttatattcttaaaaagttgtgatatgcaaagacataaacaactggtttctccagattttcaaatcctgctccaaattattttaacaaacacatatgttatcatttaaatgggggaaatggccaagaccaaccccaactggcttcagaggaagttggatactgtaaacagaagatatgttttggtctgctgagcaccattttggatctgaatatggtaaggtagtcttagtactaatttttgtggttggatatgcagagatttcactggaattgggaagatatatgaaagaaggggtagagaaggagaaatgttcatggaaggggagaggagcagaatagccagggagatgatgcaatactgggaaatcacagagggtaaaggcagtgagtgaaaatacaggcgttggggtgtctgcaggattattcagcactagaatgtttaattgtcaatcaagtggtgtctgtttctgtaattgtaatgtattccaactcctcaaactttagtaaagtctgtcataagaacccattttttgagggttttcttttgttcttggattgaaaattatgggaaaggtttccttccatgttgggtggaatagggtcagcaccaacaggaagagtggtaaatgagtaaattaagcagaagcaggcatttggagccaaggaagtaccagctcttccttctccagctttccttcccc

SEQ ID NO: 57910 - DNA, 1179 bp, Homo sapiens
cccctaccagaaccaatgacaatgttacatatgctgatgtctcttatctccctaaaatatataaaagcaagctgtacccccaccaccttaggcacatgttgccaggatctcctgaggttgtgtcatggacgtgttcttcaccttggcaaaataaactttctaaattggttgaaaaataaataaataaatgcttcatcagtgatacatacggatgttaccagagtgatgtaatcttggtcaacagatattgcatgtcattcagttcctattttatgttctttccatctacgttcctatttcctggaataggagttgctacaatggcagcagcaggcatctttagtttagtttttcagacatgaaaggtacctacacatatttgtatcttagaaaggtcactctgataacacattgaaggatagattagggtaaggcaaaactaacaatagcaagactagttaggtgctaaagtaatactggaaagaatgaagaagtggggcagatctgtgaggtctgaggaggtagagtcagttattcttgaagaatgagatgcagggctgagtagatgagaaatcaagtatagctccccagttttttgatttgatgattgagatacagggcaatacaccatgtgctgctggaacccacatctgcggtatcttgggaagctggactgtggttgtttgaaatacaagtgtctgtgactaaagccaaaggttttactttacaattttgatgccaatataagtaaagaatagaagaggaaaagtaggcatgggagagaagacaatgcattcagttgtgcaatactttgagtttcagatgcctgtgtgacatcaagtggaaacggtagttgattcatgcatttggcacacaggaaaaaacacaaatgcaacaggctttctattcagtctctttctttctctgcggcgcaaggaaataatgaggggcaggaacacagcaagaacacaaacagaacacagtaaatgacttctgtatgcactcagttgagactcttctacggaagttttatgtttttctttattatggtaaaatatacataacataaaattggtcattttaactgtttttaagtgtgcagttcagaggcattaagtacattcacattgttgtgcaaccatcactatcatccctctcaatatttctttttttaaaatt

SEQ ID NO: 57911 - DNA, 1131 bp, Homo sapiens
aaaataactagaatgctaaaaaattctatgattcagtttcaatctactgttttagtcaatgccccacgtttgatattctttttttttttttttttttaacagcaaggacttgtgaaaccaacttggagtagaggttttccaggaatatttagtgaagacttggggggagttgtttgcttttgacttggagaatagaatctgctgccagtgattaacttgagtgctctcctggaagatgagctttgacctgggggtactcaaagggaaagttcactgttgctattgttccagagtggtgtaaatatcctgccaaaactctgggtgagctagactcagacacattttctctttgacgttagagtcagacaggcaggaattggccaaggtggtttgtgcttagtggctttctccaatctgaacccttgccagtaaggccctaaggcaatctcaagttaaattcatatattgatttcagatttcccatgtcttgcaccatagttacactatatacacatcttataccatgttcactgatgggcgaggtcgctgccttaaaaggcaattcatattcatgaacatactcttctattctgcctctgtccttctatctctgagagagccagttaagccaaggtcttttgtatagattcaacaactctccctggaacatgtctgaacatgatggttctcaggttttgatttgtaatgagaagtagaacacttatttaggcctggtaaggtagctccgccaagtctaagacagaaagctctttgctttttgcatctaaggcctttgacggacttttagtaggatgggttcattggctgtttggttcctcaggagcatgtagggaagagggtgggttgatagaatgggatttgagtattttttggttcctggttatcatactatctaaactgcaccaatttatctttaacctcaacaaatactgtcaaaatttataacattatcccgaaaatttcagggttaataaaatatagaaagttctatcttaacacatgttgataaacaataatgtgagttatgtaatcacacaagagtagttaggcaagcacagactgtaaataaaataggtttttggtggatggatttatataaatataattaat

SEQ ID NO: 57912 - DNA, 1106 bp, Homo sapiens
cccaagaaaaatgaaaacatatgacagcataaaagtttgtatacatatattcacagtaattttatttgctgtagctataagaactggaaataacccaaatgtctttcaacaggtaatggagagacaaaacgtggtgcagccatataagggggtactacccagcaatacaaaggaatgagctactaacacacaaaacatcatgaaggaatctcaaaatcatcatgctaagggaaggaattcagacacaaaggaatctatctgaatatgaatttagttatataaaattgtagaacacacaagctaatcaatagcaaccaatgcagatcagtttttgccttggggtgtgggtagagggaataatagagtacaagggaacagagggtatcttttggggatggtagaaatcttctgttttttgaccattggagtggtttcaagagtgtacacatctctcaaaacttcttaatttgtgtaccttaaataaatggagttttccgaatacaaattataatcccaataaagttgactttaagcaggggagtggaggagaaactaaaagtcaataatttttcatctttaaaactgttgaatgtcactttgtatgagtacattcaccatttgtgtaacctgtgagttggtgaggcatttgaatgacctgattagcagtgtttttgtctgtgaaatgtgtgtatttggcagagttgtaatcaggcaggagagggacagagggtttgtcatgatgcattaggacatctctgaggttcctcccgttgttgcataattctgtcttctgtccctacgtggacaagagcccaggccttgtaattcaacagacatgcattcaattccagctcagctatttctagcagtgtgaccctgggccagttactaagtttcagtttcatcagaggtaaaataaggataatatacttacatagaaatgagctgtcatgagtggagccaagatggccaaataagaacagctccggtctacagctcccagcgtgagtgatgcagaagatgggtgatttctgcatttccatctgaggtaccgggttcatctcactagggagtgccagacagtgggcacaggacagtgggtgcag

SEQ ID NO: 57913 - DNA, 1190 bp, Homo sapiens
agttaagctgagttcagaatttcattattgtaactgaattattatgtttcagacattctctgatggtaataataatagctgctgtggattgagaattactttagggctagatgctttgcatgcgctacctcaaatctatccacactcctgcaaggtgcatgcagttatccccattttacaggaaactgaggctcagaggggttaattgattagtccacatctactcagtcaacaagtagcagaaccaatatttggaccctgtctggtgtcacagctggttagctttttattcacacacattatggctgtgattcatggagaatttccactaataaggatgattaaatagagttgagatatctggtgtgcactcacattctgctacttttaaatacttgttttagaattaaggaatcatagatttcaggattgggagagactttataggtcatttagcctaaactccctgttgattcctgcaaaagccttgtcaagcaatttttttccagctatgcttctgcacctctagtgatgtggaaagcctaaggcaacatttccattattaagccgtttgaaaattacaaagttcctctttacactgagtcaacatcagcctcccttttagcttttgaagccacatagaacagaggcagccatataactggaagacagtaatcatactcccatttcaacttccataatagaattccttatttacttgatttttccctcatagcatatagtttgaggtcaggtttccatcctagttaatttcttctgcacacttttgagtttgtctctatctcttttaaagggaagcattcagaacctaagactgtttctgttttgtttttgattggggtcagaccgtatgtctgcccctgtcagatcatgttactactgactcatggtgaggttaccactgactcaagccctgctgtttacccacattactgctaataaagcacgtttcctcatcctgggctcatacagtttttatcctgtttgtcagcatttacctttattagtaaagatacttaaaaagattaaatcccttgctcaagatttgcaagttattttgaatcctaatgtcaaggcaaacatctctacttacaagaaaatcactttgcttcgtgaacacatttttatttcttttgcatgatttcatgtatcttcattatgcaagtgat

SEQ ID NO: 57914 - DNA, 1716 bp, Homo sapiens
cgtttttgtgtttgctccttcctctttctctcctttttagctctccctatcaatagattgtaaatctatgaaaggcaaggaacaggacctaataatctaaacattcctcagactttctagcttagtgttgtgcacacagcaggcactgaataaaagcttaaattaaattgaatagtaggaatcttatccttcccttcaggatccttgacagatttcagccctattttagcagctgaaataagtaggcgaagggtcaagagagcctcagtttgcagcagctgctcaagttacgctgctgtaactggataaagatccctgtgggcagagggagggagtgacatttgtgtttgtacagcttgacaaagttgaaaacactcttatctttggaatcttttagaggacactttttggacttagtggaattactctatcagctttccaataagtgaatacttcggttaagctaggagttcacatttttggaaatgctgtgattgatgttcactttaaaattttagttctgaagtcacttaaggtgcagagatgggaactcatttaaaagagagaaaatgtaaaatatattttgaaacatgtatgaatgacaaaaaattcaagctaaatagcttgcagtttctcatgtgacattcctttcataccactccaccaaaaattaaggccatctgtttaggctgaaaaggcaatttcatttctagaatgacaaaccagatagtctctggaaatagtttaagaataactttgtaaaggattttaaaaattggattagtgaacattatgaaactcattctgaaaaggaaactgaggaaagcaaatggtgtgatattgttttcctcagcagcctataattctacattatgatctgcaattagtgcttattcaatattgtcaaaactggtccaattagtaggcttacgaataagctttttatggtatatacatagtgccagaggacttaatttgtttcacagtgttaaacagaataaataagtatgagatataggctcattttcagagaatagtcacagtttgttttttagtcacttgttaaaaaggtgcattcaagtcaataagctgagttagagtgagttagaggcagtcctatatgtccagggcctctgaatgtgaaagcagtctcctggctcccagaaagattaacatttggcctaatgatatgagatcacagaaagtttatggcaataataggtagaacggttggagtaaatgcaaaagcttcttcctctttctgaataaggaataggaaaattccaaacagaactgaaggtggtttccagtgcattcctgaagagagcaacagagcaaagagggagggaggtactaggcttgtggtggtggtggaaaagatcaggaaggaaacttgctggtcattccatgttaaagtgcctccctgagtagtgagcctaggaccaaaagcccccagcagttctgtttacctttgctagggcagaccactggctgattcccaccaagcctcatctgctcttccacttagctatgtgcctttttctttactgacacaagtcgctaggaacctggaaatgtgggtcagatgctgtgggtcagggaggtccccagcaccatccagggcctctgacccacaatgattccattaaggttctatgcagctctagagacaacatctgttatttccagagaaagagtcctgaacaggagcctgtt

SEQ ID NO: 57915 - DNA, 677 bp, Homo sapiens
ctccagatatccttttctcagtgaagttgtttgcctggcaattttaccctatcgtataccttctgtttatagttgtcttctgtcttgtacccaagacggagctgattttaggctaaagctatgtgtatgtcatctgaaatactttcagatatattagaggcaagacatgatttaagagtaaaatattagccaccatagtagtacggatctgatttcatgcactcatgaaaaaggaatgtgccaaaatatatttcagcacacaagctgcatttaaagtgaccacagtgtcattatagaaatagtcttcatatgcaagccctgtatggaacattatgtccaggacagtgctggttactgtgtcacttatttttttccccctcaaatgaatgagtaaattcagtgtttatgaaacaggagctggcaggagggtgaagacctgtgtttatccttaggtggtggttttaactcacacagcccaaatcttcactaccagctctgctctgggatctcagaacaaactgacaccaatgacaaatgccagggaggggtgacctggtgtgagtctggcagaggccatgtgtgagagagatatgtgatagatagcataactgttttttgaaaaatttttttctggtatataatttacttaacatgaatccccttttcattagccttca

SEQ ID NO: 57916 - DNA, 504 bp, Homo sapiens
agtgagaatgaagactgaggttactgatgtctagattaaagaagttgagaattattatataataccctcccttaaaggaaagaggaaaacagctataatgagttcatatcctttgttcccaagcaaatatcaacaacttcaaagggaaaagaatacaaatgaaccatagaccatcagctggaagaaacaagattttctagccagtgactctattgtacaaataagacaacaaaggacagatattgacacatctcttgtaatgaatgtgttctagacaagggttaggtgctgactataaatgacatcactggcttatcgaggctgcccctaaccataagttttggtcgtcatgggtgttttcatttctagtccagctgacatcgtttcttccgaacaaaattcaaatttaaattcccaacacctgccaaaattattacaaccatcgactccttgtccacctgccatgaacccctcccctgaaccattatggtggagagaaaggag

SEQ ID NO: 57917 - DNA, 611 bp, Homo sapiens
cctcctactcatgtccaacgtatcaccaagtcctatcagtccttctttcaacatttatttaaaattcatccacttctatctccatgaccactatgttattccaaacgactgcgctactgaaggccctactgtgattttgtcatcacttttagactaaagtcaaatttcctaatacactggaaggtctatatactttgacccagacatagctctttagtctcatactgaagccgatcacccctcactcactgaatatattaggcttctttcatttccccactgccactgcaggacctcttaaggcactgttccctctgcttggactgccattccccacattcttagcccaggtccctcccaatgttaactaaaacaacctgaaaatctttaaaggccaattggtcagagtgtcctgctctgaccccacattcccacattacactagatctgccactatatgctctcctctcctgcgtagtatttatcacacttcttacttactcttttagttgcctatttgataattaactgtcttaggcagaagcttcatgagaataggaatgctgctggggttgtggattctacatattcctagcatctagcacagtgcc

SEQ ID NO: 57918 - DNA, 3260 bp, Homo sapiens
ctgtacattgagtaagaaattttcttatacatatttaaaatcattgattatatggtttaaaatttctacctccaacaatgaccttaaagagaaagttccagcgggatcaagttaaaattagtcaacaattaaaaaaaaaaatcttagaccatcatggtattttgcaacgacagtgggagagataaactgttgttctcgtcatgactatacctaaatttctaattttagtcataggacgaaataatatttgaaaataaaatttggttgtagccaaattggaagaagacatttagaaacagtaatgactaagaaacaaattatgtattttttaatacttttgtaatgcctttgtttctgtagtcattgcttttctttgctctcacttcaatttccctttaggtcatctcccttttttcttgcttccatttctttttaacttttctatacaacattgtatttatgatgccttattctccaagaagttaccttttaccgtagattcataaactcaagatctaattgatttttttaatcacatcataggtaaatgtctatctgacctcccaggtctttcctaaaaagtggaaaatactagcaggactgcagaaagaaacaatattttgattacttctctttaatatggatttgctgtctgccttttcgttttcagacttacagtgttaaagagaatttgtgatcttttttgatgtcattgttttggcacttcaaattcttcattttatttctcttttaatatagatacttgcaaaaaaagaaaaatagagaaaatccatagaaaaatgttacagaaatcttcctaaattattcaaatagcagaattctctgccatgataaaggggagtcaagcacttctatacctgagctgtcatattatttgtatcacttgtaaagtaatgaaaacttaggtacactataggcatctctttacatggttctgtaattattaacctcaacttacaaaataaaaaattggaaagaaaagaagagataattaaatgttacccccccccccaaagccacatataaaattaattgcaaacaaagaagtaaagatcaataattttctaatttgctttggcaaagcctctcagatttccgtggaagcttgagccacttctatttttttaagacaccaaatatacatatatatctttgcattgttttaatccaaaatgggattactaaaatgtagtgcattttaaacatttctatttaacaaaacaacatcttaacacacatacaatacaaatgactacatgattaggatcatttgatgataccttcaaaaaatctaaatttgagaccctcccaaatatgaagccccaaagagctttcagcccaggcccctgggagaggctctgattttccattctaagaaaccccaccaagtgaaatgcaatgacccacaagttttgaggaaattgcttagctgatcgcacgcccctctcttcaacccaacctaaaccaccttttcagttatataatggagcattctggaaatgtttgaatagtcaactactatgttgcaaaattagcaaacaagtttggttcaggttgacaaatttattgactttgccacagacctaaatagaaaattgcttttagcctcagctgacaaaacaagaaaattaaattaaaaaaaaaatctggttagacaacagcccatgatgtctatattttgcctctgcctttcacctttgaaaaagatccttctggtccacttcatttattgatcccacactgaaatgatgcaatgaaaagtatcacaagttcatttcaggcttccacctaagcagaaatgtaatgtaacaaggtctataggacttatgggtgattacaacttaaataatgtactgaaattctaaatgttaaattagaacttttagaagcttgctttaaagaataatttctagcctttaaaatgcctgcttcagaaaacagcactgctaagagatgtataattataataagtataacaatacttcctgaaaactgactcaccttgttaacgtaagttcttcatacagaatacatattatggcagtgctgggctgggttgactctctagttcatagcaattgatagtttaaaaaattacattcttcttagatcacagcatattaatttccatgactctctttcatactcctgcctgtccctaccagaacaattttgatgcattttgattttgtaatttcattagtgattggactttgtaaacctgttatcatcttgcttaaatttggactttcggtagtttaagctgtgacccaatatgctgtgtggatagactttaaaagcaagggggccctcctaaatggtgataatgctaacatatgcttcaaagaatcaggatccctactaactaaagatatgttcaggctggcctttttactatcctatccagaatgttagaaataagaaatgcatgttcactagaaaatgtctttcaaaggaatctgagcagagagagagaaataatagtgtcatcgacatttcctcattcactttttaatgaactcgggaggatttccgagtcaggtctcctcagtagagaagagggcaggcttctgcctgaaaagcttatttctgctgctggactccaagcaactcccaggtggggccatggtgtagtcagagcccttcacagggacacttgttgcctaatgcacccattcttcaccacaagagtttgcagtgcccagcatgggacattaactgagctttttgtactttacggttgctttagttaggaattataattcttggaaggctgggtataaaattggtagcaccagtctttctttaaatataggaaaaataaattcagaatagaatgcaatttctattcagaaaagtaaatgttttgacttcatttggtgggacagcagcagagggcagactttggacagatggtatatttaggtctggggatggattcaagtatgtttagatggccgatttgcagtaattataagtattctccttttttgtttaccttgattaatattagactatgcctcgtgcataataggtactatataaacactgaatgaatgaaaatctttatttaaggcactgattcaatttgtgcattcaaaatctttctttaaaacttatttgtgtatgaggttgcagcaagagacattctaataattatcagttgatgggtcctgctatatattaaaatgttccttcttatcctcagagccaattgtgaaatggtaaatattcatgct

SEQ ID NO: 57919 - DNA, 945 bp, Homo sapiens
taatgactgcattctcaggactgcaataaaatagctctgttttccagtgttctcaacctttggattgcttttcaggcattcacaaagcaaagtgggaaacacgaacccttttagttagatccctttaacaatagaggtcagtttggtcatacggttttaaagaatactctgcatccttgaaacacattcctcccatttggaaaaattccagaaacaagactatagcctgaatagcactatctagcatgcacgaaacgcttcttaaaagcaaggactgccacagcctctcttcttaatgaatccctcccacccacctcgtttttcagtgctttgcagtatgtctttttctctttccccttccacgttcgtctcacccactctcctggaccctctaaccaagttgccacgcaaaagcagcaagcaaacctgtgtgagtggggtgtcccgaggcggcagcctcccgcgatcctccgtgcacgccaccacccggctcatgctccaggcgctgcgcacaccccagtggccgcccaggacgtgcggtcactggagagcccccagccacgcccctagatgctgctgggcggcctgcaggagtaccaacattgcagacagaacagcgacctatcccgccgtaagccaaagttgcctgttggtaaattgcgtcttttttctttttcttcaacatctttatagtaccgcgagtgtacccagtgttattaaattatgccaaaacaaagagcaaagtccctgcccttaggagtatgcagtgtaaaatgaataaatgacgcaaggcaaaatgacaggacaaacacagggtgggtagaaagagttacgagtgaaagggaaggtagaaacaataagactttcactggaccaaaacatggaaaggctgttagggccccaaatcttcatagcagattatagaaatgaagaattgcgataata

SEQ ID NO: 57920 - DNA, 663 bp, Homo sapiens
ttgtctttgccctgccctaggtcagccacatggctctaaacatcagagtacactacttgtccgtggttgctccctttgctatctggaagaaatgatccagctcggtggaatctttttgatatcagatcctccactgatgagcaagatggggcataaaggaatttgttaattcaacttgccacaaagagttcagaaaaaaaaaagtctggcccttataataaaccagactgtgaactggaaaaacctgggtgagtcagaaggaatgagcccctgatacaaggccagagtacctccactttaaggaggatttggtacttgatgtcaagagaggttcctttaacccttagacacatgaacaaacagaaaagtgggaaagtcaatatgtaactgagatttacacgcagtcctacatttgttcttcagtttgtgttgacatattgcagcatgtagtatgttaggaaagatgtgttgcaagatcctgcaatatttaatgtgtaaagaacaaagtcacaccttaattctaggttctgattttgcgttttttaatgcaaccagttttcatgctaccagtataattagtatcatcaagggtaaatctcaccagacaaactcaaccatccctttttaaaggtatgagctagtatatgagtttgtctagatgat

SEQ ID NO: 57921 - DNA, 1239 bp, Homo sapiens
cctaggcaacagagtgagactgtctaaacaaacaaaaaaattgttgaatccaactgttacttttcatatgttttaactgaaacatatttacagagtaatatatcttgtattttttcattctctgtgaagtaggaaggaaagattttattgactcaatttacagatgagaaaatgaataattatgtggctttcccatggtgacatagcaggtgaaagagccatgactcactccactttccaaagggaaaggaaatgtagtgctttctttgcctttgcctagtcttagagattgcatttttgtttgttttctactttggaggctagggttgcaagagtaaacctgttactaactggctagcttggggtgagtagaacaataaatgaatgataaaaaatactttgttaggccataatgaacagcaaaatttcaggtatcaaggctaaacaagtattagttctgtgtacttcacattttttccctgaaatttctagctgtccaaagtctgctttctttaaactagacttctagacaaggaattgagaaatttttcctgtaaagagccagatagtaaatatttggggctttgtgaaccatatggtctctgttgcaaccacccaactctgctgttgtagcacaaaaacagcctggatgatacatcagcaaacgaatgtggctgtgctccaataaaactctattgctggatcctgaaacttaattttcatgtatcacaaaattttattcttcttctgacttctttcaaccattgtaaaacatgtaaactattcttaactcacggatggtgggctggatttggtccacggggctgtcatgtgcccacccctgctaaccaccccttgaagcaatatcatccaagcaagctgctctgagcacagttctgacaatattatttctttttaaaaactctcagtggctccatgcaggctatggagtgaagtataaactagttgacatgaacacaaccctgtccatgaccaaggtccaagctgcattctgagcaatatccttcctcaccttccaagatctaactaacttgggctctccccggaaaggtctgctctccccacctccactcctcggcctagtcagctgtgtccccctaaaatgccttctctactctcatcactgtttcttcctgccgaaattgtacccttccttctaccttcatctctgagtcttccctaaccacccaccaccaccttcccagctagacttaacct

SEQ ID NO: 57922 - DNA, 1268 bp, Homo sapiens
atattcattaaatactttaaatatttcacttcactctcttcttatttgcaaggacaaagttggctatatttcttgtcttttatcctctataggtaaagtattttttttcctcttgcttctttcaggattttttttaacctttgaattttttgcagtttgaatatgacatgcctcattgttgagttttttgtttgtttgtttgtttgtggcatttaccctgcttggtgttctctgagtttcctcaatctgtggtttggtgtctgacattaatttggaaaaatctcagtcattattacttgaatatttcttccattcctttctctctttttctctttctggtattcccattatgcatatgttaccccttttatagttgtcccacagttcttgaatattctctgctgttcttttttttcattctttgttctctttgctgtttagttgttctttggatggaatggtgacttctaagctccttacatgccgagccaaaaccagaagtcttgtttctttcttgactcttcaacaaagctcctttatattgagtgcacactggattttttggagtgctgagtcacacctggcgtttttgttttaaaaaatcacaaatgaatttactcagcttgtggtggtttgtacaggcttgatttgatatttgactcttgagcagcttcatgcccttcaatgaagtgaaaaagaaaagattaaccaggaagagagtttcatgtcatgttgccagtcactgtcaatgaccccactcaatagtgtgggacttctaacatcctgggtggctcaggacaaagtccaggacaatcccttgcactaaagtgccctctgcatttctggtgtgcctatattcttccaatgatcaacgggcccagattattccttcgttttaaaacatatctcctataggcatactcaacttaacctgaaaccaaacattcatttgaaaaccaaaagattccactatttttttttctgtacaaaatagagtgacttgcaacattttcttagtaaaatttttctctcgagttagttgtctgttgcaaaaacccaggtgagatgtcattaatagctaaaggtttcttcagaaaatgctgccaccctaattatcaactgccttaaaaatatgtatgtgctttggaccagcatttttatatctagtaattgaccaaaaggaaattttaatcctaaggaaacagatatttagctgaaaatgtttaccatagtgctgtttattgaaaacagtccaaatgctaaatgta

SEQ ID NO: 57923 - DNA, 585 bp, Homo sapiens
agcttctatagatattttccagaatttttagggttcaggatgatcatgtttaattcccaaagccgcaattcctagcagcataggagctctcaaatatgcagaaggaaatgattcagaactgaaagaggataagtcatccaatgaatggtaagaattaagcctaatgtcagtaggtggcatgcatgccttcaattatttgacatacagttactgagcacctgctcagtaaatcatagggcccaaagataatttcctggaggaatgtgtgactcaaggctatttggtctgcctgtgtccttcctctgtagctcataagcactctacatgtgcaaagtcaagtttaaatgaaagtcaaggggaacagtgagaaaagaagcgagaaaggtgcagcatcgtgtgagagtgtgtgtgtgtgtgtgtgtgtgtgtgtgtgtgtgtgtgtgtgtttgtaatggagtgagaggtgccagaaaaatttagctttcccttctttccaggtctctttgcttcaggagctggggaagtgttgcagtcatctccttttccctttttagctcttcttcagtccccatgccttcaaataac

SEQ ID NO: 57924 - DNA, 2349 bp, Homo sapiens
accatgggaggatgcagcaagaaggcatcatcatctgtgaatgagaaaatgggccctcaccagacactgaatctgctggcaccttgatcttagactttccagcctccagaactgtgagaaataaatgttgtttataagctactcagttaatgataatttgttatagtagcccaaatgaactaagacaagagcttacaagtctaaggtcatccccctggaaagcagtggacaggctcactgagaaaaacatctcttcgtgaggacctctctggatggccagccagccctcttcaggccccgccctatctgtgcccctcaaaacacacctgcttcactgcctctcaaccagcctcaggagaggataacactgctaccatttgttttttctgaaggaatccttcaaacatttcatttgacagttattcctatttcagtaagaccttgtgaggcccagcttcacagatggataatggccccatcctacaagtggaagaggatgtgcctgtgtcttagttggagagagagaaaaaagcaatctgtcaacctgatggaaaatccatcactgtggggatttacaggaataaatgaccgtaacacttcttcctggcagctttgtgcacatggataataagtaaacccttgttcctttatagaatggtttatttcaaagaactcgtgacccacaagattttctatttaacccctaggctttcttggcttatccaattccatagctatcacaccgtgttcatctttagagccaagaaattcaactatgcagtgcccttgctctcaagaaaaaattgtgacaggaacctttgtgaattgtctttatttcattagaatttgtcaccccaatttaactttttgcatgtgaccagaaaatgttttgaattgttaaatgctcaagttaatgtcaaattttcaaatgtgaagtcaacataagcttcgtacagcttggtaacttatgttaatattgtcttaataagacaaagaacttaaaagagcagtatgtttatttgaagtaaaagtatatttttaaaataaagaggcctaggggtgcaggtcatctgaatcatagcacccatgtggatcacactccatgatttcaaaattcagagatgctcctgatctatcaatcattaactgttgacctttgagcagctaagaagactgtgttatataacagttgtccctgactactaaaatgattaatttgggggtggaagatggggacattttttaaaatattaaatctactaaattcaggtaaaattactttgtaacatttccaggtctaatatctcataggccaactaaatatatgcaaattcatttaataatcagagaaaagaaatggagtgttactaaaccaatgaaacacaagcagctcttttgctcatttgctgtgtgtccagaactgtgggagacatgggatcttcaagcattttacagaaaaagggctcatggaacagagggacaaccagggctggggcagtgctggcagtaaggacagtggtaacctgcccatcatggcaatttatatttgtgtgtgtttcattcctttacaggtggggaatgtcctgaagagcaggacttatgttcatttacgtttgaatcaccctcacctctgccccacctcaactcttcattagctctcaacaccgtgattggcatgaataaatagaggaataagagagaaaagggatgactgaaagagagactgaaaactatggcacttctatttcttcctatagaacaaatactagaaataagtcctcagggattaaagtcttatcttacttttttcctccaacgagtggctgactaatcagtgatttttaagttcttggaagtcacaattcaatggcttctgcattgctcagcttaggttccttttctcacccattccccctcccttctcatctccttgtgcctatggagtaaccaggtcaattcctatgatggaatgggctgatccattcaaacaactggttgacatggcttataaaaatagccaagctgggcttgttggcaaaggctagacttcaaggaagatgatagtggtctgagtcagcagcttgtgaaattcaagcaggcagttagagtgacaaaaaggaaaaagaattgacggtgaccaaaatgtccccagataacacatcaccccactgaggaaagaagacagaagtaaacaagtaggtggaaacatgtgccagtcaatttttaaagaaaacaacttcacctgacattatatttaaaaagattatgttgacctgcacatgctgaaacataaaaataacaattaatgtaatgacttttaaatatgagaagtagcatggagatagagca

SEQ ID NO: 57925 - DNA, 2022 bp, Homo sapiens
caccactgtgcctggctaatgtttttgttttgttttgtttttttgtagagggatctcactttgttgcccaggctggtctcaaactccttgcttcaagcgatcctcccacctcagcctcccacagtgctgagattgcagacatgagccactatgcctagcctattctgcttttattttgagaatttcaactttttcctctcccatatgtctatataaatgatccatcaccatggggaggggagggaggtggaggtggaaatgaagtctccacatgtggaaagcaaatatctggaatatgccggagtgtagtacctgcataggtcatactgggtcaaagattacaaacaattccacttaagggcacgaagaggaattggtgcctttgaggtcagcgtgcattccaagttctagaaatagagtttcaacaagttctgccagatgccttatcttggcagctttcctattattatttcccttgactgccaaagagcaactcccccactgccatgcacaggtcagtgactggtgcaatcaatgaatcaatcaaataggcaacaactggttttaagaactggctccatactgaaggcttctgtggggattgcattcagccaaacctcccaagggcacattgagaaggatttgtactagaacatattattgttctcagctcccagtcatttctttatgaaaattacgttgattatttttgacaagggagtgtgaatgtagggtattctgtgggaactctcatctctgcactcctcaaggctgagatgattaagatccatatgtaacaaagtttttccacaatgtgaagcaatggagtcaaggatggtgatatccagccccgtgccaccacttccccacttgaatccacggtggctgctattcatctatcgcgaagttaccgccaagcccagcaccacgttttctcattccaacattccaggaattctcttcgcattaggatgtgaaacgaaacttccttgccctgattagggagctctggttcagggctgcctaggctcttgtcttgtcagagctgcctgtgtcttaggataatcagaaggattatcctaagaaagttgtatttagggcaggattcctcagctgacccccggcttgccctggagagcacaccaagccttgaagtggttcagaaactaaccagccttcgggaaatgtcaggacaagcaatgatgactgtcctggtccttatcttactttgtattaatcatgaacctggatttatttccagagaagaaaaatgccaaccttacctctattcagatttcactgtcacattttagactgttctataataagtctgtaatttttgttttagtggaaaagacaactttgtgatgagtactattcttcagtaattaagtgaaaattactttaggaagtttcctgttctctaaaagtaatcagattcatggaagcagaagtgataaaagaagaaatcatgtgtataaagtagttcagtggaggtaacagcattcattcaacacatacttcttaagtgccaggcattattctagctgaaggtcaacagagaagaatagcacatgagtcctgctttttctgagggtgacacataaccactagctacacctgtgtgtaacttctgtgcaatatggatgatagcacaatattacataaactggatgctatgaggccacagtgaacgaagagcctgactccaggagttcagaggaacttcttagtggagacaaagctgtttaacatacattattgtctcgtgttacccattctcaaacaactcagacacccaacctgtgcataaaaaaactgaagacttttaaagtttgggttctataaaagctaatagctgaaaagtatagaggaaagttacatagagtgtacttcctcatggcactcactgtgattctgttgtaatgtcacactgaaccctcttgaaaacctccagattgagtttgtttttcagttttggtttgttcttttagcatacgctgtattctccctcaagtatca

SEQ ID NO: 57926 - DNA, 1568 bp, Homo sapiens
cacagataattattttctgccacaatagtttcttcaattttttaattaaaagtcaatccaccttagactcgactctttggggtgataaaaaagagttcttgaataaggattctgaaagtccctaatacagccctcaaagaagtaaactaagtttaaagttattttcttgtttcttatgtctccatgcttgcagagtaaatttaatgccaggttttggagaaatctatcttagaataaaaacacagttatcagtgaagctacacatgtgacacttaaataaacagggaacagatagaaggaagttctcactgatgctggtgaactggatgtcctagtgagcgtgccacgtcaccagagttgataagcaactgactgaaaaccttggtctgggaagctgctgtggtcagagatcaaagtgagaagggaaagggaaatgccttttccacacctaataagattcatttttcttgttttccttcaccaactccacaagactgtcaaggtaattttttggtttgctactaagctaaaaaaggactcaaccattttaaagttagtaagacatgggaaataattacctttcaagactccataagagtcttcagagtcagggaacattgaccacctgcttgattataaaaaatagtctttgttcaccaaggtagccctatagcttcctagtgtctacagcatttacacatctactttctccttcacagcctctacctctggaatagagattcttctggaatattccagaggttgtaaggggtgtgactgttgccccatggggaaaataggggctgcttggtaagtttctaggcagtttttttttttttttcataagtggacccattctgaggtctgtcctttcccctctctgaaaggaccagaacctgttgttctgggtttaattaagaaaagaagacatgcactcatggcgttcttgatctaaggcatccactcacccacaggaagagtctttggcaagacggtctcccgaggtgtcttctagagctatagttcatgttcaataagggagaaattacttaaactcatctcacaacttgattacattctcacaataatctagataatgaatacatgggagtagtaaatgaaagttcactttctactaaaatttcagaaagaaaataagtaagtctgttctctagaaaggaaaaagttttctcatttatgtaaaatgaatgagattagtcatcatggaggtaaatctagagattgtaaatctttacctggagaactttgacaacagtcaaaactctaatcaaaagaatggtgtgatttctaggaggcaggattacaacgtaagggaaaatctagccaattttacttaccctgtctgaaccaaattgggtggccaatgtgaagcatagaaaagagaaacccaagattcataaaatggtaatatttgtcaaactacagcctatgaggaatttggatgaatgaagatagattattaagatgtgtgtgttcagttaggataggagtaactcacagagcctcacctcctaataaatatccttccaatttttccataggctttt

SEQ ID NO: 57927 - DNA, 1260 bp, Homo sapiens
ttatctctaaaaataaataaataaataaataaatatcttactttcaataaatataaatcctctactggtattatgtggataacaacacatactttcaataggttgtgatgaagatcaaaatagagaacatatttaatacatctgacatatgcctgacccataataaatatttggtaattctcctacctttttgcctctctttgcttttattcaaattacaacaaataaaagatacagagtaatattatccagctgatatggagaacctgctctctaacactgactacctctgtccttgggcaagtcattgatctctggccattggattcctaagataaagcaaggatttggactagatgatatctgatttcttttctatctctaatattaaaagagactgagtatttaagattggtccttggggtgtcattttgattccattaagcctgagattcaattattctgctcaattgatctttcttaataataaacaaaatcaaacaacttagacaacattcaggttaacaaggcagcaaattagcaacacataacagaccttctcttaacttcccattaaaacacctacgaggatatacaaaaagataaaaactggcaccagtattgtaaactgaaaataagagaagaagatatgtcaaagttcagagggactttccactaatcgcatcattaatggatagggattgagaaatataatcttggatggcacaaacactaccctttgaaccagaacagcaacaaccccaaagcaagaggaagaccttggctctcccccactggccgaggtcaacttcaggacaaggggttgccctgaccggaaaaataggtgccatcccccactgaaatagagttatcatctgagcaagccaacatcataacctctcttttttccccatcagcagttctatttctgtatccatttagagtctacaattcccagtgaggtactaatcttgaagtagaataacagttggttaacagtgtagtgagtactaagtaggggttgggacaaggtgaatactgaaaactgagtgtggtgagcgttaggaagcagggaggaagagtgttatctttcatgtactgatatttcatacgaattgcattttaatcattgtcaaaaattgcaactctttcagcagatgtatgctgtgcccatactgtatcatatacaggacctttaaccctccttggctagagctaggaaggaaaaattgtcagtccctgagtgggcaatgagagagt

SEQ ID NO: 57928 - DNA, 572 bp, Homo sapiens
acacctactatctgttcagccctgcgtctcttagaattttttaaactatattctctctcatctcctagcttctactttctttcattttccttcagggctaaactgtgataaaagatggatcctctgctctgcttagcaaccccgaaagctctctgatgctgcaggagacagtctcagctcctttgagtggccttctggccccttgtacaaagtcctcacaaactcatcaccttctcttctccccaagcacactgcattccaaccacaccctttgtcttcccattccctaaacaggtctcaaacactgaatcatgctacaaacatcttcaagccttttcacatgccctctggatgtcctcctccttttatgcctagtaaaagcatccaaatccttcctggcctcacccagtaccacacagattctacaggcagaatcaggttatatcctagactctcatgatttcagaggcttaagctcttcctcccacaaagttatcccatcatgggattatgcaacacaaattatgactgaagcaagaggcaaacagaagcccaagtcccacctggctcag

SEQ ID NO: 57929 - DNA, 729 bp, Homo sapiens
gaatgagcctccagggcttgtctttctgattaacacagataacatagaaaagaacttttgtctttctgattaacattgataaacttacagaagacagcctttgcctttctcttctcttctgcctgcaatgaagacatagtccctggaggcacagcagacatttgtgaccataagatgacaagcctgaggacaaaagtcaacttttattttttgagacggagtctcatcctgtggcccaggctggaatacagtggcatgatctcggctcactgcaaccacatccccggttcaagggattctcatgtcttagcttccctagtagctgggactacaggcatgcaccaccatgcccagctaatttttgtaattttaatagagacggggtatcaccatgttggccaggctgatctcgaactcctgacctcaggcgatctgcccacctgcacttcccaaagtgccaggattacaggcgtgagccatctcacctggacaaaagtcaattttctaaggatgatgcaacaggatgataggtctctgacagcatcgctgagttcattgaatagctgtatcaggacgtttcttacctttggattccttgcaatgtgacaaaaagttttatttatataagctattgtttgtaggggtttctgttacttgcagcctcatgtattaggttgaaccatatgatatgttgtaaacaaaaatagttgaagcttagcagatttctat

SEQ ID NO: 57930 - DNA, 733 bp, Homo sapiens
gagatcatgccactgcactccagcataggtgacagagcaagagactctgtctcaaaaaacaaaaagaaaaaaggagagaggaccggaattggaaaactaagcctgtggtttaaaggtaagggacattgctaaataatgtaagacccagttcttgcagggcattaaattattctctgtaaaaagagcttacagccttagagaaaaaaattcatgaactatagctctggaactatgagtccaggacccaggaagcctggtctttagtccaagctcagtagttaacctgtgtgattcagacagttgctcaatctccccgagcttcaacttgacctaacgatgatttctgtcatctcccctccacttgcgcagtctattcctgcagtgatggtgtcataccagcccatggaacagtgcccatcaaacaaggtacttgtcagtatttacgtttttttccagtggttagtcatttaaagaattattttgcattactaaagcatggatgcatgtatactaatccctggaacaaaaatgagcatttactaagtaccaagcagtctgcttagcactttgcaggtttaaacttcacaactggaagtgggccagaggagttgagtacctttcccaaagtcacacagcttgtggattattaatttgggactctgaactcaggcttttctgcctgcaaaggccatgttctgaaccactaggctgcattggaacagaatacagaact

SEQ ID NO: 57931 - DNA, 1415 bp, Homo sapiens
aaggatgggtgagacccacttctgccatccagaactagcatagagtgggatagaatggcacatgggcagttaattatagaacaaaacagaaccaaaggttaagtagaggcatccctcagaggaaggagagatttttctatctaggagagtagggaaggctctctgacaaaattgtcttttaacgtgagtcttaatgaaggagcagaatttcagtaacaggaaagggttggggaacattcaaaggtgagtcacagagacaaacataaagacatgagaaaaggccctctgggcttatacaaaccctatggttccctgcgggctttcagaagatcccaagaagaaaggatcatatcccaagacataaaaagtttacagaatgcaaaatgttggaattattctaacatattaaatgaatttgaaactttaaaacctagatgatgaagttttatgtaagaaaacatataaaattaaaactataccaattaaaaaataatgttttaatcaaagacacactttttaaggactaagaaaaattgggggaaagtaaaatatttaaccataaaactgaaaacaaatgtgacattgatcactgtgctcagcttcccaaaatatatattgcaacattcccctcctccctaagctatatcttcaaaatatatatattgtttccaatatttgttagacatcaaaattctttttttttttttttttttttttaagaaagggatatcaccatgttgtccaggttggtcttgaattcctgggccaagtgatcctcctgcctaagcttcccagagtgctgggattacaggtggtgagccaccacgccccgccaacatgaaaatttttaaatgattgccaggatacagatcaacctaaggatttcttcacaattaaaacaaaaccagtcatcaaaaataaaaatgactttatccacacatttcagaagcaaagtatatttccacccaattatgtattcccagccagtgcttcaagaaaaattatacagcagctctctgaaattgcctggtgagaatgtgctgccatcattcccattgttggtcaatgcaatatttacatttagggagactgttcaaaggtcacaagacaattatttgagaaattcagccacagtttgatgggaagataaatgagtgtctagagaagtgggaagtggctgggcatggtggcttatggctgtaatcccagcactttgggaggccaaggcaggaggtttacttgaaaccaggagttcaagaccagactgggccacaaagcaagagcctgtctccacaaaaaattttaaaaaattagctgggcatgggatgcacacttgtggtcccaactacttggcaggctgaggcagaaggatctcttaaacctgggagataaaggctgcagtgagccatgatcgc

SEQ ID NO: 57932 - DNA, 2051 bp, Homo sapiens
ccaaccccagataactttattctctctacctgaatatgtctgaaactcaggagacaggtctgggctagagacaaagataatagctacattcactgagcacttagaaatgtggcggtgtcatgctaataactttacatgtgttcatttaaccctcacttgttaggaaaactgcagtaatattgttcccattttattgatgaggtttcttcagggcagaggggttgcttaataggcccagggactcaagggctagtaagcagtggagcaggatcaaacccagggggccaaccccagagcccctccctctcagccagtgtgctttattgccccaattctcagtcatctgcatacaaatgggaattgataaggggatggtccgttgtaaccatccaaaccaggactcttaagggtttggggtgctactaatcattctggggaaacaggcagaaaccagaactgtttggggcaaatagggacatagggttacctcatttcctgacactctgaaaatgggtggacacacgaggataagaatgttgaagaagagaagaaaagagcccttcagtgggccttgagaaagacctggaagggagggagaaataagaaaaagagagagagagagagaaagaccaacatttggggaactgccagagaaagagaaaccctcaaaagatactagggaaagacaggatacaagggtgtcacaaatacgtggacttgagggctgggtttctcagagggagcagtcagtagtgcccctacccctcatactgtaagaaccaaaaagtggccactgaaaggagcaacagggaaatcatcggtgatttactaacaaacattccttggctttgatccagtcagagccaaattaaagtaaacggaggagtgagtgggaggtggggcccagacccagacccagtcagtgcaagcaagtttttttttttaaatgtggccttggagtggaggcaaaagataggactgtcctggaggtggagtcaaagatgtttcctttctttttcaaagcaagaaactagaatgtgtttaatgctaaaaagaaggatccaggccaaggagggtaaagaaaatgcagaatgcaaattatcccctcactgggggatatccgggagcgaagtccctgagctgctgaggaagctttacgcctaaggaggtacctctctgcctttgcaggagggtgggaagcggggtgaggatttgaaggtttgaggagggagtccaaacagggttctgtctgcaggcctgtgttttctctggaatcattgtgggagggcttgctgagccaaaggattagaggggcctactgtctggcaggccttgtattattaggcccctgatgtacgagatctcttttcattttcactattatttgacgaggtaggtaatattattccctttttacagaagaggaaactggttcagaactgtgggcagccagcccaagagcacgcagctgtccaggggcagagtccacgtctggcttctttgtctggagttgaaagccagatcaccaccttctggtatctttcatttgtgttaaaggggtaataggtaggaagttagcaaatatactttgaataatgatgcaagaccatcatgtagaggtttactatagactgtacatgattgaaatcatacttttgtgtttatgaaatgctttgattatttattttagggaatatttacaaaaggctgtaaaacaaaagtttaaaaaagtgaggtcactggaattaatggtccatagttttatctttggtttttacagaagttacctgcatttcagttactaagaaccaccacttcattcataaaaatgctctctgcatttctttctgtaattcataggcgttgtttatattagactattattatgggaaaatacactgctttaagaatttttaaacttggtaattttcagactcaaagtgtttgagattcttctgctgatagtttatttaaaaagaattacaaatttcagattgtggcctggtagggatgatacaaatacaaactgaatatacccacagtgattcctt

SEQ ID NO: 57933 - DNA, 515 bp, Homo sapiens
aatcccagctactcaggaggctgaggcaggagaatcgcttgaacctgggaggcggaggttgcagtgagctgagattgcaccactgcactccagcctgggcaaccagagtgaaactccgtctcaaaaaaaaaaagttacctcatgaagaggtaatgttggtaaagcacctgggatctagtagctgttcaataaacattaattttgttttagccaaaatatttcacttgcatcatctaatttgatcttcatagaaccctgacaaacaagcagaacaaatattgtaatctcttctttattgatgattaacctggtattttgaaacttcttaagtatgggttgaacatcctttatccaaaatgcttggaataaaaagtgtttcaggccgggcacggtggcttacacctgtcatcccagcactgtgggaggctgaggagggtggatcacctgaggtcaggagttcgagaccagctggccaacatggtgaaaccccatctctactaaaaatataaaaactt

SEQ ID NO: 57934 - DNA, 544 bp, Homo sapiens
ataaataaaaataaaaaaataaaatatttgtcaaataaaattaaagattgttccaagttcatgctattgttttagctactaccatgtaattgcctctcagagtattaggaatccagtttgaatgtgattttaatatttaaggagataattatggattgagcagaagagaggggagattgtgattctttatttgagctaagttagaaaagggatcaaagaacggatggaaatggcatgaagcccagggtgttggcagagggtagccagagtggccaggctggttggtgcagtcacttaacacacatttcagagcactgaccacaggcccagtgccaggcactacagactgtggaaaccataaaagcagttgctgagatgatgtgatgcagtatttcttagaccatttccctcagaatcactaagatgtttgttaaaaaaacaataccagggcataggccccaccctaaaaccattaaatcagaatcagaatcagaaattctgagggcaaaaacctggagacaagtgtatctaaaagttctccagg

SEQ ID NO: 57935 - DNA, 960 bp, Homo sapiens
cgtgagccaccatacccggcctgcaagagacttttagatgaaatcctagttaatcctagttaagatctggttaatagagttaagcactaccacacaatgtttactacattgttcaaatatacaacacacatttgcaaatcttaaataaatgaaaccggaaataaacttactgtgggtcactgtgtacctcaatttcgttgtgtgtaatgctgtgatccttctatctttatagtacctttacacacaatggtgactcaataaatgtttgttgatggcaggctgaatgagtgtagatatgaagaaagtaatccccaccaccaccctgccctgaaaaactgattgcattatggtgcttctaattaacttttggtagatactaaatgaaaggggaccgaactctgacccaaagttcatgtttacagctttgaacagattgagtttcactcttgaagtgtgtgaacacaaaacagcagaacccagtgagacaggaagcagacaattttaaccatagctactgccactggaggggtggggtagtttgggctttattgtgcaagacaggaagtatccagagagaagaaggaaaggtatgaacttgtattgagtgttaagtctgtgtcaggcatcaggccagcagcttatataaaccattgttggatcactctgccattctgaactggagccatttaaagataaaaaggacgactcttagaagtgttatagttagataacttgcccaaaaagtctcacagctcacatttggcaggttctggattgaaactcagaccagtctgctttgaaggccacagctttcccactctgctcagctgtttccattctgccttttgtagtaagaggactgaccatttgaattaggttctcttggttttaagaataagacttaggtcacctcaagtaatgaagaatgtgctatgtccattcctttagaaaagaggagcc

SEQ ID NO: 57936 - DNA, 542 bp, Homo sapiens
aatacagaatatcaaagaaataaaaagttggtttttggaaaagataaacaaaatcacagttttagtgggtcaggaatcagggcatggcttgactgtgtcctccacttcagggtctcacaaggatgcaatcaaggtgtcagctgaggttagactgagcaaggatccacttccaagctcaggtagtagttaacaagattcagtaactcatgggatattggactgagggcctcagtctcttgctggatattggtcttggactgccctctgctccttgccatggggctttctcaacatgacctttgctttcttaaagtaagcaagaggccatgtgtggtggctcatgcctgtaattccaaaactttgggaggacaaagtgagaggatcacttgagcccaggagtttgataccagcctaagtaacataatgagactctacaaaaaatagaaaaaaatagccaggggcacacacctgtggtcccagctacttgggaggctgaggtggaagaattgcttgggcccaaggggtcaagactacagtgagct

SEQ ID NO: 57937 - DNA, 792 bp, Homo sapiens
acctcctcatttctaaatttgtttgtatttctaaccctgtactttgtcaatgtgatactaaaatagctgaatataaagtgagattttggtaaatgacccatgattttttttttagtaataccaaatgacagtccatcatagccagtctgtcttctggcagccctgatttctgaactttgcacatattggagattattttgcttctttctacctacagaacatgtaggggcctggggatgtggcaagaatctcacacctcttggaaagaggaagtgaaattggccttttgcaacttcattttaataaagggcctgagttaaagtctaatcccagccggctgagccagtgataatgtaagagtgtgtgtgtgtgtgtgtgtgtgaccattttccttggagaatcctgcttcttagactataatcctagatattataaatgaataaataaataaagaaccatgaaactctggttggcagcgcaggttaatgatctgattgtggcaagagaggaccttgagtcttatcaattttgtatgtttgtactgggggagcttgtagggaggatagggttgcagcaagtacttgtggaatattgatggatattcaaggcaaatatagacccaggaattatgaagtaagcacttacaggaatccaaaagcccataaattaatggacatctccaaagcattgtaataccttgatagtataagaatcgtgctctctaataacttaaaacatggccttatttttgaaatcaaaaccttcagcataaacacatgtcccttttgtgct

SEQ ID NO: 57938 - DNA, 1204 bp, Homo sapiens
gtgtactatgctctccccaaaccagtagcctaataaaattgagtttgaaagtcctccataaattaacatgttctaataattctataagaaagaatggagatacaatatttgatctagaaagtggatatccaatgatcatctgagcaaggaacaccatcctccttaaagtaaacagcacacagctgtttccatcatgctgactgtaagaagattatcatactcagaaaagaaattccaggaaactgcgttccaattaacatggaaatgaatccacaaaataaatatgtatccagagtttatgcaatcccagggtacaatggagacagatgcagattgatctaatctggttgcattaggaataagaatgtttgttggggaacattgtgtggaaagttgacatttggttcaatcaggaaggccaaagtagaaattatgaaagcaatttcctttgtccagttaaattaggcattcaaataacaggctactctttgaccttcctgggaaaggtcaggatggcatcgaatggtcattaaataaatagcaggcctgttcttgtaaatactttgtgagactttaggaaaacatattctggattgaaaatcagccaaaaaagatctgcaagaatttctctaacatatttttattgcttctatttatccatttttaatttggagaaatagtaagtactggtaaaagcacaagaacaaactgaatatggggtctattgaacaaaattaagaggtcacttttctgccacttgctaatatgtgctgcagctgctaaaaaaaggaagttttgttgtttgtttgttttggttttggttttggttttgagacggagtttcgctcttttgcccaggctggagtgcaatggcgtgatctcgcctcactgccacctcctcctcccgggttcaattgattctcctgcctcagcctcccaagtggctgggattattggcaggtgccaccatgcctggctaatttttgtatttttagtacagacggggtttcaccacgttggccaggctggtcttgaactcctgtcctcaggtgacctgcccgccttggcctcccgaagtgctgggattacaggcgtgagccaccgcacccagccagaaagaaggttttttgaaaaatagctcctgtggatgtctccccaaggctccacttgatatagctaaggagaattcctggcatgtatcata

SEQ ID NO: 57939 - DNA, 1085 bp, Homo sapiens
tttataattttaaaacttgttaagtttctttggtcaccattaatctctgccacaatcacatgtatcactcaggccaccactaccaacattacttcttagtttcattcaaaggaatgttgtcaaatatgtggatttctcctaccctcaaatccagataaagcaatgggcattttgatgaatacaaaatgtggaattagttttttagctaaaaaacaattgctcaagatcttcgttggcccggaaggataatttctttctaagtacagtgtgctgggcttctcccctcccaacttagaatgcagatagcagttcaggaacagtttttaataatctaacttcacaatagacagatgtggtgggtattaatataacagaaataaactattataagctactgctcactgtgagctctgtgctgtgctgggtagttctctcctgttatcgcatttgcttaattgcacaactaatgtttactcagtgtttggtacttcttctaaatgcagcttagcatagtacagaggttgtcaaatgtcagtggactttggaattacctagagagaatgtgacaaatgtgtccccacctccagagttgctgattcagctgatggggatgagggttgagaatctgcattcctaacacattctcaggtgatgttgatgctgctggtctggggaccacactttgagatcactgacattgtagttaaaagcagtgactttgctatcagactgatttggtttgagtcctctaactttggatacattttgtaacctcttgccatttcatttcctcatctgtaaaattatacctccaacattagctattttggggattaaatgatatatatgtgtagtgtttagtacagttttttatgtgttagaactcagtaaatgttaactgctactactgcagcaattactacagtgctactgttactactaaatagaattagaaaatgactgattttaaaatcatttttaaattgtcaatgccacctcttctctctacctagagctgagtgccaacatctgttatgacatcataatgagattaataactaagaccctaaggaataatatattgg

SEQ ID NO: 57940 - DNA, 2747 bp, Homo sapiens
gagctaaacgttgggtaatcgtggacataaaagtggcaacaatagacactggggactattagagtggggaggaagggagacgggcaagggttgataaactattgggtactatgctgactacctgggtgacaggatcaatcataccccaaacctcagcatcaggcaatatttccaggtaccaaacctgcacatgtaccccctgaatctaaaatagaagtcaaaattataaaaataaaagaaaaaagaagtattatcccctccactttggtcccctgaaccctctgagaataagaaaattagtttctttgtggaggaacggcatggttcctcggttccttcccattttggtagttaattgtgattccccactagtataaaggattctggaaggctgccatcttatgcagacttacagaaaaagtggcagaaggagtctgactggctggcccaggattcatgttcacaagtagactgagcagcccttgtgctttgcgatcattctggccatcaaactccatggccccatattcgtgtcacttgcccaaggtccttccgtccaaatggccaaacccacctgatgttgacatgatatacagtttgcaaagtgtttcccgtaatattttgtttgcaccccaaccttgtaagggattattaactattctatttacagctggaaaaaaatgaataatttttgaaatctgacattgaagaaaccctagaagttagcccaactcaatcccttattttctcagatgatgacattgagaccctgaaaagttaagtgccttgttcaaaatcacagtgacagtaatgacaacaagggtgtcttgatcagatatggtactgagcactcagagtatgtcgtctcattttgttctcacaaccatcttacaaagtaggacatgttgaaaataagataagcaaactgagagggctgagtcaaggccaggttttctgatgcaagttcagtgcagcttcactcctcacagctacgccaggttggcccctctccactcctgacgtcagggccatctgaggggaggacatggctgtcagctgggaagagtgaaatgggcaaagactgcgtcacggctggaagggatcgtggcaagggcacaggcagcaggaaagctggtgagtcaccagaaagtctggctaaggatgagactgagatcagttcaacaaaacagccaaaacgatcacagcagcatctctctctgaccacccagattactttcagcagcagcacagtatgagcaaggctgagctccagggagagccagggaacaagccagaaatttttatcaggatttctttttcacacgaactcctcagactctaaatccagccctttaaactggtgaagcaaaggtccaagagaaaatttgctgattatatgaattttcaccagcagtaaatcagtggttctctactaggataactgcgcccccaggggacatttgacaatgtctagagacaattttcgttggagggttgggagagcgctactggtaaataatggagaaaggccacagatgtggctaaatatccttcaatgcatgggacggcccctttcaacaaagaattatcccacccaaaaatgttcatagtgtcgaggctgagaaactttggtgcaaatgaagctgagctgcgtataaacataacttcagttgcacaataaacaccccagctttcagagaaatagtcaactaggtcaaagggcactggagtggggactgcaaggcctgatttctagttctaacttgatgacaagtttggaactttgggtgtctttttcttcctagaactagagcagccatgtgatgcggccagagccttcctggggttggctagtggcatataggaaacagcagggctactctacctttgcaaaacattcttaagttatgattaacccaagcatctcagtgttgatggaccacctttgttttagtagggcctcagcacttttttcctccaattaaaaaggtaatccatatcattatagaaacttaagaaaatacagaataacacaaacagaagaaaaaaagtatcttataatcccatctcttagaaaggagtcttattctgaaggtctccagatactgaccttcattttcaatattttgaagaggaaggggagaagagagagtcactgtcctcctccttttgttgttgtttttgttttctttttcacttctttatagtacaagcgagctttaccaattagtcaaaagtggagttcaaagagttttaactgtagctacttgtgtttgtactaatgttttaactttttaaaaaagttaaagttgttgattgtggtaaaatacaaataacataaaacttaccaccttaaccatttttgactgtacagttcagtagtgttgtgagtcaatctccagaaccttttcattttccaaaacaaatactctgaactcattaaacaataactcctcaatttcctcctcctctagcccctggcagccaccattctacttcctgttttatgaacttgactactccagattcctcatgtaagagaaattatacagcatttgtctttttgtgactatttcacttagcataatgtcttcaaggttgatctatgttgtagcacatgtctgaatttgcttgctttttaatgctgaacagtattccattgtgtatcccattttgttgatccatttatctattgatgggcatgtgggttgcttcccctttggctattaggaataatgctgctgtaa

SEQ ID NO: 57941 - DNA, 2111 bp, Homo sapiens
tgcagataggtcttctgactcgtagcctcaacaactaaattaggtttaagcttctttcaggcagtgtccatgtttgaccatatatgcacaactcattcaaaaacaaaactagtacaacgctttgttgggaactcaaataaatgaataaaagcgcaacaagtcagtgagatgctgacgggggttagatgcttttccatttcacccatcaccgctgctgctcgagcaggcccaaaaactctcccagggaccctgcgatggggcgggggtgcgagccagcaatcaaaaacttccagcgctgggggtatcactttcacacccgctgtcccggcgaacaccgcacacccacgccgcaagggggcgggccccacctcggtctttgcgggagggcggctctgccttcccgagcactgcaaaatcgcagcagggtggagggtccgcctgcaaagcagagcgcgcaggcccgggttgcgggggcgagcccctccgggaacgcgcgacccgagacgccgctgccctggacaccgacgcgccgcctcaacgcgcgcctccaccgccagccccggcccgccccgcctcaccggtacccataaccgctacccctcctcccaccggccaccccaaggatctcctacgctgctccgggcagcgagaaccgcaacgcccgctcacctgaccaggccgtaacccgccgcactgccaccccgtcagccccgcagcgactcacgccgagcccggcagtgactcacgcaaagccccgcctcctgcgcttccccacaagcccccgcggcctcgccccgccccctttagcctgggcttgagcgcgcgcagaagtcagcttcgtgacttccttctcaggatggaaccagcttggtggcttgagggtatgtaaaagcaatatctgagccttctgcctgcttccaatatgactaagcttaaaaggagataacccaaaaactgcaggatcatcctgattttctgatctccaaaacaataaaaccttgaatatttccctggactcccttaaacagtttaatccctaatatttaccttgctaatctctgacctttgtgacattaatttgtctgacctttgtgagtataataaccatgtgagaaagttactgtttttccaccatgaacagactactgtcaaccggtaatcctggtaattttaggggatttttttttccctttaagtactggttggcaaactagtccttccgtctaactcctcgcatcttttgcaagtaaaccccttttctaagtgaatctatctctgagtctttctttgacatgtgccagtgttacaatctgtctttagatatgctctggcttacagagaaaaaagaacgaaacttttaacactttttgcttctgcttcccgtgtgagggagtcttcgttgcaatgacaactcttaaacgaaagcaaaacaaaaataattgcagaagtccacagaagcaaacacaaacaaatgaaactttccatttaaaacaggactgtaacctcaaatatcctcaaaatccagatcggtggttctcagtcttgactgagctttggaatcacttagggagtatatacatatacacgtgtgtgtgtgtgtgtgtttgtgtctgtgtgtgtgtgtgtgtgtgtgtgtgtgtgtgtgtgtgtgtgtatactgatttctgtgtcctatcccagagattctgatgtaactagtcttgagtgaagccaatcagaattttttaaagcataggatacggctgtgcatttgaagctggaagccactaacccaggcgctgatcaatgaagaactaggctggagtgctgtcttacaaggtcatatcattagcacatccttcccattgcttaattattggtatctttatattttaaaatcatagtagtcaaatcattaagtgtacgtcaaaatatttactaatgaaatgattctttggttgtattagggagatagagaactgacttttaataatttttttattaagtatttaaaagcaaatattgatttactggtgtttttaacaaaagcaaccacatttgttttattaattctgacagagttgattgagaagagagataagggggctagctggctgctctagtaaaacctc

SEQ ID NO: 57942 - DNA, 862 bp, Homo sapiens
gtgccgaaagccagagtgagctggggcaggtgcagccttcacaaatgcggtgggatatgaattatcatagaactttaaggataagtgggatttggacaaggagagaggtgaggagagagttagtaacgggacagcctggccttggcatcggaaccctgagttccagccccagctccgcttccaactcatttgtggcctcagataagtctagcctgtctggcctccgtttctctcatttgaaaagcccttgctcagtctagacctccaagattctcttgtgtatttactacgaagagaacgccagggggcagcacaggattgcaacttcttcatagagtcactcttgtgtcgctgtcactttacctaaaaacagtgtcaccaactcttaagggaggcagcagctctgagccaaggcactctcagggacaacgagggaagacccggacagagccacccctgagacaaagcccagctgcctggagttgggaaaggaatctgcaggacagtaacaaacacaactccatgccaagaagtcctgcggccaaaatcttttttggtctgactcaaatgtgtctctacctggaggctttccaaccacaactcttcccgataggacttcccgctctgaacctttgttgattctctgatgttgtttccccagccaaaaggtggactcagccaacccgattcctggactttattgcgggaggagggagtagagtcagcgactctacctgtctgaaacatggtgctgactccaggatcgcggaggtggctgagacgtgctctgggtgggggtgggatgtgaggggaggctcacacctggcagagaaccctgagactgtagcagagggtgggcgtg

SEQ ID NO: 57943 - DNA, 1624 bp, Homo sapiens
ggaaaagatcaggcccttcttagtcctctttggaattctgtcccatctcactgcccatgcccctgcagggatctccactacctcccagtatgaagctatagattcactaggtctcccagaaatgcagcttcggcttaaacccttctcctctcctcctcagccctgactaaccctccctctcccacccaaactccccaccgtgtcagcttcctctcccgccctctcctgctcctcctcaaccctgaccccaccttacccaccttcatgtttcttttcaagctcgcacagccgtgcaggctctagcaaaaggctggggggtccccagcgacccccatcagctttgataaggggatccggagggtgccagtgggtaagtccaggtacagtgaactgggccagtgcctagctggactggctgccagggcagcaggatgcagggctcggtggagaggctcctcttgggtgagtagaggggtgggggcgtggtggggggacgccacccagccaccggcgacagggagccccgagcctgcgccttcgtctcagacgaaggagccagctggcaccgggcgctgaagcaaggctgcgctggcaccggtccgggcgggagctgtcacaccccctgcgctgcccgcccccttcccctccccaggactggcggagggggcggggtggaggcgccctgccttacggtagaggaatgcgtaggggaagggggccggcactggcaggctttggagtccgcacccgggggtaccagagtggacatccgcctgagcccagagtatccccagggggcaggagcggccccgaagtgtgtggaggaggccgcaacggccggggtgtcagggatccggcggtgagtggctgcactggccgccacgtggccgggaggagaaatgcaaacaaggaaaccggggagagcggggagggggtgagtcactgcggcctcacccgggagggaaatccgggctggggccgcttcccggctgggggtgtctgcctcctgtttcggttcagggtctccagccgcccgggggagggaataggcggctttcccgcggggaatcccgctgccttgcctcccacagttccgttcccagacccacgccccactgccccctgccccagcacacacacaccgggagcagttgaggaaactgaggctggagaggaaggactgctctccagaacgggtaggggccctaagaggagattggggttgtggcagagcttccaggggagcagaaggtgttcgagtaccacgccccctaccgcgcgctccctggtggccgggtaggttgaggcggagaccgggcattccagcgccctgctaggcaggcttgctaccgaggctccacgcctccctgggcctcagtttccaccactgtgcaaatggcccagcgcgggcctcttcgccccactcctgagagggtggagagacagtggccggggacagcgacccgtaattcaggacgataatgagggtttggaaggaggtgaacgccccacccccagctttttaggactttttgccccttctcttcccttttccctttgctgttgagccagcccagactgggaagaagtatctctaaaaagcctataccccaattttgggatg

SEQ ID NO: 57944 - DNA, 1604 bp, Homo sapiens
gaaggacgggcggaaggaattctattcacagcgtactctaatatttcttaagttttacctattaatttttaacaagaaattttaattttaattttaaacgaaaatacgcatcgtactcagaggtaaagatttttaatcctcgcggttcgctcgtataaaggcatatttccggtcccttccaaggtccaacaatccggacacggcgggtctggggatgggcccaggaatccgcctttttagcagcattcccccaaacgacacggcagcttcgcaaagcggcggtggcgtctgcggttccgggcgcgggcggcctccggccggggagggcgctgtgcgggcggcgctgggggcgggccgggggcggagcgcggggcgccggctgctctggcggctcccgcggctccggctggcggcttcgggccctgcacctgtgactctcggccgcgctcgccctcggcccgcccggcgccgcagccccatggccccgtccaggctgcagctcggcctccgcgccgcctactccggcatcagctccgtggccggcttctccatcttcctcgtctggacggtggtctaccgacagccggggaccgcggccatgggagggctcgcaggtaccccgggacgctgggcggcgcggggcgggtgcgcggctgcggggcgggcgccgtcagctgctccaggacgctccccgcgagcggcgcttccccgcggagcgggtggagtgtttactcgaaaacagcggttggcggcggcaggccccacgcgggcccgggctcctgggcattcctgggtgcctctgagacccgatgcccgcccgggcgccacctgggggtgccgacggcccgccactgccggctgcacagacctgccgcgccgcccgggttatctgtcacggcacactgcctgtcgccctccgcccagttgccccacgacagtgtcccctccgcgcgcccgcggcgctggtcgcctcctatccccaaacacacacacacacacacacgcacacacacacggttgttctgagggatcccctgccccccaggcgccccttccctgggtgctgggtgagggcagagagggaagaagtgggaaaggaagagggctaggggtggctggggaagcccatctccctccttccagagggctcccccgcagagccctctgctgagacccacagggaggacggcgttagggatctcatagaaactggacattctctttccacccatgttggtgcctttttgctacccgtctgctgtggctcctcagccaagctctgccaaatcctgcaggccagccgccctttctgtgcttctgggagggaaggggaagcatcggtgcgctgatgggggctctgggctgaccagtgctccttgttgtgcacatttgggctcgcagtttaacctctctgcgccatagaattggtatgaagatgaaaaatattatctctactttctaacattttaaaaaatgctttctatgtgtcaggcactatgttaagcaacctgcttcccttatttcatttaatccttacattagtctcatgaagtaggccttacgattatgtccattttacagataaggaaactgaggcctgaagt

SEQ ID NO: 57945 - DNA, 2697 bp, Homo sapiens
cagaccccaggcctggggggtgcacatcctgtcccccacccctcacacagcctgcggcgccccgcttcccgcgccgctgccggcattgacctccacagctcaccagggcacaggtgtctcttcaccctgatgggtgagcaaggatggggggcaatgctcagagaaacctcccagccagagacccctccaagggacctctttccccgccgaaggatctgagtagggccctgcccggctccacgggatgggggcgctgatgtccagccccacaaagcccagccccaactcagtgggtcctgccctttgccctcgcgcttccaaaccttccgccccggagcaccgccccctcgccgggccaccgcggccgtccctccctccccggtccctcggctcgtcctccccgggaacaggggtgatgggacgtggggcccgcacaccggcggccggggcctccaactccctcccttgggcctgtagctgccccggggcgggcggatgtgggcgccccgcgggaggcccgagccctccggcccccggaaccagctccgacccggagcctgccagagccccgcggagccgggcgggacaggcgcggtcggggggcgcaagccgggctgggcccgcggggctggcgggagcccgagccggagccggagccggagccggggccagggccggaggccgagcctgggcgggcgacgctgggtgccgcgcgcagggcggggcggggggcggccgcccagtactcaccagcgccggggctgtgcatccaggggccggggccctcagagcggggggctcatggcggggcggggggctggggcgccggcctcacatccccccagtcgccggaggctgcagagcgactgtgagacggcgagaggaagggagggggccgggagggggagggccctggcagcccggccggccgggtaggatgacaatggaaggaaatgctttatctgagtctgagagcgggccaagggggaggggagggagggggcaggcgctcgcggccctgggacacaccaccccggcagacactgcaccgcgcggcgcacaggcgggccgcagacaccgcgcgcggccagatcgcggcggggcgcggcgcactgccggggaggcagcgccgaacccggaacgccggccgcggctccgagccccagccgccgcgaggcgctccgagccgtgcacaattcccggaaacccagctacctgggcgcacgcaccctcgcatacacaacgtacacgagcacgcatccatgtttacaaggggcagaatcatttacacagcacacactggggcttcggggtggacccccgtgcacacactacatacccgtacagcccacaagcacgcagccacacgcgggcacagtgggacacgcgtggtgtcccatgtcccatacaaggaatcccagacggacaccccccaccacacacacacacacataagcacgacttgcctcaggaaagttccaggatctgatttgaatcactgcccagccctcccccactggcacccccacacacacaccatgcctgctgaggggaacggaagggtccagcctgttcctattaaaagaaaaagggtgtgggggtggtgcagattttgaaagttttctttttttaaagaaatttctcaagggacttccttccctcctctcctcttcctctcttcctcccattcctctccctccacaacccccctctttccccctcccggtccctatgagtcaaacttcagcaatgtgcccagtgtcccccagtgcattacagcggatcacagaaatgttccagtctgtgagtcggaatgcagccgcctccagccctccctcagctaataaactcagctcagggccggctttaggcagtggccctccctgcctctccctccgcttttagctggagagaaggtcagattcaggggtcaggggctaaggacctcgccattgtgcttcctgggctagccggtcagccgtgtctgcctccagcaatctggagctgctcctaggaaggggagaggtccaccacgcaggaacactgggctctctgcagcgtgaggcgccaccattgtaaaccaaggagcagcttcccctgaccccattctatctcccgcaatcctaagaaaccccaagaatccagagaaggaaaaattgaggcagccccagaggtggagtcatgtctgattggaagcaagagcccacagtggcctaggagggcttggccatgctggcggtgaacttcaaaccatagattctattcccttccctcaggcacagctcgggactcactatctgttgctaccggcatattcagcgtgggacttcttacttcagcccctttccttgtcccagttctccttcggcaggcagatccaacccctctgcgcttgttaacttaccctcccaaaagcctttcctggcattcaagtcctcctacaacctggcaccacactccatacacatccctgcccagtgcctcctggtacttagggctcagtagtgttagtcactattattactatcattatttctgccagactgggctgctagctgcttcccatcctgtcctcacgcttccacactcccttgccttcgctcatcatgctgcctccaaaagaaatgtcctcccagcccctttctccttctgttgaaatctttccaatcctcaagacccactccctatctagtggga

SEQ ID NO: 57946 - DNA, 501 bp, Homo sapiens
gaagggggcagcattggagtaatccgatttaatgagtaactttctttttagggcagctttcccgtgtatgcaatctcagccaccattggaatcactgaacctggaatcactgtatctggaaagggccgtgggggccctctgtcctactccccactagagcagggaaggatgaagcctgtgtagacaaggactgctgcctgacatgaggatggaagccgagtgcttctgtgttttttccctagctgtttacacaaaacaagactttggaatatgtggagtttgcaaacagtaacgtgaagcgtggaggagggagttggaacttgtgctctacggaatgtgttgtcagttccaaagaaagcctctgagggtaaaccctgggctcagagcaatgccgggctcacacaagatctgtcgcttgctcctgcttgcctgcctgccagaggggccctcgctcctatcactacaaccaaaatgtgcaatgcagtaggagtgtctcagcac

SEQ ID NO: 57947 - DNA, 1189 bp, Homo sapiens
ccaccatcacaggtgaccatacctgggccctgtaagacaataaataaggttacacaccctccactccagcagttctgagcaccatcgacagccaatcgctccttttcttattcctccactccatgccaaggcgccccgacagaagaaggaaacaaatacttcttgttgcccaagtgctaagcactgtgttagcggagcatttctcctaagcgccgaggatgtcgctgctcccctcgccagcctggcacgaacttcagctttctcaaacctcagtgccccttagtgtcccagcctcatggcacgacagcccggacctcagtagccaagtttaccgctgagacttagactctaatgctcgcagccgggcgctcaggccccggtatcccagacgccccgaccccgagtccctatcctgagaccccctttcccgctgctcccgggttcgcacctggtccggccggcgggtggacaagctgttccgcgctcccggcgcacacggctccgctgccgccttttgacaagcagagacagcccagcacctggccccgcctctcggtcaggccccgccccggccccgccccgcccctccgccccgcccacaggtccagtcctctcttgccaggagctccgttggcgctgcaaccatcttgacttggaatcaaccaccctataggccacgctgtagccttagatactctaactcgtgaaattttcatcgaccgtcgtccatagggcaaggcacgcttctgccctctgtgggacagagttgtcgatgattataggtgcggatacccgcttcagcctgtgttaatcggggatgcagccccccacccttcctgccgtggttctacccagcctgctgcggacgcctgagccaggtgcgtcacccccacctgggctgaccaggccaggacttcgtcgtccgcgggacgctggggggcgcctgccgactggcaccggcggctagctccgcacgaatgggaaatcccgggctccgctcgccaacctgttactgctgcagaacgccaggaagctcagcctgatcccacagattagggtaaaatatcccggggggccgaagtggaaaccggagttgcgtcattgctcccacccgatatcaccttggcagcgaccgcggctgaccacgttcccggcctgtcgcgaatctcacccaagggagctgagtctc

SEQ ID NO: 57948 - DNA, 2177 bp, Homo sapiens
tggtagagtgtaaactggaagtaggttaagggatcatgcttatagagatgcttaaagttgcgctttaactgtaatttcaaagtcagggtaatctgtatttcaacatgagtccttaacacaaattatttttatgaagaataaagatttaggagatgatgagatctaatacatccagaataaccaattataacaaagaccctcagtcaaatagttggtagtagataaaaggctttatatgaatattacaagaatcaccaccactccaaatataataagtgtaccaaatatgaagtaaaatgactttaacaaggctgacttgaaagtgataaagaagcaagttactgctaacaagatagtggaaatactgcacaggcaccgataaacagaaatcaccaagctcaaggaaagagaaacgaggcatagatccagagatcacgttagggtacaccaagaaagagacggttcaagggaattaccaggaggcgatgagccaggtaagcaaattgtggcagttaaggggattttcataacctgagcaggagggtccagacgtttctttctgatggtggcactagcgatatcacatctcagggagataccacagagtaggagagttggagaaatgtttacgtgagacgcagaagtagtcaagaaatatcactcgggtctcaaggaaggcgggagatgaagccggtaccacagaaagccgagcttcccggtgaaaacagctctccccagagaagacccagctctggcgggaaagccccggaatcgcaaccggcctttccccaagtacggctgggcgctgggatggggcctgctgtaacggcagggagacggtctctccgcggcccaggagagagagaccagaaggaacggcctcaggtagcctaacggccaccggcggccacagcgcggccaccggacagcaggggggaggggaggtggtcccagggggcggggcagaggaaaaggcgccggccccacagtgctccccgcttccgcccagtccagcccgggccggctgaccgggtccgacacagtctcctggaccaggctccctccatcctcacccctcccccagcttcccgccgccactcaccgaaccggaaccggctgccatgcgaaggggtttccggccgggcgcggaacgcaaaacccgggaaccgccgcgaaccggaaccgccttcacagcaccggaagagtcgctaggtggctgaagaggagggggctggggcaggaggtcaaagaacagagttaaggaccagtggggcgcctgcgcggtgtggcgaggcccgagaagcgaagggagcatttaagactagtcgtaatttctcagtacccttttcagtctgggctttttcgctttctcgtactcggaatactgttagtgagcccttcgtcctatgcttttctctgttccctctgctcccttacccgccgccttctggttccgcccggcgagttttgcttgcttgcgttccagtttccatggcagcttttcgcggtggccctaaatctgcggaaacctgtggcttcccccgacagatagggacctgagatctaaatcgatctcaggctatctcgtgttttattgagaatcacagaacgttagtgcttgtagaggttattggagatactttagtcttaccaggttcagagaagtgaagtgatttcccaaaggttttaagtgcacggcccatctaggactaggaaacaagtttcttaacttgcaatcctgtactctgcaccacctcatacttgattgaccattcagcaagcaaacaaacaaacaaacaagcaacttgaggacggattaggctagactctggcaagatgtagaaccttccagaactctggaggaatttgaaacaggcagagctgtgaggaaagcttttgggagcccactagagatctgcttttctgggtagagatagagaaggacccaggaatcacctgtgacctttgaagggctttgttgttcctgggacacattgattaacctggaatctgccatactttctaagagaacataatgggaagaaatatgtttgttcattcaggctttttgtcaagcacctcagcttggcaggcctctggacccaggccctgtagaagtcttagagaaatgcccccttaataggtcctttacacccagatcacagccacaggcacag

SEQ ID NO: 57949 - DNA, 1826 bp, Homo sapiens
tagcaaaaatctcagcaaaggatgggatgggtacctgtcctcagcttgcatttcctaagatattcacgcagagccagcacctgggcggttaaggtggtagccctaacctcgtttctcctggttccaggatgatcccatgcccactgcagtgtgggttctagggctttcatttcccccttttcttcacacatatgggtagcaagggacctgcaaaaggaagtttctgcagccagtgctgatgaacagaaaaggggccatgttataaaaatgagtagcccaagggcacacggacgagttggctccgtccatcagagaaccctggcccctgccacgggtagggcatgggcgggacgggagcctgctcaggggtaaggttgcttcttcccttcttcttgtcacagtgcccctggaaagggtcagatttcagagaatccgagcaaggcagaactggagcaggggaagtgaggtcagaaaacaggtttcccatgagctggggcatgagcaagtgaagagaaagggagccacggggtaacctgtgcgcgagtgacagcggcgggagcccgcagggcctgacagttgcgatgggcacggggagacagggcgagaggcgggcacagaatgtcagcggggcagacccccgggaaaggcagcaacccggaagacgcgccgatcctcctcccagcccctatgggtgaccgagcccccaccagccgccccgggaagccaggcgtccctccctccagccgcagctccctccggcccggctccactcacccccggtaggcttggcccgcggcccggtgcctccctcccgggcgccgcctgcccctcccctccgccctccgcttgcgtctgggagccggcggccggcggagccagcgacaggcggagacggcggcccggcaggcgcgggcggggcggggcgggcacaggaaatccccgcccgcttccggggctctgcggcggcggaggtgcggggagtgggagggagaggagtgggagggagaggagtgggagggagggagggagggagggacgggagggggcggggctgcggctcaggcgcccccaaacgcgaacccgggacctccgcgcccgccgctgtggggagggtgcggcccgagacgcttggagggcggcgggcgccggaatcgcagcctgctgtggccacttgcccgcactcttgcctgactgaccattttccgctctggctactgggcctcccacggagttctgtcctcagggttcgtcaattacctggaattgcgtaaccgcccgttacaggccagaccgaggccgagagcgatttctccagacaacagtctggaattcctcaaggagcgtaccctctagttttcacgataggataaagggcttgagagagcactgaggaggagtcacttattctgcctgaggggaagtcaggttgctatctgaagttggccttgcggctgctgtcccatttgcgggagccgtagccgcaggtgacacctgagctctcgaaatgtggctggtctgaatagagatgtgttccaagatttagaagatttaatttaaaaagtgatattttgggtatattgggttaaatatattaaaattaatttcacctggttttaactttttaaatgtggctataaatatggcttgcattatatttctattggatagtgctaccttgcagcattaagatggatttgactagaaaagatgagaagggcctacaaacagtgagtaaacccattgctgttagaatctgtttataacctacaagtcacattcacattccttatttcatcattacaacaattttcaaaaattttatttag

SEQ ID NO: 57950 - DNA, 1410 bp, Homo sapiens
atcatatcacataccccctcgctttaagaaaaacgacatatatatctatacatatatacccatctttcttctctggctttggggcagcattgggacatctttttccattcttcgtcgatatataactacactgcttgaagggtgcattcttgtcttcaaggatatgcttaatgcaaaactcctgcccctccagacgagggtgagagcatggacgatgagtgaatgcacaagacagaggttcctgagacctgggcactggagtgatcctcccccgattggttggcaagacgtgaatccgaatcctgttcataaccaaaacctgcggggtcaaacgaaagaccaaaaagcccttacccttcccgaaaattcctgctccacacagatcgcgcggacagtttccaaaggacatgcagaagtcgtccccgtaaggtacgctccgtaagtccccgccgccctccccaagtctccacaggcatctgtggctttgcctccctttagcgtgtccctccatgcccggccccaccccgaaccacaccacgctgaatgtatcttcaggactcgcacagctgcagcacgaagggaagcgacaacaccagccccacgcggcggccacgccgcctccccgcacgccgcctttgtcccggcctgcctcagagcgcacgactgggcctggcctcggaagcctatgcgagcgccattttgtcctacggctccagtcaccggagatcctggctcctggaagcctgcaggaaggagactgactctgacactgctttgaggcggagtagcagctctgagctgacaaaaagagcgaaatagcagcccaaccgcaagagcttagaggaaagagcaccgccatcttacctcaggagctgcgctgcgccgcactctgccgcgccgctcgcccttctctagtggcgccagcggctctcagatcggcctcgcccctttccggactcctggctactcattggctaccgctcgtatgacaggatgtcgccattggccgagaccaactacctatcgtgtctgggagggcggagcgctgagaaaatgcgaggttggggtggctaagacagactgtctgtcagcaactccgcccggaggagagtgagccggggaagggggcggagagcgggctgcggggcgggttgccagctaatatttttccaccttgcagcgtggctcgttttccggctacttttggaccctcagtctgtggtcctaggctgctgttccctcaccactgtacacagctagtataaaatcagacagacaggccgggcgcggtggctcacgcctgtaatcccaacactttgggaggctgaggctggcagatcacctgaggtcgggagctcgagtccagcctgagcaacatggagaaacgccgtctctactaaaaatacaaaa

SEQ ID NO: 57951 - DNA, 2232 bp, Homo sapiens
cgtcggcctcctgactagctgggattacagctgcccgccactacgccggggtaattttttgtatttttagtagagacaggggtttaatcatgttggccaggctggtctcgaactcctgacctcaggtgatccacccgcctcggcctcccaaagtgcagagattacaggcgtgagccaccgcatccagccgttacctcatttttgaaaatgaaatacatatcatcactctaagtaagttaaggacccggtattttgtaaactatttaaaacattagattcgtgggtatcccctacaaacgtaaactaacatctttcctctgaaattctataaaacagtagctactaactgagcatctgaatgcaaagcactgtgctggacacagaatcaaacacaagaggtattatcccattttatagacaagacggccaaaaatttgagaggtcacttaaacagctagtagatgaggaatggattttggaccaaggctgaggcattaattctagtccaccctttataacactttcaggtactgaatttctcgaaatttacacactaggtttgggaggcagccgtcaacagagaaacctctgccagacctagacccctagggcacagcggaaaatgagaatcttaacgtcaccagagcagatcagaacacaatgaagacagagttggaagggctggttaaaacacaaagccgggaaggatacgaattcccagcaaggctggcggcacgggtgagcgagcgggaaatcaactctgcctcgcttccctagcgctaactgagtttcagcccgccccatcgtgggctctcccaactagacatccagcttctgcccaccttcttccccactttcgtcccccccacagagcctgagacccggacgccagagcatggcgggaccaactccaaggccgaaggcctaggccacaaggatacacgttaagacgctgccccatgtcctgaagcagattggccgcctgctggcgataagaaagttctttatctgggtccacgccaaaacgacgggatgggctattttccagctgttctcgagtgaaataccaccgtttgttgttgttcttcctctctccctccatagtgcttcaaccagaaggcagcggcgaaggctgcaggcacttcccagcgtcacctaagaggcgacccacatccgctgtgcgggggcaactgcgacttgacgaacttccgctaagcgtcgaccgccgggttgttacttgcctccgtagaggaagcaaaagtcaaaggacctacttccggaatgcacctcgctacaccccgtagccgagttaacagccaatatgcgaccagaaaaaaccttgaggcgaggacgcaggcgcgtcacgtgaccgttgggcggtggagtggggttagaagttctttcttaaaaaccgtgtatcttcccgcgagaaccggattgagcgttggcgccccgggtcaggctgcgaggccgcaattatagtgggatggggcggccgcccacgcgccgcttggcggttcttacgagaactttgtttgtgacggcagtggtgatgtaaaatggggcagatgggccgggcgcggtggttcacgcctgtaatcccagcactttgggagcccgaagcgggcggatcacgaggtcaggagttcgagaccagcctggccaatatggtgaaacccccgtctctactaaaaatacaaaattagccggcgtggtgtcgcgcgcctgtagtcccagctactcgggaagctgaggcaggagaatcgcttgaacccgggaggcggagatcgcagtgagccgagatcacgccactgcaccccagcctccagcctgggtgagaaagcgagactccgtctcaaaaaaataaaataagtaaaaatgtggcagatgaacttgaaagagaaagtaggtgaggctgtcagaaactgaaaaacagaatcaaatggtggggctctttcgtatatcggagcataaagcaactagaaggctgttacattgttggtagcaatgtaaaatgcgacaacccatttggagaggtcgctttaatgtgtagccaaaggcatgaaaacattctcacgttgttcgccagtgatccaacttaaaggaataaaatgaaattaataacattaattaagagcttacatgtcccaggcacaatactgacttaaatatactgtttcatttattcagcacaactctaagaggtaatttttaagtacgtttgcgaatggg

SEQ ID NO: 57952 - DNA, 2262 bp, Homo sapiens
ccctgatcaggctgagaccagagtttggaaccagccaaggccaaggcccagccctaaggatggctctgcccactgccttgccaagccttcctggccacctcctgtctatcccatccccagggcccatctgcccctgccctccttggcaaaaggaggctccaggggattaaaaacgacttcagaaagttcatggtaagaggcactgcccaggcggggcccagcagtgccagcaccacccaccatactcggacatgggcctcaattcttcaattctgggcctttccagatgtagaggagcctacccagggcctgtatctgtcggtccagtgcccgctgccgccttctcccatccccagtcctcactctccctaaagattacagagggctcccacatcaccctttactatgcaacccccaccaggtccctccagctcacaggggtaatctggtaaggagaggatatgggcaaagaggctcccacgcctgattccacctctagcctttcagtcgagccccagagtctgctttgaataaagtcagctcccctgcccaccctgcggcaggccttgggggatgtggggagccgaccccacccctttcattcccaaggttttgggtgaggggaaggagagggactcccgcagacagagggcatccctccctctgcccaggccggttcctctcccctaaatggaatctcccccaaactcggagacaccccacagccccgcagcaaaaaactcaggccagcccctcccccagtacgtgccagatcctcctggcctccgggccagcctggaactcgccccgtggagggaggcaggcggcgggcgacgggggtggcgagcgccggacctaggagtcctcgatcccactgcctccatgacttccctttgccaaccccaactccctcgggcaacactgccgagacgacccgtccaaggcttcggcgcccccacccacaaactcttgtcgagagccgctcgggtgcgttccaatcctggcgcaccgggagcccgagcggccacttcccctagccctcagcgcgctcacctgccggcccggctccgcgcctgccctgggcccccgccccgccgcccccgcgggctccggccggccggccggccgtcccgcggtcctccgagcccgcgcgtcctggccgtcccgcccgccgtccgccgtccgccgtccgcccggccctcgccccctcccgagctgtccagcgcagccgccctctaccccggatccagaagtcccctccccgctggctcccggactccccgccttaaaggcacaagctccttttgtctgggcatccccctccccctccccagaagtgggggccgagttgcccactccccttcctagcagcggggtaggggcggaggaggccaaataatgggacccctccctccgcgcgccccctcctctcctccggccgcttcctcccccagtcctgggaagacaagcagctactgttctgggatcaagaccccgcggggaggggacctcgcagcccggtccccttcccttcaccccggccgcctcctccggcattcctctcccgccctcaccccgggggtccccgagcgcgcccgcaaacccacccctcacggctacatcccccgccccgcccaccgagggtcgccttccttcctgtcagggtcccaggggttgggccggcgccccgcgcccactcttcatccccaattcctccctgcccctgccccagccccagcccccacctagccattcccgccctgcctgtcacggccctgcgccctcccgcgggaactcagtttaataattaattaagctctcattccacaaggcgccaggtgtgtgcggcctgcttgcccgcacaccacttctttcctcttccccccagtctctggggcagcggccccgaggcgaacctcggggcccagtggagggacccagggaaggggcactctccctgccgcccccacaaccccccgccctactctctgggagcccctcccccgcacctgccaacttgcagcctcacccccaggcatcttttacccaaagggctgtgcttctctgctgggggttggaggggctactggggtgcattgctaagtgcacgaactgagaaactgggtctttagttatttccagcacggagcagctgcccaagttacctgggagatgggaaaatcgtgtgaaagctggttaaccctttgaggattagagtaatggtggaagcagaaaggagaaggagtttcactccaggatgta

SEQ ID NO: 57953 - DNA, 1854 bp, Homo sapiens
ccggaaactcccaggggaagtgggttaaaagaagggccgggaagaagggtgggacgccctccactggaaaggggagagcgttctagttaatgctgaggggaagttggggacctgggtcaatcggagtcagcgtgtgtctgtctccatgaaggggggtccgtctctccccgccccaggcgccgtctttggtctggagaagggtccagcctggggtcgttgggggtgtgaagggaccaatgagcggtctgtccgctcagaagggtccagagagagagccaactggaactacacccccgctcccccttcccccgccagaacttgggcttgtcctgtttgacgcacccgcagaaaggggcgggaggggtactgacccgaggagcggtcccgcgactctgtactccctgctgcccagtcccggccaggacgctgcccggcttagctggggcgcccctcgagaccaggatggaggtagggacgggctagggtcccggaagggcgcgggtgtctcgaaggagccccacggggtgggaataagtagagcgcagcctggggtctcctactgggggtctcgagctgggactgcagttcctggagaaaggagggggagaggggttcgtcctgggcttgggcggtgtctggatccggggtgcgtcccccctgctctggcctgggcagcgccgcctgctggcagggccggaccctgcggccccgggaccggacaccaggcggtgccgccacctggagggcgcgtgtagccgccgggccagcgagcccaaggggcgctgcagcgggtcgagaaggagccgcgtcgcttcgcctcgcccttccccttcgcggagctgagacccgctgcaccagaacccaggagaggggggagacggcagagactccgcgggcgcggggcgatcccagctgggctctctccacagggatgccgatccctctggagacacagagccgagccggggacgggtggatgggcgccttgacgcttgggcgggcgagcagagcaccagcactcttgcttttcggtcctttcccccgccgaggtcggggtcgcagccgccgccggaggatgggcggccggcgcacggagcagggccgggagggagcagaagcttccgccaagagctcaggagctggggcagccctggagctcttcctgcccttctgcccgcggcggcggaaactccagagtccctactctttctcgggaggactttagggaagaagcagagcggcaggggaagccgaggagcgagggtgcgacgtggggatggaaggacagtgggaggcacacggaaaaacagaacgaggaccttagacaggagagacggaagtggagagaggctgggctgaaaggcagggagagccagagactgacagaggcggcgagaaaggaagggagagggagggagggaggagggaggagaaagagggagggaaccaggggagagggaagggagcaggcggcggagcccggcgggcgtggggcgaggccaggcgtgcaggcgggagcagcgtgcagagcagcggccgggttttgctcccgcctcggagcccctggcccgggggagggggagaggccgctagcctggtctatgtctttttctgactccagtgcaaccttcctgctgaacgaggtaaccgtggggggggtgtggggtcgtgggaagggggttccccactgggtgggaggagagctccgctccaagctaggaagggggcacgcgtttgggggagactgcaccgatggggaggcagggaaaccggaggaagtgaggccaggggtggaagaggcaccgggttagagaggagggagcggccagagctggcagcttcctagtactggga

SEQ ID NO: 57954 - DNA, 1837 bp, Homo sapiens
cctgtaatcacagctactcgggaggctgagacaggagaatcgcttgaacccgggaggcggaggttgcagagaaccaagatcgtgccattgcactccagcctaggcgacagagcgagactccgtctcaaaaaaaaaaagaaaagaaaagaaaaaaaagaacaatagggggtatgagacacataccaagaagagtatcaaggctcagatgtagtaatacaggtgttcaaaggcgtttcctttcacttgtaaaaggtgatgtggaaggcttggaagaggaagtgacgcttgagcttttaagtataagtagaattttaagatatgtaattaaggacgcggaaaagaagtcattcccggcaaaagaaataatacggccggcgcagaggcgggaaaacatggactgactgcgagagaaaagccagagttccagtttggctgcaccaaaggctactttaagcatgaaagaataaggtcagactgggggtatcagaggcgctgtgcccataggcagagtcctgggaggaaaatatcgtgcagggacgtggcctgtgcccggaggagccaacactacccctggggcccgcgccccttcactccagcccgcccgagcttcccgggttcatgccccttctctgaggcgttctttcccgcctcatccaggaggcaggggccaccgccgtgccctgactctagccctttctgtaagctcgtgggaaccgcctccaccgcccgggactcaccaccctgagtctgaaccgcccaacgcggcctcaacgtcgcggagccgtcgccatctttcccgtttcctggtcgcggagatgaacaccccccacccccccggccgcgaggcaagctgggaaggcgagttcctggagctgggcggcacaggccgacactgaggcctggaaactaccaatcccagaatgcatgacttgagcgccggccccaggctgcggggtctgccgggcaatgtggtttgccagacgttagcgtccgggaaggaagagtttttcgccaataggctttcggcattaggttctcccgccgagcacccttcttggaatcggctggtcttcctagaaactacggtctatgactgtccttgcccgtggcttacagtggaggaatttaagggcttcctgagatatctgtagtacgtaattatagctaacaaccgcagtaacaataaataccattcgtggaaaagcggtttttataataattctgtgagaatggggctagccccattttacagttggacaaactaaagatcaggttaccggagtaggttcacaaggagggtgatgcagttctccattgtgtgtggaactatcccaggcttaggaggacgttttagcaaccttggcccctgcagccgggtgaatgccataacaacccccagttattgttacagctccaaatgagcccacacaatgggctctaaagtcctcccggaaggatggtatctcctgggctctagcacctgttttctcaacattccagatggaaccctggtttcctcaatttcttgccctttggaatgtgaccaattgttgagctatcttggtatttttgcttctttcttcccccagattcccctacttcagtcttccactgagttttgttgttgctgttgttgttgttgttgatgttgttgttgttgttttaacctcaaatcgtaagttcactttgtgtttctctttggtcttatgggttcataactctttccctcaaaacaaaacaaaacattgcagttgcggaaacggtttagataaccagaagtatctcggacctcccttcccattttgccagcagcaggtttgttgcttcaattccacat

SEQ ID NO: 57955 - DNA, 4544 bp, Homo sapiens
aaaagagatgagctgcagtaagattctgggaagattggaaggtgggagggtacagcagatgaaaaaccaaaaattatacatcatgccatcaagctgcattctagcccaatcttgccagcatagcacagcccaggagaaccagaacgctgcctcccaagccctgaaactgcaacagggaaaagcataccagattggggaatttttgtttggggaggaaaggctcattgtctgtctaaccattccctagccccaatcttttcagacctcagaattagagcatgggaacaacagctgttgaaggagcaggacagcatatttattatatgtagcaggaaacacctagtgatttacggtccctttttaaactcagcctgaatatgcatttttggggaggggtggattttattttctttctcttattcccggcttttactccttaattatgactctgagccagtctattgaaaaaggtctggggtaaagagataatgggaaggggtcagaatcaaggcaaaggatagcctagcactaagggcttggggctgagaggctggaaaaacattgtttctacattctagagagacagggcatattctacctcaccccagtagagggaaaacagtcagagccaacctcccctctgccctgccggccactattcacaactgactatgccctatattaagccatctcccccaacttccaaaacatcgatgatgcattgcttcatccccgagctgcagcggtgtgacgagtggggctgagctgcggcaggaggacagcagtggcccaagatggaatgcaggagacaaaactgagtctgagcaacctttccccaaagcagacttgtctctccgccccaaccacgctgcctccagcagcactgcctcttgcctcttatttggctttgctctggggaagtaaaaggtgtgtgtgtgtgtgtgtgtgtgtgtgtgtgtgcgcgcgcgcgcgtgtgtgtgcatgtgtgtacgcgtgcatgttgggtggtagggaatggaaatggagaagtcctgttttactgcccacccccaggactattcatgggtcccttcacctcaccatcccagccctctaaagggtggaaccagacccagggaagagagtggctcctggggttcacccactctgcacccttggaccatgcaactgagtccaccaactgtcagccctccccacaactaatgagtcttcagatcctcttttttcacttctccccaccaaaggggaaaacaatttctaaaagacagcagctacacagcagaccagtaggggtgggaaaggggtatttggagcagaattcttacctgaggtatcccagagactaagctccaccctctgttcctctgtctccaaacaggctgtgtaattttcgaacacggtgggcacataggtctgtgaaaagagaggaaacattcaccccatgcacccctaccctcagatcccctggttagtgctggctacacacgcactcaccagagagacagtaaagtcacaggagacaagaaaccagaggagatgcctggggcaggagggaagggactgtggaggaccaggcactttgctctgcagcagtgagaaatgtgaatgacacccccccacaccaccacaccaggggtaagccccccatatcctaggcgatcagggacacacacacacacagattcctcccatccccagatttgtgtttcccaatttgagagagccacaggccaaagccaatcctagctcatctcctctcaaacccctcccggccaggtgaacagaggggctgcagaagcctgcctgaaggcacaggcatagagcctttgaggagcaggtgagcggataggcagggattacgtcaagaagaaaccccagactttcaaatgcctccagtgccctcacctgagagcagactccagggacgcaggaaggtggaggggatctgatgggtcctctgggtgaagaggtgaggaggagccagcggggcggcagaagtggaacaggtctcaggggaagctaaggcagggcagtcctccagccaaaaagcagctgaggatggtaaagcctcagaaagcggctgaggatgggctggggctgggggagccacgtctcctgagcaggtggaaatctaccccaaggcgggcaggcagggagaaaagccggccagcgggcgggcgggcagctcacctctggatagcaatccttcgctaacacttgcaacatcgcggtcttcccacactgcacgtccccgaccagaacgagcttacatctggccacgactggctggggggcccgtctctccttcatggttgcagtgtccgcgggacttgaacttcgattcagaagggagggttgcgccaggtgcgtctcagcacgccaatcaagccagattccctgcctccctccaactgaggaggaggccggcacagccgccttttatttttctggctgagccaatcacaagaggaggcggactctgttacgcccaatccctgaggtgggattccctccagcagccaatggatctgaggatctgagtcagcgcccccttcctcccttctctttctcttaaagctgcaccgttgtttccccctgaaaggggattcccaggttgttttgcatttgtattaggaagtggaaagggtactggaagcaaaatgaaatgatctggagtgtctaccaataagtgtcagaaaaacaaactagctatggaagcaggaagtgaggtcaggctggagttgcagggactgtcccgggtgggttacaaaagcaggacctgcttagactatagacaggtgtgtgtgtgtgtgtgtgttttggaggagtaggggatgggggaggtggcccagaacttctctgacattttttttcttttttttccttacatcttttgttttaaatagagacaggggtctcaccatgttatccaggctggtcttgaacttctgggctcaagcaatccgcctgtctcagcctcccaaagtgctgggactacagacatgagccacagcgcctggcctgatgtctgacttttttgttttttctaattcccatccaaaccagttcttacttccctttatttcccctcccaatatcagctcctgctgtacctcttttatttatttatttatttatttatttatttatttatttatttatttatttattttgagatggagtttcgctcttgttgcccaggctggagtgcaatggcacgatctcagctcactgcaacctccatctcccggattcaagcgattctcctgcctcagcctcccgagtagctgggattacaggcatgcaccaccatgcccagctaatgttgtatttttagtagagacggggtttctccatgttggtcaggctggtctcgaactcccgacctcaggcgatccgcccgccttggcctcccaaagtgctgggattataggcgtcagccaccgtgcccggcctgtgccccttttaaagccttctcttcttcaagaatcaccttcaccaccaaagacagagagagagaaagagaaagagaaaactttctagagtcatccataaaaaaaacacacagcacctgacccagtgatgggcagagagaaatgagggactctggcaagtgggggtgggagagaggaagaagacaaagcaaacacagtcactgtttggccagacagcctctcacccatgcctagcagaagctgcttaggggtgtttgttctgcggcctaggctcagcttcctggatgaatcaggcacaggtccagttccatgttaacgcccactgaaactgacgcactaatgtgtgtcacctggttaaagtccagactgggcccaggattttgggattagaagctggaggacaatctaaggttgagatgaactacataaattttttttttttttttttttgagatggagtctcgctctgttacccgggctggagtgcagtggcttgatctcagttcactgcaacctctgcctcccgggttcaagcaattctcctgtctcagcctcccgagtagctgagactacaggcgcacgtcaccatgcctggctaatttttgtattttcagtagagacagggtttcaccatattggtcaggctggtctcaaactcctgaccttaagtgatccacccacatcggcctcccaaagtgctgggattacaggcgtgagccaccgcgcccagccgagcttcataacttcttaacagccctgactgatggggcccctgtattttggggagcctctactagacagaactatgggctgtccacagcttaaataaaccactgattgtccaggaatcaagaccgtacaaataagggctcctggagatttgtgattgaaggaagaccaactttgggcaaaattgagagtagtccctttcccttgtcaagcccagtgtctcctgggccttgtttcatctgagctttactttttttttttttttatacagagtcttgctctttcacccaggctggaatgcagtgccacaatctcggctcactgcaaactgtgcccgccgggttcaatcgattctcctac

SEQ ID NO: 57956 - DNA, 501 bp, Homo sapiens
cacagcacccagcgttagctttcttatgtcttaatgggggtatattcattgcattaactcatgctctttccagcacatctctggaaagctttcctggggattaggaatgctaaacaaacttggaatctcctattggcttccatcctacctgaccctgtgggctgctggcctctgaatacagtttgccggttggaaggctcaaagctgaggtctgagtccagggttcagcacttaactaacctgtgaccttagataagccacaacctctgggagcctcagttttctcacaagcacttaggattttctgtgccagggttctatccacagctggaaagttctgacagccagcctcagtctcccctacctcaacactttctcttccctgaaagagagaaaacagaattgccacagagagccctaaactctgttatcatcaagaatcttggccaggagtggtggcttggccaagattcttaattccaacactttgggaggcagagg

SEQ ID NO: 57957 - DNA, 2928 bp, Homo sapiens
gcactcagcctgggtgacaagagtgaaactcagtctcaaaaaaaaaaaaaaaaaaaagaagagtcggcacattcctcctcttattgctttctaaggatgcccttactctgtaactgagtagctttcaatcaactatctcttctcactgcgccctatggcttgccttgaattccttcctgcacgagatccaagaatcctttcttggggtttggatgaggacccgtttttctggcaacaacttcacagctcgtttgaatcagggtgctactgcagtgggacaagccagaaccgcagggatagacttgccttttctgaaacaaggggaaaatgtcacagtgggaaaggaggagggatttctagaagggaaacaagatgaaaaggataaggaacccagagactcagaattgtgtcacaatctgcatatatcagtccagcctgggtgggaatatactcagtactgaggggacaggagagacagagagatgggaggagggtgggataagtctgggaattctcaacagaaggtaaggatgtgtgctggggggtgggagtctgggaacaggagacagggttgaagaaaggtcaggggaagaagtggccccacccccatgcctgcggagaaccgaaagatcaggaaggtgctagcgtgtgaaatgtgtttattttttccaaaggctaaaaatacagtgaaaaggaaacacacacacaaactaacctaaccagaaatggggaaaagtggtcacggcgacggctgagaaatctgagacaagaatttcaggaactgggataactcagtgacctgagctcggaaattccaccccatgacgagtctctggagagcgactgcttcccatcagcgtctggagcactttccagcagcctgaggtggagcagagagggaataagagaaggagccaggaggaggtgaatgccccctattgagagggcagacctgttaccttcagggaaggtgggtataggatggataaggcgaggaccctctatttagcccactctcagagtaatcataactgtcttaacaacctcttactaagatgccaacagtcttgtgaagtagtatcatccccactttatagatgaagacacagagacacagagaggttaaacaatttgactgaggtctcacagccagcaaatggcagtgctaggaacctttctgagatcacagagccctttcctggggatctaatgaaagctatgtacccagtacctaggaaaaagccttataatgaatttatacatattacattcaatttcagggagttcaaagagccctgaagcccattccacggcaaagaaattggacagtatgccagtgttgaatgatctcccacccttatccctgaccccacagtccagtaaacaaagcgacagtgcatataggggaggggtggcttacagcaattgcacaccatcccttccttgaaacctctactggcctgggacctgggttttgccctagctgatctgagaggcctccccagcctgctctggcatgaggtggtgatcggggtggcagctgggagggggtaggctgggaaagccataacagactttgtggggaagccggaattatgctatactggaggacaacacttcttcctcaccccctcagggtatcctttttcgggttgagatttggaactgcccagcctggaaaatgaaggcctcctcccttaattaaatgcccaggggttgctatggtaaccagagcttccaaatcctggccagacaatagggagaggagctgtctccagcctagacgagtgaagcttcaggggccttgctggggacaggaatggggccagagggtgagaaaaaagggggtgccaaatgagaagatcagcctcctctctccctggagctgtgggaatgggcctgtcagagccaaggggtctgagacaggggcaaccctcctggaaaggggaggcgatgggggcgggtagctggagccaggcactgcccagaaccaaacacctcctttgttcccagaggagaaagccagccaagttggtaaacaaagggaagaggccagagggcagacagctaagtgataaggcctgggaccgcagagagctgagtaatggagccccagagacgaggggaatctccatggtcccactaacaagcaggacacgcggcaggcctgcataccttgccacactgacacacacagtcacagtgatcacacaggacacacaggtgttcctacagaaacactgatctttgaggacacttggatcccctgctcctttgtccccggcctctcctccggagcccattagtctccctcctttggaatgtttatggaaggcagagggcagtcctcactttcatgagcgtgggctcccacaggtgggagagctgcacgcaggttcagggacgtcaggtcatggatcctgttacttcactttgagaggagagaccctcgtttggaaaacatcacaacacagatcattcacttacgtgccaggtactgtgctgaatgcaatacagtctctagcttaatgccccctacaactctgtgaggtaaaaaatgactgtcctcttttactagagagaggaatctgaggggaacttaggtaaatcaggcacgcactcacagccggtaagtggaagagctgggattaaacccaggtttgtctgaatcttcccatttttcctacatttgcttcaaaaacttcttggaaacttttctgagcgagcccactctgttctctcccttccctctcccactcggtgttacctaaatacttctctagaagcagttcccaatttgcaagctggttatttaaagggtttatatataacttggttgtttggaacccaaacacatttttcccagagacaaaatgttaaatgggccgggcgcggtggctcacgcctgtaatcccagcactttgggag

SEQ ID NO: 57958 - DNA, 1728 bp, Homo sapiens
ctggcttccaataggatatgggacaagtggagtactagaagtgaggtttgaacctcaggaggtaactcgtagagccctagggtcttactcatttcaggggggatttccagggcagctttggagccgaagaggctaagaaagggcttaggttgggaagaggtggaatgggaggcacaggtcacatacctggaatcacctgcttttggccaagttctataaccagagggtctctggtcagggaggtgtcaataatacgtccatctaccaagcttccctggggggagagagcatcaagagcatacatctagcaccctctccctcccagcaggcgcgcaacacacacctggaccgctgggcggcggcagcccccttagtgcggcagcctagcgttccccttaccgctgtaaggaacaggaagccccagaaggctggcgcttctcggagatctctccaccctgcacttctccgtgccaggtaggaactggcagaaaagcaaggagggaaaagaggcacggaagagcaacgtctctcccctcgccacgtgctcgacgaccccagagccccgagtttcttctcccgaaccgcttgccacgtgtccaagccaaagctgacgtgtttcagcagggcgccgccccctcccaggccccgccccggccccccagacccctcaccgtgtagtgtatgtgaagcgtgtctccaaaagcagcgggctcggcacatggttctgggggctccacctacgatcggactacaggggtcacggatgctcttccaaagatcccgttctcgcccctagacccggcaccacccccaactcagttcccgcacttcctctcctcccggctcccaggttcgctgagaccccagtattaccacccaacaaggctcggcccacgggggctgagggtcgggactatctcctcaccagggtctccacttggagggtccggacgggactttcggtttcgagcccagcctcagcccggcacaccgccgcactgagcagcagcagcagcagcagatggagcgggaggagtgaggggcgcagggtcatgactgggcgcggggcagggagccggggcaccaggacaggctgttcgggtggcggcagccaggacagcgttcccgcggcgcccaggccagactggacgggacggggcgggtcgcgatgctagagctcctcctcctgcagcccttcctccaccttgtccccacctccgaaagggaggaggccgaggggcgccctctgtaccctccaagatccggagggcgcaggttctgacgcatccgttagacgttctgtcctataacgtgggtcgggccaaacaatagcacccatttacgattacctactgtgtgtcaggagctagtctctaatcctcaaaaccaccctgaaaggtcggcatgattgtttccattttacagataaggcacagggtgctcaggatgtgcccaaggtcatcaggctaggtggtgacagagacaggattcaaacccaggactgcctgagtccaacgtggttgctgtctgttcttccaagtcgtctccttgtggctatcctggcagtgtctggctggcagaccccacccaggcagttctcattcctctccgacctccagctacttcagcttgaatttctggaggttatagatccaagtatccgaaataaggcagggggctgtcctatccctgtcctttgaaaagctagctgaaaagagcaaggagctg

SEQ ID NO: 57959 - DNA, 1722 bp, Homo sapiens
actgacccaagcaatcagactcttgcagcagatctcctcccaataaaactttcatgccatagaccaggggtgacccaatccaacaacagcagagacaggttttaggttacatttctccctcaccgggacggccttactatttcttctcactcctgaccacataccacaatcctccacctccaccaccacattcctcctggcctggaaagatggagacccgccttaatgcaatcaagacgggaattcccccaaaataacagctaccactttgctaatcaagtggcccgttttaacagggaactccacctccccaactcccgccccttccctcaaacgattcgcgtaagcaatggctccattttctgttccgggaatcctggtacttcctaaagaaagaaagcggattggaagacacaaactgagggccagtgacaagatgctccctcctcctgtgagaccgcccccgctccgcctggggaggaaggccccacctctcttctcccaggaagatcagatccccctcctccttctcctgcctcctctccaccctctccccacttgctgccctcttcccaacctgcggttccctagactcgaaagcgcaacctctaccacaatagcgcccatgtggtgccccagcagcctgccctgttggctaacccccaacccccctacgcacccctgccctatgatgggggagggggtgtaaccacagcaaggcttctctcccgtctcctattgctaaggtgggggagggagagggagtagaagaaagcagcattccctagccctttaacagaaaagatacaaacagccatcaccgccccctcatcacctctcctcggacggttttcctctccctcaacagcacacctcctgcaggcgacaacctaactgcagcccaggtcgcccccttgagcgaggcggaggacaaatccgtgtgcgccccccacccccaccccagctctgcgtccttcaaatgcgggggcaggcgtgaagctggcccgacgcaccctctctgagctctcgggtgggaagaatcccaccgccccacgccaagcagtgccgggcggggcccgggaggcgctctatctcctcagccctcaccctgaccgagcctcttctctaccgggacccgccttcccttcccagcctctcacctgttcctgctatcagctgcgccgctgcggccgccgcctctgccccgcaggttccgctccgctccctctggctccccaagccgacttcagcccggctgctgccctggcccactccccggctccctccttccttccctccacctagcaccggaagccgcgacggcgactggagctgtgcggcgtacccccacccccagcccgggatacttcccacctccccgatcgcgcgatagctgcgcggtagctagcggcagttctcgcgagacccatcaccatggcagcggctgcagcaccggcggccgggcgctggagctggagtcagggcgggggcaggtgtgggggctgtgggcggcggaggcgggagccgtgaatggggatgagacagtgaggactgaggtgacaatcccaagctccagggttgtgcctggaatttaaggactgaggcggcaagttggctgcgtaggagacgggctgggctgcggggcccaggggctccttgggcaaagccagcatcgggatatgggtgaacagtcgttgctgtggcatgccttacccagccaga

SEQ ID NO: 57960 - DNA, 364 bp, Homo sapiens
cggtttggcttatgacatctaggatctccccgacactgtcgctcagttccgctgtcttcccatcttcctctggcgaactgtttccaacctcgggcagggtcctctcattccgccaggaggcgcccggggcttctgtgtcgcttccatcagaggagccgctatggacgctgagctcctcagcttcgtccgtgtccgagtcaggggctgtgtggcggcggatacgggacacggcttctcgcagggccccggcgtagggccctggggtccgcgcccagccccggccggcgcgccgctggaccaccgccacttccgacccctcggctctgccctgggctcccgaagctgctgggcctaaggcttggtg

SEQ ID NO: 57961 - DNA, 2481 bp, Homo sapiens
aacttctaccccagagcctaatccagtacataaagtgtaaaggctaaattagaaaatctatataaaaatgctttgtaaaccataatacatttacaagtaagtagaatatgacatgtcattttaaatttaatggaattagactccttatttttgtttaagattatcctgattagtcagaattggctcccttgcctgggagaccaactgcgaatcattttagtactttggtcggttttctttttgaaaacctgaaagaaacaacctctctgtgagcagagaaacggtgtggcaaagaattactctgggcatgtaatccaaagcaaagtgaacctgcagtcctttcgtaactacagtagcagatgataaaaaccaagatggaaagagttactctgcctgaaagaagacacatggttaaaaactgtggagagggaagtgtatgggaggggttacagagcgctagaaaaagactcctgagagtgagggtgggtgcaaacatgtagcaggcaacccgcagcatctgtgggagggtgacagggccctgccacaattggtcaatgcctgctcgccaagaatgagctatgccaaaacccctgcttagagtcgcagagcgggccatgacctaaaattgtccagggacacatcggcctctaacactgcaagatttcctctttcaagcaaacctcaattctcggtcttattaagggaatgtgacttcactggacgcagtataaagatcttcagatgtcctcctgccggggattgcagggatcacagaaagaccatcgaggtccaggagctacctgcaagcggagatccctctggacgccccgtgcctcacccagcaaagccggctcacaaccctgcgctctcaaacctctaaaagggcttgaggtgccaataggaaaggaggcccgagattgccacggcatacgtgggccccaaggagggagccaggagtcactgcctgcttgggctaagggtaccgcgtacggaaaggcggcggggacgcggcccagttccaggagatgcgcccaacgaagaagcggaggaacagggtcacgggatagggcagacacccggctgctttttgtttgctagacaccagcgccagcccctgcccggccctcccggtctcctaagggttgggggggtgtcttaggctccacagcgcccccgaccgccctcctgcactcctcaccgtctccattgcaagaggcgcccggcttggtttcctcgctttaggaaactctcttggggcaggccccgccccacatccggtgcggcgacgccacttccgcccacgtcatggcagtcgccagactggggcggaaggcaaggaacccacccttccggcggtggcgggcctcggtaaccgccctcccccgggtcctcgcggaccgcacggatccggctgacggcgagggtcatgggacggagccgcttgtatttaaaatgttctttttttatttgtcgtttaaaaacaaacttggaagaagcaaaatccaaaacttgccctttgcctctcgcaacataaatatgtacagttcagaatgatcgctgatacaaaacatgccaaggacaggggcgctgagggtggagggagagagggcgctttaaaaaagggaaccatttcatccgttgttacgaaggaccaaccttgctgtacaggatacacacaacacaaaataaagtcttcacgggattcacacttgtcagcgatttattttttaaaaagggggagggtcctggaggtgaggggagaagactgtaaaggggaaaactgaaaactgagtatgtgcgagtgtaaaccaacccaaaatacaaacacgggggcggggggtggggtgggggattctgatgcaattatacaggcagggtacttaaaaaaaaaaccaaccaaaattccaaccttgtagcttgggtctgagttatagtttatataaaaattaaaaactgtataaggtttcttcactaaattctacaggactatcggatacctagcatatgcttacaaagtctgccccatccccttttcccaatcccagggcccaagccccaaacacagcctgactcacgggagccaatctccccctccctgtagcctagaccttctgctctcggaaaaggaacatccaagggctgtggctttgagggcagcagcccagtcttcctactgtctgatttaattacagcggttcctgtgggagtgggggctgttattctcttaaacatttgcagcttgaaacagttgaggaagcagctttaaaaaaaaaaaatctccctacccccaacaatccacaaccccccaaattcaaaacaaaacaaaaacaaacctaaaatcacaacagcgaccaagctccccctccagcaggcccgcccgtccaccaccaccaagcccacccctacactccagacatctgattcttgaaaatattaattacaaaatgccctttgcccacagcccctagaagagaactgcat

SEQ ID NO: 57962 - DNA, 2810 bp, Homo sapiens
ctggagattagatccatcccaagaggaggggaggcaaagcaggctaagacagcactcggcctcactggggtcactttgccaggcaggggcagtttaaagttgaacagcagggccagaactgccccagccccgcctccttcttgccccagctacccccttcatcacaactagtcagtttccacacactctccctttgcccagtgaaagaaggcctggtgaaggatctggggttccttgagttttccagggactgctttgggtgcccaactcggtaggaacaaccttaaagtccaactggcataagtctgacctggcagtgacaccctcccccaccatcccaagttgctctgtcccaaggcccacaaggaaccctgaggggagaagcagcagcctgggattggtgctggcatcagggcccgggtcctagtttagtcgagctcccccaacacaaaaataaacaggcagagaggctatctggccaggttcccaaactcccgtggttccctgaacccccagtctttaaagaggcacaccccaagacaccaggcctcagttctgccctggtgactggctcaggttcccttgacagaccctgccaaaggaacgctccccagctctggcacccccttctccaacctaaaggccagctccggctaagatagtccatctggctgtgcccccagtccaaccctttctgggccctggccgggcggacttcactcacctcttcacagggcgatccagaaatcctcatccgagaacatggccagagcccgggccgctccccgacctccaaccgccagagcgatcacagccgccccccgcacgggggggcttaggggggccaagaacggtaaatccaggtcggagtggccaccctccccccacaaaaaaacagcaagaagccaaagaggggttctctgcctcaggttccagcagtttaggtttccatggacagccccagggcggcgaatcccgagcggacacaaagagagcaccggtggctttgatcttgggcgagcaggctccgcatccgcgtcgccgggcggcctctcagtcctagggcccggccagcgccccggccgcccgcgccgggctcgggcggaacgtcgaggctctccagatggaacgtcgaggcgcctccccagcagcccggaaggaatgccgcgccgccccgcgcctggcccggatggaacgtgagaccctcgcaggagcgccgagcccctctccccgccccggccggcgcccggggccgcgcgagctacggcgacgcggggccggcggggccgcggggctgaacctgacacacacccagcgccgggcttctcgaccccgagcgctcaccctcggcggcttcgagccccccaccttctgctccccccggggaagggaggaggctaggtaggcgaggaaaaggaaggggcgggcggtgcgagccctctgcccgctcccctccggccgctccaggccctgcgctcgcctcccttcccctctggcctcgggagctgccccgcccccggcctggccggctctggtcggtggcaccccctcgacccccggctgactgtgatcgcaggcggcctagaggtgcatggcccaaccccggctcccggcaccggggggtcaggaaactgagcggaaagtggggaacgaggcagccatttgcaaccggagaggaaagtagtgcagcgcggcgccgctccgcctccccccctccgcctcctgttcggccggtagggtggttcctgcgaaggggctatttcctggcccaagagctgggcagcggtcgtgaagattcgtgaagccttcggcgctagatccgggggggccttttgcccggggcaccccactcgagagggggagaaaggagaagaggcggccctattttgtgttggagcggagcggcggagggatcccgccctctcggaggaaaggctgtgactctgcagttctacgcacacgctgcgggatccttccgctccgggttaaccccgaccgcgccgggccggcagcagggcagacacgtgggaacgaagcccccctcctctccgccgcggccctggagccgcctcatttaccgcccaggccgcgaaactaggactctggccgctgtctaattccatacccttgcagtcgttggtccctgaagttccaactgccccttgctttggccaggggcagtctttcccgggagggggatggaagaagagccaggagattggccgctgctcagcatcctgggaactggagtccgcaaatggagaaagtgaggtacggcgcctggcgctgcagagggtggactcttgccacgtttggggacccgaagaaaactggacgagtccctagtcgttcctcctgactcccagtcccccgtgtgaggaaggactgtcggtgcccacacagtcactatacacacctccccatcgaaacataaaggtagagcctcccttttcagggtgcccccactcccacctccagtccttccagatattcagtacccgtgtcccttttttagtaaactgaggtagcctcgctgctacctggccggagtactgtcctggacaagatcgcaaaacatactctttgcaggcaccacccccccaccataagtctggatgagaaaacattggaatgcctcttctgcatcaacgcacacatggggtggacaaaaggagacaaattaactatgtccagatactttatatattcttagttattcctcgccttcattatgagttacatggaattatctccatattacagatgaagattaaggctacaataggtaaaattgcccacagaactacatc

SEQ ID NO: 57963 - DNA, 1619 bp, Homo sapiens
gctgagaaagatatgacaccctaagctccactgggtacccctaccccagaattgagtagtccacttctgtgcgcaaggttcagttgtcgctctaagtggcagggagggcgtaaggaacagcagccaggtaccctctgaagccctgggaggaccactcactggggaaaccccggaatggctgagaggctgggaacccagccttgcagggtttcaaacaaacaccaatgagaaagaaaaaagacgggggaatacttggttgttcctcatctctacatattaggatccaccccagcaagactcctttcttccaaagcagatgacccaccaagtccccaggttcctcccgtctgccatccctacacctcccctcttttctggaatcaagctcagtgtgacgacgtctccccttcatccaacgtcagctgagtttgccctcaacccagtttgagaagcaaacccatccttccccgattatcagactaaggcagactccgcaggctctcagaccccggagacccccaacaggaagacgcgctgggtgaggggtgggagggaggggcaggggaggggcgtgtgggggaggaacggaaacgacggcctttgtttatcgctcagggacccagctgatcccatctaggggatcgctagccgggcacccgcccttctgcccggacggaggcctccgtcgcccgccgctggcccaggcatggtttgacggcactctgagaccaggtgggctcggaccccaacctccccgtctcccgcaacccccgcttctcctcgccggggccccgcactcacaatacactcgcggatcctctcgtggaatagctgttctcgcacggatagcacttcgtagtcaggtgcttccatactctgctcagcatgactgaagccgaggtgcctctgggcccggggaggacgagcggggaggaagccgccgccgccaagcacccagacccagcctaggggcctttcctcgcagcctgcgacagaaactcggggcagtctggggctcagatacagtcgtccggacgccccgcccttaaaggggcaggcaccacccgcctcgttttaaagggctctgtcctccctttgctccccactctttaaggtcgggtcgcgctcacgtttcaatgcaaacacccgccactaggctcgctacgaggaagcgccgctgagggtccatctttttaagagatctagtgacgacacaagggatgggcgggttccttccagggggaggaactcattggctcctggagagctgtcgttcatcgctggaggagcgctgataggctcgccctgtggaggaaggcgggatcttttgggcctaccgctgcccatactaatagagcaactgtctctcttatctgggaaaagtgaaggttcctggattttagtagcagccaacattttagtatgaccttggttaaatgaaccgtttgaagcaggccagccaggcaggatgtgagggcaccctaggggttctgaaatgtaccgctgcccagtaaccgatgttctgtagtagcattttctgtgtgtttgtgttggggtgcccctccccacatccccaccccgctttcccgctgccaggagttttcattcaatcatttttg

SEQ ID NO: 57964 - DNA, 2311 bp, Homo sapiens
aggcagtagagctcccagcaggcattgccaatctggacaccagcctggccaacgtggatggagatgcactcacgctgcgggaaggaaaaaagatatcacaatttaaaccaatctattgatgactgtcaagtggaacaaaatactcatgcaatctttatttttttagagataaggtctgtcgcccaggcttgagtgcagtgatgccatctaggctcactgcagcctaggctccagtcatccccccacctcagcctctggagcagctgggaccacaggcacagaccaccaagctggctaattttttcattttttttgtggagatgaggtctggctgtgttacctaggctactcacgtaatctgaaaacgaatttccttttctaaagcgatcttttctaaagatccttttctaagatgtactacttttgagaacagctacactatagtctacgttgcttttaatgaatgttaccttcccatcctaaaccgggaaggcctccttccagaccaagacagctcagtcacagcttcctcctttggaggaccaagacaggaaggtgggcatccatccagcgctcaggccccagaagcccactttagactaggtggtcacatttccgggcagctcctagcacaggaagcacgtggccagaccagcgcagaagaaatgtctgtccgcagggacaaggggcggggctctgcggcacaggatgaatgagcaattccgggcgcgcgctcttgcgccccccggcggtgctgcagaggcacgaaatggccacgtctgcaaaggcgctgcccaagccgcccatcctcccttgcctgccggcatcgggctcagcctaacacctccacagcagtctgagcgcagtaggagattatcggcggcccagatctgggtcaagatccgatttccgttccctcaaaatcccttactgccaccacctgctcccctgaattcctaacgcagcagggagagacaggtggcctctacagactgttgtgtacgaactgtcgtaatacactggtgtagagcggtacattgacagggagctcttccgcagtcctcttattgctttcatcaaaaaaagaacactcaggttaacaggagacacgccctgtagccctagtcgcgtcgcgacccagagcgcatgcgcaaagcgcagtggcggtttcccgcccaggagcggcgggaaggtaacggtcgcgcgtgcgcgcttttgtctccagctgcttcccacccccgcttttcgcgctcaagaggaagtgagggctggaagagtccgcgcgcgcgtccacccaaggcggagtaagggcatgcgctggaaaggactgcggggactcgagggaccgcacccaggacacagttacgcgacaaaagagagctccggatacggcggagggcagcccgagccccccatcccttccagagtccgagaagaaatcctggcgcccctcgacctttccgggcccccgctatttacacacaccgaggtctcaccactcccgccctggcctctcgcctcgttttccgccctccaaacggacggctctgaggccagcccttcccggctgtatacagggccccagcgccccgccggctcgcttttccctgcttccctgaaagcagccgggagccgcacggcttactcaccatagtggctagggattaggaggcgaaggcgacaggagcagacaccgggtcccggttaccgtccccgacaagctaagagtcgaggtaagtaacgcactagggcggggccggcgctggagcctcttaagtagcggctgcggaggggcgggcgggcacaggcggtgccgcggtcgctggcccctcctccggccccgcgcgcccactccgcgcccggcctggccgccgcagaggcgggctccgagccccgagccccctcccctcgcgcggccgcggggtggggtctgccgcgcctgcgggcaacgcgcgccagtactgcagtgtgcggcgcatggctgcgagggcctgccgaggggcgggcgcgagtcggaaagacaccgaccagggaatgggcgacgaggcttgccttaattcggaggaaacccaggacttgagagagccatacaatttgaaagacgaagcaccgtgaaatgcagaaagttgtggttcggatagctcagctgattaatttcatgttgccacagtttgtcagtgagttttgcctttttattttctcagttcctttaaaggcagtgcattcggtacttacctgataatgtgaaaaacgcgagctttagaaaaccgaataggtgtacatggtttactgtaatgacttgttctccaaa

SEQ ID NO: 57965 - DNA, 2274 bp, Homo sapiens
ttagccaggtgtggtggcacgcgcctgtagtctcggctactcaggaggctgaggcaggagaatcgcttgaacccgggaggcagaggttgcagtgagctgagatcgcgccactgcactccagcctgggtgacagaacgagactccgtctcaaaaaaaaaaaaaaagccaactactctgcatagttagcaatcaaaaaatgtaagctattcattatcctaatgaactgaaaaaactgcttttgcgcctatcgggaggagactgttagaagccaaaggctcatttaaagaggacgtaaggaaaagcaaccaaaaaggtgggaatagagtttaaggcgcgttcgtggtgattcagacctagagtggggagcaagccctctctctggacagccctcagcggcgaggggagcgggcgcccgcgggcccagccggggtgcccggcagccaggactccgaggcggaacccgcagcctggtcccggcgtcggcgcctccccggcggcgtagggagcgcagccgcggggaccgggggcgaggccggggcggtgcagtaagggcttccctcctgggcgcggtcgccctcttacctggagcttcccctcgctggggttttgcccacctgacgcccccgcacccaccggggacggggcagacgtccggcctgctccctcctcccagtggacacctctgtccctgtcccggcccattctccagccccagagcccttcctgcccttcctccccttcctccccttcctccccttcctccccttcctccccttcctccccttcctccccttcctcctcttcctgctcctggctccttccgacgagtttggtttgaacttttgaatccgccaatcagcgccgcgcgcccccactccgcgggtgcggccgggcgcaggccagggctcgaaggtggggccgcagcggcacggggcggggtctggggcccgccctcccgacacgtggccggggaccgggtatataaggcccttcggggccggccaccctttcactacttctcccccggactccttggtagtctgttagtgggagatccttgttgccgtcccttcgcctccttcaccgccgcagaccccttcaagttctagtcatggtgagtggggttccctcggggctggggaagagtgcgcgtcccaggggacggcgggcccggaaactactgcctgcacctcgggccgcgcccaggacagctccagactaccccgggcccctccggttaacctggcttgtggcggccgggctggaaggtcgagttcacttggcagacaccagttcgggccggaaaacctggcccgggtgcggccatcagtggaaatggaaagccctcttgatcctagtgagggctttccccgcagggcccgctactgccctagggaggaaggtcagggagcctgctcattggcctccaagaacttaaactaaaaatccctccccacgttttctcaagcgacctctccttcctactgccttacaaactgggccccggaggccctcgtgcgctcccgcaccgacggtgcagcacttcctggctccccctctccagcgcccagtgactcgctgctgagtcacctgtggccctgccctggggagagcttccaactgcgccagtccacttgagaatggaggcaggcacctccttggaagggaataattaactttcacgttgcctaatcctgcatttctggtgttaatctagtggtaggtttatagctgaagctttctacttaagccgggtttaaaaacacgtccacaaaaggatattttcttataaaaccagagttggcccggcgcagtggctcacgcctgtaatcccagcacttgttcgagacaaacctggcgaacatggtgaaaccccgtctctactttaaaaaaaaaaaaaaacaaaaaaaaacgctgggcgtggtggcgcgcgccggtaatcccagctactcgggaggctgaggcaggaaaatcgcttgaacccaggaggcgtaggtttccctgagccgagatcgcgctactgcactccagtctggacgacagagcgaaactgtctcaaaaaaacgcaaacccggcccggcgcggtggctcacgcctgtaatcccagcactttgggaggctgaggctggtggatcacgagatcaggaaatcgagaccatcctggctaacacggtgaaaccccgtctctactaaaaaaaaaaaaaaaaaaattagctgggcgtggtggcaggcgcttgtagtctcagctactcgggaggctgaggcaggagaatg

SEQ ID NO: 57966 - DNA, 2476 bp, Homo sapiens
ctagaccaattgactccacctgtgcctcactttctcccacgtggccaggggagagtggagggtaagtcagtggccgctgactgcctgctaagcttcaagaaggcagtttagactgagcaatgaaagaaaaattgcgggcgcaaaatagaaacggcatttaaacagaagaagcatttgttagaatgagtggatcttctcagatactttatctccttgggcctgggggccatcatgatcaggtatctggttatctccagctttttggggcttgggcgtttccaaagtccagttaaaggtaaacatgatgccgggcgtggtggctcccgcctataatcccagcactttgggaggccgaggtgagtagatcacccgaggtcaggagttcaagaccagcctggccaacatggtgaaaccccatctctactaaaaatacgaaaataaggcaggcatggtggtgggcacctgtaatcccagctacttgggaggctgaggcaggaaaatcgcttgaacctggaaggcggagtttccactgcactccagcctgggcgacagagcgagactttttctcaaaaaggtaaacatgatgcaatggtaaatagtcatgggctaattagaacaaactactcctgttctcccacacccctggagctgggtgagtagacccaggtgatactgagcttgctgatgtggttaagagaccttgattgtttcatggggagtgtaggtgggaaggaggtcaaaggttgtgagtaattagggtttttattatctcttggcttatgagaccaggtcctttgagaacttagtgctctgccagtctccaaagtggctaatctgacttatgatgaaatgccaaacaccctttttgttttcctgttaagtctgtgtgtacagattctatgtttattcccttattttacttagcaggtgtgggtttggtaatttctaaccatattctgctttggcccctctggcctttctaaattaacttggtccacctcataaatatatatctatgagagagagacacacacacacagacacagacacagagtcttgcctctgttgcccaggctggagtgcagtggcgagatctctgcaaccgccacctcctgggtttgggttcaagtgattctcatgcctcagtcttccgagtagctgggactacaggcgcgcaccaccatgcctggctaattcttgtatttttagtagagatggggtttcagcatattggccaggctgttcttgaactcctgacctcagatgatccacccacctcggtctcccaaagtcctgggattacaggcatgagccactgtgctctaccataattttttttttttttgtatttttaatagagacagtttcaccatgttggccaggctgatttcaaactcctgacctcaagtgatctgctcaccttggcctcccaaagtgctgggattacaggtgtgagccagaaacaactaatttcttaacctatcagtaaagtcttggtaacatttctagcctttattattatggtcttccctcttccggagatgttttgacggtgaaggaaaaacgttcttcctatagattagattcttccacttggttaaaaagctgcctctgaccacagtttttaaaatacagctaactgctgcttatccagcattttcttcatgagtcatggctatagtttgctggtttaagctggttttaaaggagggagagagaagcttttgtctcctaaagaataggattaaagcgggaccagaatgagctcagtagttacacaatcattcagagaatgaatcagagctggaaaggggaattttgccttagtttaaggaatcatatctactgtggctacaaagcaactgtctggtcttgccgagtagttcatgaacacatctttggttttccaaggcacttttgctgaattaggtcttcaaagatttttgcttttgaaattatagtccctgagcaggagtggcctgctgaaagatggttatctttttttgtttgagatggaatatcttgtcactcaggctggagggcagtggtgtgatctcagctcactgcaacctccacctcctgagttcaagtgattctcctccctcagcctcccaagtagctgggactacaggtgtgcgccatcatgcctggctaattttttttgtatttttagtagagatgcagttttgccatgttggccaagcagatctcaaactcctgacctcaggtgatccacctgcctcagcctcccaaagtactgggattacaggtgtgagtcactgcgcccagccagttatctgtcttgaaggttaatcagtcattaggtgtgaatcattcctaaatgtcccatctgatgtattataccctgacattttcctttcttcctcccacagcgtgagtgcatctccatccacgttggccaggctggtgtccagattggcaatgcctgctgggagctctactgcctggaacacgg

SEQ ID NO: 57967 - DNA, 695 bp, Homo sapiens
agcggctgggactacaagcgcgcaccactgcacagggattattattattattttattattttgtagagaaacgggtgggagtggtctcgctatgttgcccaggctggtctcaaactcagctcaagagatcctcccgcctcggcgtcccaaagtgttgggattacaggcgcctgccaccgcgcccggacgcagatattttctatgggcatctggaatggcgtccccaaagcttggcgccgtgctatggtcaagccgggtcgggggctcgggccagccttcaacaccgttggcagcaatcggaacgatcaactgtaccctcagtaccgcgacctcgcccggtcctgccaatggccggcccctagccggtcctgaggcctcgcgagagctcccgtggctacgccttccccggcctcggaacggccccatccttcctctttccccgcctcccagcggcgctccactctcggattggctgattgatccgagtcagtttttttcctcgccagaaagcggttcgacaattggtccttcttttggcccctcctgcgatgcccgcggattggacggctgagtctggctacgcgggcctccgcgggagcgcgaccgggccaatcaagagcttggcgtattttacaaactgagaaagtagctccagcagcacccgagagggtcaggagaaaagcggaggaagctgg

SEQ ID NO: 57968 - DNA, 4268 bp, Homo sapiens
tcttccaaatttgtcttcctacattttggggggctctctctttgttcctcttggggctcttctctctaagaatacaccagcccagcagaataccccacggacactggagtaggagaaggaggagggctttcttcctgcccccatccagaggtgattgctaacccaaggatggtcacaccgtgtcagggctcgggcacgcgcgggtcacttcacattctgagcacagacgcctggtcgatgccctgctgtccctccctcctcccaacctccctccgcctggcccccgccccctccgcccgcctggaaaaggcaaatttgacatttttaaatcccgagccttagagggatcgatgcggcccgggggccccgcccggggtcgatattcctgattgggaagcggccgcttcgcggagcccgcgtgtaaatcacctgggctgggggagggggcgtggggagcctaccacgtcccaggctcgcgaagccaggaggggtcgggacccgggcggtaccggagggcgacggaatgagaacgacaggccttagagaaccagagagaagcccgcccagggcctccccctcccccgctcagccctgccaactcccccagcaggctccagtctcgcttcagcggccgccacccttcgttgcccctggagccgccggggaggccagtgtcggagccagccatgcggcggctcctctctggccgctcccgcggggccggggcttcggcggctgctgtcacggagccgacaggccgggccggccgggaaggggcgggtggcgggggggagaggcggcggggtgaggctggctcagcgctggcactcagtgggcgcgcaacgtatgtttgccgaattgaaaggctgggacaccgagcggcgcagggcagagggtcggagggcacaggcggggtaggagatggcccagaccgggtgagggcagaagcctcactcacgggggaagaaggcactcgaggtcgctctgaggaccgctgggctgggatagaccacccatcccccgccggggagacccgggtagtaaagaacaagacagaatgggacaggcaggacggtttggaccccacctacaagcgcctccaccaccccagcctccgatccttgtcacgctctgctggggaaaccgaggcagccgatgctgagaatagccaaaaagttaaaagcggggtcagcgacgaagctggggcagcaaccagaattcctgcgtgggttttttggattcctccgcccacgcggggccagtttgcgggtaaatgcaccaccgcgccccgcaccacagctcagaccctttcctctcgctgcagtttgtcagatccccccacctcccactctgcaccagtttatagaacaacaatttggggaaaacaatccgggcggagtgacggccccgtaattgtgacaaagtgagtgcgggcggctggagagagcgctaggccgggagcgctgcagggcgaggcggaggcaggggcgcctccccccgccctgccgccccctcgttcttattccggtcacctcccatccctctccttgactcttcaattcctcttctcccggccccttgcgccttccttcgcttgttcctccatcgctcttccctttcctcccggtaacagctcttctcccgctcccccgaccccgtcgcccctcccccggtgcgctttttcctcgctcacttctcccctctcctctgccctccactcgtttcttcagcttttcctcgcgcttacattgcccttgggcccctggctctccccgcacaatccgcttctctccctccccactcctcccttcctgagatcgaaccctgagccccttcccgacccccactctctgggccgccagcgcagccccgcatttctgggttcctcgggaagtaaacctgggggcgcgctgcggccccgggtgccccggcggccagccccttccctctcccttgtatggctgccgcccccgccccaccacctgagccgggagatagtttgtttgtccagcggcggccgccgccgcccacgctgtttgcaaagcttagcgcgccgtcgcgcagtgcgggcccaattaagtctcattcattattcagcgctcctgtccgcccccgccccccagcagtctgaggcgtcgctttggggcccctcccagcctaggcccctcagtgagccctaagaggtcatatagagagcagcatttcctctccaggccgagatgagggctgagggcgtttggagggaagcgctctgcctactgccgggaggtgacacccgcgaggccgaccgtcccccgaagcccccgcaagtccagactgggggacctcggagatccacgagattgccagagaaggaaattgaggcccaagaagctgcatgacttagccaagttcacggagtagaacccgggattggagcccgggacattgaaatgaaggcgtcttgcattgcagctccgttgcagcgcagaggcgcaggaaggcagactaccacgagcctcgggctgcggcctcgccctcctggtcgagcctcctgccctccaaccctctgctcccgtttctccctctggttcatagcccgcgggacagagcagccctggattgggaggctcctcaggtctcaggctcaggtgcagaagcagagcccctaactggaaggctcggaggtgggccggtgaggcaagcaagccctgtggggggttgaggacagcttgggttggatgtccctcactgcagcctgtccgtggatgtctctgccttaagggaattggaggtggaaccatccagtcttgaaggtcaacggagcgtgaagagaggagcgtgcagcttgaggtgagggaggagtcacctttcaatttgtgggggtgggaggaggtaatcaaggacgtattcttgcatttacaggagtttatccttttttttagcactacagataggagcgtcccttgctcctgccaggcagcccctccataggggcagtcctgtgctgctgtgcctcggtacccgcacaaggtgtctggggaccgcccggacccccccttccatcggcggcagcgccacctggcggccatggtgcggtggtgtgggaggagctgggcccgggctgggcactgagcccaccggagctgcaggcgtctgcagagccttgcaccgagtttccccgcgagggcgggcgggaggagtcccaggcgggaatgtgatccccagggggccggggagggccctggggaggagcctggcctggggaagccggacttccgtgacacaacagacacaaaagacaaagtccatttggatggaagtgggagcagggcgagacgggccattttcactctgtggtcaaaggaaatgactggtctgactcggtctgggagcggggcacccaggtatggccacttgatttggaagtagcgggtgctggctggtggtcgctccagatagaggggacactggcaggcacgcttggcgtccagtttgatattgtgaggatttgtccagctgctgtggagtggctttccaagccggcctccgaaagaggtggttgaattgtggggtgccaaggtctaggtcaaacgaagttttccagaatattttaataaagggaattcaggacccctttcaagtttgacctgtgggaaaatctcatggcctggagagttaggaaggcaggagagtggctaaagcctgggccaggtgtgggagggcagccacagttggagttaagtcaggggtaaggcagaggctttcaaaatgtgtgggaactttggaaaagcatccaatgcagccctgcccctccacacatccccccatgagtcatttggggtcatgggtctcaggggaagtctgaaatttaaacagctttctcctctaaatctggagtcactgtggttgtaaagaatgggactgaggtgctaggacaagggatatgagataaatagcactggggactcaggcagatctgtactcaacttttattggaaagagaaatggttgctgtgttggagcctggacatcatcttatgactctactttttcccatctcttagggtctaaggataactctggggccatgacagccatgagtctcacagaggaccccgagacttctgtgctgcgagtaaccggacttgttctgagacctttgccctagaggatggccaaggggctcctggtgacctatgccctctgggctgtggggggccctgctgggctccaccacctgtacctgggaagggacagccacgccctgctctggatgctgaccctgg

SEQ ID NO: 57969 - DNA, 1985 bp, Homo sapiens
ctcagcctcccgagtagctgagattacaggcgtgtgccaccacatccggctaatttttgtattttttgtagagacggggtttcactatgttagccaggctggtctcgaactcctgacctcaagtcatccgcccgcctcggcctctcagaagtgctgggattacagacgtgagccaccgcgcccggccccagattctaataaatattttcaatgctgactgtctaaatccctctggcccctcttaatagacccctgaccagtcgacactgaggtaagtgctttatgcatgcagaaagggtgcacaaatactagttagttccagcaccagggaggttgggagtctggcgtcgaagagagtatttaacagaaaagattcgaagggcggcgggaccgaccaccgccgcgtagaggggctatgctgacagctgggtagatcagaaacccgactgacgatcccgaggtcattcttcccgcgcccccaccggcctctgcgctctctcaggaggcagagcgaccgcgcggtccggaggccccagcgtttcccgtcgttggcgactctgaaattgccttttggaacaaaacttgggtcgggaaggaggcgaaggggaaagcggtgtgaagtcctcggtacggaagagtgagcggcgctgtacccggcggccagagaaaaagcttcccaacccggacattgagcaaaagccccgcgctcgactcccctagcggcgcccgcgttcggccacctccgggggagtttcggctctttccgtcagttcagctcgggccctccgttcccggcgcgcgccgggtccctaaccgatgccgccgggtacgagctgtgctgcacgcggacgcgagctcgcgtcccacccgttttccccttccatctactttgtccccaaccctctccccgagtctcttcctttccccggtaattcccagtctccggtggcgcgcgagcctgcggacggtgcgagacgcgagggaccgggccccgagaagagcggtaacccgactggtcggagcccgcctctcgccgccccgcgcctctccccgatcttctcggtctccggtgcgcgggccgtctcgccgctcgagccgcgctcgcgcacccgttggctgccacagcctcgagcttggcgcgccggattcgcgccggcgcgagtacgcgccctgagctctggctggctggctggcgcgcacgcgcccgagagggctccggggcggggcgagccgctgcctgggcgagggtcggggtgatctgctggatctccggcagcatcctgcagtccggcccaggagagaagtggggaggcggcggtgggggcggggcggcgtccggctctgagagagctgggggaggagcgcggcggcgacggcggcggtggctctagaaggggaggtggaggatctcctttcctcttctcagacccgggagcgtccgggacgcggagcccggagctggggcgacgaggcgattgcgggggcctgggctaggtgaggctaagggtgctgggtggcggggttggcgggggctcagagggcgccgaggtgcggggagcgggttgagggaggaaaaagagggagggggtagttgggggcggggggacgggaaggagggggatgtgagcccttagaggcccgaagtgcccagagggtggaaggttcctggggtctgtggggcgggtgaaacacccgcgtcggagttggggagtttccagacggataggccggggaaacaatggagtgtgggggggactctggcgtgagcgtgtgtggggtattggattttaagaaacaacgagcgagatagaacgaaagaataggatcatttgggatgagaagtacaatgaattaggaatgcagtagggatgcgtaaggtcacctccgtggctgtgcgaggtccttagcattcgggggcaataatgagatttgaaaataagggagagaagggcgttcttggaattgaagggggagacgaaatggaa

SEQ ID NO: 57970 - DNA, 1165 bp, Homo sapiens
tgaatctacttgaggtgttggtttaagtttaaaaaggcagtatcagctagtgagtagacaaattaagatgttagattattgctttatctttttggtgacctcatgtcatagaatataaatgcaaaattgtcatttgtgccctcctgacctatgtagaccatctcagtgcctcccatgccctctggcttacttaagtttggccactgggcagcattggcaggagattccgaggaagggaggagagtaaggtaggggacttttattcctctaatctttctctgaggggtagctgtgggctgagtgtgtcctttggccaaaggtcacagcaactgtctgatggcgctttctataccagatgaaacaaaaataaaagggccctttctgtctttggctcctgtaactgcttcctcctcacactcaagtctcaagtagcagtgcacattgcttaaaagccagcaaaaacagtaacaagaggtacagccctatcttgggtggtttccctactctttgctaacacctttgaaaatactcctattattaaactctattaagattgcccaatttgagtatgccattcgcttcctctttgggatcttgactgaaatagctgctttatatatttttaatcattatcctaacagtattccagataaaccctaattatactaatttattttggccaataattgagtgtttgcagaactaccctttgttttttgtttgttttttgagacaggatctctctctgtcacccagctggaatgcagtggtgcattcacgactcattgcagcctcaacctgccagactccagctgtcttcccgcctcaccctcccaattagctggggctacaggcaagtgccaccatgcccagctaatttttctcctttttatagaggcagggtttcaccatattgcccaggctgctcttgaacttctgggctcaagcgatccacctgccttggcctcccaaaatgttcggattataggcgtgaaccaccacacccagcctttcctttgtttttcttgcagtttgtgtcatctagtatgttgttaaaggaaaaaaaaaaaaaaaacagagctagataagaggctagtaatagaacccaaaatgctgttttgtgttccctcttttccctaaaagagattggtggtttgattcacta

SEQ ID NO: 57971 - DNA, 633 bp, Homo sapiens
agttagagaattgagggttcaagataccaggtttcttgaaagcttactaaaatagattctggaggaatgaagtctaactttggtgatttgtggggttttgtacagaaaaaacagatacctattttttgatcatttctgttaagtgttaggttaaacatacacagctacacgaagacaagggaataccaactgcaacttgtacaatggcattgatttgaggcatttcggtggcaggttttatcttcctgcattgaacgccagattaattattaggaaagttgtttattttaacccacccccaaactggtaagaatagaaatgctgggctaggtcgagatcatgactcacagttaaatcacttgtgtgtgtggtcacgggccagaggatgcagctttgaagcactgaaatgacttcagctttggtccattttaacttgaaaatttgagaatgtagcagagatgccttccactgtttttcagaggtgagatttcattacattgagcaatatattttgagtttctaaatttgacatttcagtccattattttatctgtatattctctttttgaaaatggaaatgcagataaactaaaaccactaagaagacatatttcttagttttgagaagaaggt

SEQ ID NO: 57972 - DNA, 1937 bp, Homo sapiens
aggttaagcgccttgactataaactagcaagagacaagggattctttggcccacatttttctttacttcagctgtccactcagctcagcagcaccagccttcccctcccaggccaaagcaggaaaaaagaaagggagacaaaactccaaccagtccatctcgttttttttttgtttttcttttccatttggggtttttactgaagatttagtaagtggtatttccatgagataccatctcgtggaaaccaaaaaccactgtttgggaactgcgtgattatcaaccacgctgtgccccaacaacccctagagaacccaggtactggactttctcggggcgctcctctcgtgagtccccacttctaaccagggtggctcttagctcagtgttctagccctgtccccaggtgagcctgtcgctctccgctccataggctacgactaagaatcttgacatctgaggagagggcgaaggggcccgagcttgccggcaaactgaggtagggtctgtgccccttccttaccggaccctccgcccctcgttctcccaagagtgcacacccaaggtaggggatcggtccaggtctgtctcaagaactcggggtaggagcattgatgaagtcacctctgcaactcaaagcagagcaccaagtagccttggtttgagacccacaggctggtggctggggaggtgggggtaaactcgcaagcccattctcaccccacggtctccatgcctttgcgcatgcgtaacacttcgagccagattctaacccggtccggcccacgcatgcgcagcttttcggggcgccactggggcggggccccaaacttggggggtggtcgtccccggcggcactctgcaaaactccatttcatccccaactcctctgagaaccctcagaggcgaaccgcgaggtctcaccattcctagactgccagatccaacaatttctccgcggcgacggtagcagccgcagggccaaagccggcttccgtgaggtacgtctacttccggttaacgaaccagggggctggcaatctcttccggttcgtcttggcaacgtgtgtgaagggggcgtggccatggtacggaaagtgtaaatattttaccaatagcggaaagtaaaggctttcctagttgggacagcatatagggaaacgttaaggattataggcaccggagaggtaacccggcttgaggggttggttaaagggaaaggcgagacttagggcgagaccgagcggggctaattgaggcgacccggggaggggcgggaccgcggactggatttcgacttccaaattcccacgaggtataggagtctgagggttgcacaggaccttatgcattgtttgactcctccagagcctttagagaaacttctatcaggcccgcctgctaggcactagtcggggagataatgtagccagggagatgtggcggacagaaagggcagagaggctctctgaggagcggatggaggatcgtgggccgctttactgagaaggaagagaccctgcgagaaggagtagtgtcgacttggtcccgtcagccggaccccacctggacggctggggccacttgtggtcgccgggaggtaagagagaaaaccaatggaagcaccttcagaggagagtgccttggaaggaatcttggggtgggagaacgaacctgtcggaaaaattgggaatttggggctgtgagagatgttccggaaaactagaaagactgttgtctaaaagaggaattctgttttatgcttcctttgcgaggtactaaagtctagcagctatagagagacatacttcagctcagaataagaaagattcagttccaaagctgtccatcagaggtgtcaagaacacataacatggacattgctagggaattcaagtgtcaaatgagagactggcccttttggccctgacggtata

SEQ ID NO: 57973 - DNA, 513 bp, Homo sapiens
ataaatacatccacagctacataaatacatacatatatacacaaacgtatacatacacacacatatatacacaaagatacacacacatatatatttgtcttccaaccctcttggcttcacagcttggcccgtgcaggctttctttgcctttaagaagatgaaattgttaccaaagcaggagaagaatgtcagacactctgcatgcttgccagagagctcgctagaggacgtgcagaaggtcaaagtcctccatcaccagagcaagttcagccaccaggccccttaagcacagtgccaagagcctgtgaaaacatgaaacctttgaaaatatgggtgccaaaatataaaaacaaagaatgtatgaatagtatgaaatctttataaaacataatattgtcagtttcattcactgtcaaatttaatattcaaaatagtctcattacatttataaaacttgttcaatttcttctctgtgcattctgattgctgagatgtcactcacagctaagtaca

SEQ ID NO: 57974 - DNA, 1824 bp, Homo sapiens
cattcccctctcctgccgcggcggcggctgcgggccgcgcgccagtctcctcaccccacctcccccaaaagtttgaaaaccacaggacccagcgtgggcagtacagggagacgtcgtctccaaaaagttacaaaattagccgggcgttgtggcacacgcctgtagtcccagctactcggaggctgagggagaaggaccggttgagaccaggaggctgaggctgcagtgaaccctgattgtgccactgcactccagcctgggtgacagatcaatacgctgcctcaaataagaaaagaaaaccgcagagctgggccttcatttgagaccatgtgggtatcattttgattaaaccacaaagcattttctctctacagcagcccacaagggtgaatcccacttccttttcctcccaggtgtcacctctaactcttcgtgtcaggagtttttctacctctccggagttctttggctctcaggaacctagcacggcatcacgcgagtcccggctcaggtgaggggggaataaagggaacaggaagcgccttttgcggggctttgcaggctggcggtcagcgcctttctgcacccgtgtgcctggggcctgtcactctccagccccaaggccttcagcgcattccccgcagagctccaggttacagtttcctcagccgcacagcaagcatgtacctcacatttttaacttctgtcaaagagtgggccctgctctcatgagttcagcgctcagtgggagccaggtcccaaaagtgaacttcagggtcacgcgagaagcacgtgtacgccccacaagggcgtgatttcggggatttgtctttttttttttttttttccaagctgctgtgtgctcagtccctgagacagaccctgccacctcacaggtgctcaacaaatagttctggagttaactaacttaaaagtactgtaaaagagctacacagcaaattaaattcgctgtgcagcgcaaaggcaccctacacactgcgtgaacgcttcggctcctggagcgccggcgactgcgaagccaggacgcaggcagcggggagaggcagaggcgccggcccccgaccgtcagtcagaggcgggagcaggcgtgccccgccccccggggggcggacccgggacgcggcggcgcgggggcggggcctggttctccgtgccgggggggcggggccgggaccgaacacaccgggccggttggggccccgctcgccggcgggagccaccggagccccggccacgaaggggtgcgaccccccgccggccccgccctcccggctgcggcctggccaatcagagcggctcttactggcgggtgggctgagccggcccagctgctcggaggctctggcatggtaacatccccgcgcgggggtggaggggctcggggcggtcccacagcgccccctgcggcccgggccgtggccgatggggcggggaggccgctggggatagctgggaccccggggagggcgagggaggccaagggtgagggaagagagcccgggaggggggatgggggcggggactgggggcgaaggggcgggggaggccatgatggagcctggccgggggcgaaaggtgcgagagtggcgggactgggtgaagagtgggattgggagaggtgggggtgggttcgcggagaaagatcgggaaagaagagagagggcggagatgaggggactgaggggaccaggggacaggtggggaccagtttcccctcctgggatatttggtgtgcgacatgcccttcccccagccccagcgcccgttccctttggaagcctgggtgctcctcagaccacttgg

SEQ ID NO: 57975 - DNA, 678 bp, Homo sapiens
caaaaatgtaaacaataatttgttttatggtcatgttaaattttcactcagaattttatctaataaacatagagcatcacttcttctaaccctatcttcttttgcacactttaaaccataattacgacattcctaggctatcagttctttgaatgatgaccacatgcctatcttttggacaccatcaccaacagggaagatgtgtgaagggcccatgggtgcagcaagaggagtgatcccattcctgcatgcctcatttggcatgacttaagacaaacattgagggagcattgcatcactacatcagtcagaagcaaaaggacatcagttggaaagggccctttggcactgtgtagcaacaatcccaaaatcattggactacccagggaggactgcctgacacctatcatggaatcttctgccggggtggggtaactaccctgggtgcgagtgatggggcagaaaggagatggcatgcagtcatacacagaataaaagatgtctgctaccactctgtagtcttcaggtgctgtggaccaccagcagttccacagtcagaacactgacaaaggaaggccagcacaaggtccccaacacatggctcatgaccaagggttggtagaggactgtcgatagcccagagacctgaactcatcttgtgtttgaccccaaataagc

SEQ ID NO: 57976 - DNA, 2601 bp, Homo sapiens
aagaactgttctatctttccagaaagtggtttcctaaattctggttttcctcctggaatcctgctatttccttctcgcatactctagagaaatcgaagtgttttcaaaggtgctctgaagcttacgctccactagtttcacagtaaatcgccccttgcgagggcgctttttttttttttttaatgtgttctctgaatcgctttccccctttaacactgcatgacaagactaaagccagaatcccaagactgcagcgctaccccttcacaagccgtcgggctgtcccgggcggggccggcccattttcactttctccactagaggcagcagcgcaccgtgaccctggcttactacggtaagaaagcggagaccttttgcttcgaggcggttggtggccagtagtcttgatcgacaagctcaggcctctgaactaagcagccgctgtttatgcacgtacagccaatggaaaggcaggagtgcggccaacggccaatgaggactggtcttaagcggaccacagggcggggtttccctcgagaggcgaacgccgggtaaaagatcgggagcggaagtgggcgagtcagagcacatccggtgttagaagcgctggtaggccttggagaggcgggttaggaaggtacgtctgaacctagtactgggcgaactgggagtgagaaatggaaagggagttagcagttactgtctgagcaagagtggcagtagcttccttctgcggacagatggcaccctgaaggaacgaggccctgctcggagaccagactcgggaaaacagggtgtggagggaagctagggaactagtgctgcgcgtgcgcaacagtgctgaagcgggggtggggcggaggcgagtctgcgggggttttggggggtgtcgaggcctctattctgccccagagcgctggcgaaggccccttctcagcccgccttttcctttctcccgctccttctcctctactaagtgtagacgcagggccccttggcctagcttcgatcgttcgaattcagagcacgtccttccgaggtgaaggaacgcgaaactccacccatccgattgctgttcggctgcgggcgggtcctttggtcgggctgaccctgggtgagcggcccggagccaagactcgaggtagggcctggcgggcgggtgatgtcacactcctctgtgacacgcgaggctcctcagttacttagccaacggcagaggcgggaagtgagaggagtctggggctggggctgccttccaggcccacggggcggccccgctcttttcggattggttacctttgggcaggtgaggtggctttgctttgcttggtcttgaggttttgtgggcgtctttctaagtctgctcagcaagggcgtcgttgggcagtttttatcttgggcctacttgctggacctgtggtaacaagtaggctttggtatctttgtatatttactgagtgtagaattactacccggtgccagcccgggctgcttggggtcatcagcctttcattgaccacccccacaacaaaaatcactatgaacttgagactgtgttctagcaacttgtgaatgtgtaacccagtagaagggctgactgtgcttgaaacagacaaggattttaaggtcaaaggtaaataaatggcaaatggacttttctagttacttattgatatttatttacagtttatcttttgtatgtgtggtttaagaattgaattctggaaagataccggaattgcataaacacatttcttatgacctgcgtatacacacttttttctgtaattattgtatttacactctttggtgttttcttattctttgtgtctaatatttttgttctggcctaaagaatatgttgacatttagattctctgccgccactttcctccagtagggacagaatagttgaacccttgagaaatacaatctgtacttttgatccatagtttgcttcttccgttatttatctggttgtggaaacatggtttagtaccttcctcctctttttttttttttttttttttgaggcagagtctcactgtcgcccaggctagagtgcagtggcgcagtcatggctcacttgaaccttgacctctcctggcttaggtgatccaccccagcctcctgagtagctaggaccacaggtggacgtcaccagctccagctaatttttgtattttttgtggagatggggtatcaccatgttgcccaggcttaccaactccagaactcaagcgatttatttatttattattattattatgttttttttttgagacagtctcactcccttacccaagctggagtgcagtggtgcaatctcggctcactgcaacctccgcctccctggtgcattcaattctcatgcctcagcctcctaagcagctgagatgacaggcgcgcaccaccatgcccagctaatttttgtatttttagtagagacgggcttttgccaagttgtccagcctggtctcgaactccacacctcaagcgattcgcccgccttgacctcccaaattgctaggattacaggtgtaatcctttcctaaagaaaaagagtcatctctcctgaagaataagaaaaggtaaaattaa

SEQ ID NO: 57977 - DNA, 2389 bp, Homo sapiens
gagccactgtgcccaacctgtaagtcatttttgagtcaacgatatttttaatttacaatgggtgtatccagatgtaagccatcgcaaatcaaggagtgtaccgaatgagtatcaatttctcccagtgataggtcaaccctggtaagtcagggaccatctgctttaccaggtttcttttttttctccataaagctaataaaattgctgtgcccttttgcgtctataatatttggtagttacatgttttgttttaaattttgaaatactgatattgaaaaacagaagttttagttattttttaatgatttcaaaccacaagcttctattaaatcaaagtgaaattgccgtttgacatctcatccccctgccccaacccacacagcctttgatggttttggtttttccatcaacagttgttaagagagaaccagaaagaggcagtcagtaccccctgggaaacgtcagagaagtatctgagaaaggggagtttctgccattctcccctcgaacagattccgccaagcagggtctggttacatgagcattgcctctttcttagaatcccctgggcgtttgaggatccaccccgctccatcccttacctttctttaattcttgtaattggaagcaagaggttctttagcattgctgttgtgaatactgagaaacttggctctgaaagttgcttcagtattattgtaagtgctgtctagggatgtcattaggggtgttaatgggaaaccttaaacaaagacactttccaggtgctgaattctgccatgctgtaagtgtgctctctagaggacatagtcatattcatcttggttatggaaggctgtggttggccttgtaacaacctgcaataattgcaccatctagatcaagagggcccagatccgtgtgactcagaggagagagcaacaaccttagtaggttctgcagcttctcactgtatctgtccttaagaacagaattaacaaaagttctgaggtgagtagtgatgttaatgagagaaggaaagaagaaaccagagaaagcaagccagccattgtgattgtttcatttgtgggagagagcctcaggaagcagatgatgtttatatctttccactggcccaggattccttaggaaatttgtttggggactgtaacttttattattacctagatgaattgttctgagtgttgggctgggtgctgattagagtgcttcattcagtaggtggcgtttcacacaactttatgtttgaatcccttcctccctgcccctccttttctggtagatttaaaatggatgggcattatggccctgataggagtttggaggatttatatttagaagagatgaaagttcttgactggatctttagtactgtagattgaacacgtttacttaggattgcatgtgaaataggggagggagcaaaacttaagaacttgactttatggtgttgatatgatctaacctggatatagttcagtttaaaaatgccctttttgacattgggacagttggcaaaaatctgaataaggtctgcagattagaaatagtattgcattagtattaatatcctgattttgatcattgctttcaggatatacacactgaagtgtttaggagcactgtgtctgtatggttagggaaaaaatatttttacatctgtctatatattgctatatagaaagaagatgaagcaaatgtgaaatattagcatttaggaaatctgggtgaaggttgtacaggaattctttgtactgttctaacctttctgtaggaaaggttctgaaactgtcaaaaaaataccccccaaaaaatcctcctttctgcataaattccttttttatggaggtaggaacctctctttttttaaaattgtgagtccttttcagttcagttcttaaatgtgttaggttaagaaaatttgatacgcatatatttaaaatgcaagtcttaatgccagacccagctttatagtttttgtttgttttgttaagactagtcaaagttttgttttttatctttgaggtgctgctagtgagataatttttttttttttttttttttttgagatggactcttgccctgttgcccaggctggagtgcagtggcgtgtcttggctcactgcagcctctgcctcccaggttcaagcaattcttctgtcttaggctcctgagtagctgggattacaggtgtgtgccaacacacccagctaatttttgtatttttagtagagacagggtttcaccatgttggccaggctggtctcgaactcctgacctcaggtgatccgcccacctcagcctctcagaagtgctgggattataggcctcagtgagccactatgcccagccaagggaattctttagcatcttgaaacaatgacataaa

SEQ ID NO: 57978 - DNA, 1176 bp, Homo sapiens
gttggcctgcagaggcctcagcccttagacagggccttgtgatgcagtccaattccatacgtgttgtcaaaggcactgctcacagtaagagcttaattggcatttgtgcaaaggggctttcaccctagcaaagcacaagctgggaatcacatcataaacagctgccactgactgactatctactgtgggccaagcgcgacacatcatctcattgaatcttcacgtcaactgcaatatgggtatttttatccttatctgtaaagaaaaaactatagtctgtaaaccttagtaatttgccccaggtcacacagctaagaagtagctaagttagggatccaacccaagtttatccgaggccaagcttcgtgctctttccattatgtcatgttacctctggggaagataaatctattggcccaaaccccatgaggttccagaattcatttaggtaaaaagtaaatgatttaaggacactcgacccctctgttatcagcagtcattgagaagagtgtgctggggtgggctgagctgctgtggttgggcctccggggattccagggtgaaccctgccacagggacagatctagggcaaggagaactgcagagtcactgctgtggactctgacccagctctgtgccaacctggcgagacgggggctccagagtggccatggtgacaaggggccgcctctgcaagggccaagctaccagtgagcagaggggctgcctgctcaggggctgggggccaagagctgcccagtttgcctcagacagacacaaacacgcacacccccctcccccatacacacacacagaaaagtgcttctcttcttgtcaaagtgaggggaaggggctggctaacctcagaaacaacctgctgctcacctcaggcatctggagctgctcctgatcctcccacccccatgtcttaccccatccttgggggttcctcacagagtaacctcaagtgacaccttaactcagcccaggagtcactcccaatagcctcctgcttctcctggggaagggaggtgtcagggctcccagcagagactgtctgtgaacagttatcagaaccgaaatgtctttcctgacctctctgtgacaccataccctaggctgcctaacacccagccctacccctgtgcccggccaagaagaggctgtgtcagtggc

SEQ ID NO: 57979 - DNA, 1789 bp, Homo sapiens
tgcattcttctggcaccgcagccagcacccagagggccttttctgcagacgctgccctgtccctgctccctgcccaaccaacccttctccctcccttagcttctcttcagcgtgcagcccaccaggtccttcctccttcccgcagcccctcaaagcctttgaaggggctgttctctaggagacccggtctttccgcctctccccgccttccccaggccctaccgccccaggccacggggaatgggaaggagtgcgaaagggagccccaggctcgtctccgcgcctgcgctttggggagagagcccctccccccgcaataacccggcaccgctaagcggcacccggacggtgggatgcgggttgggtggggtgagcagctggggcaaggtcagtgctttcaaagagggaggggagcccggcccccggaacatcccccactcccgaaagtttcccttccggggccacggagtgtgcgcgaggatggcgcggggggcgggagggggtggggtgggggtgcacagagtcgcagccggacccccgaggagggtgcggctggagggagggacggaggggcgggcagcagggtttgggcaggaagccgcgacgccctctccgactctgtactgccacgagagccttaccctccacaccccactccccccggcccggagctacagatcgcccccccgcactcgccgccctttcaatcccaagtagacccagaactcaccgaaatcaggtgttgagctgggccagggcaggccggatccgccaggtccatggccgcggcttgggggcggggggcagagaaaggggggtgccggagccgcctcctgatgtcaaggctttaaaggggccggggagccccgcccctggccctgaccccgcctccctcctccctagcagccaatccacgttcagcctggatgcgcgcccctcccagccccctccagatgttcccaggacgcgagctaagtctgcccggccggcgcgcgccgcttccgctttggtgggaaggacctcccttcccccttatagaaacactttctccaggccgggccgggcttggtaaacctcagccgtgcctgggtagaggacgccgggctgggccgagcgggggtggaatgagggcgtctagaacagagaaaactaagtaggtgcgcgcgggcccacaggcatgcgcgtttgcttctgtggggctgggcgtgcacgtgtatgtgtggttgtgagcgtcggtgtttgtaatttgcttttctgcatacgtgttgggtgtaaatccatgggggaaaggcttgagtgcctctttggccttaaatgctcccgcctctctcttccttctccaggatggggtcgtccccccagtaatctggaaaacagttacagcaacaggctcctctcatcagacggcagtgctggtcgtttcctcactggtttgcggggaaggctgggcagaaaaaggatgcaaccttgttctcaaccacttgctatctcggtgaggatgaggaaaagcaaacagcccatccaggcccctgcagagcctcagagcttcaatatcattcccattagtccttaattaaacacctatttgcccttgcctaaataccgtataaccctcacagcctgcattgtagtgactgccccagaaatgtaggttctcacctgggttctgcagggaaatacgaaggaatccctaggtacagtctccgcctacttcattaaaatttcttttgttgcgagtatacaaaggatgcagcttagagtatcatattagtccaataaaggaacataa

SEQ ID NO: 57980 - DNA, 2236 bp, Homo sapiens
ggctggagtgcagtggcactagctcggctcactgcaagctccgcctcccgggttcacgccattctcctgcctcagcctccggagtagctggactacaggcgcccgccaccacgaccggctaattttttgtatttttagtagagacggggtttcaccgtgttagccaggatggtctcgatctcgtgaccttgtgatccacccgcctcggcctccgaaagtgctgggattacaggcgtgagccagcgcgcccggcctactcactttttttgaaataaacatgcaggtcccagggtctgtcctgcactgtatagcacacatgagtctcaatatcaggcatgattctgtcacccttggctcttctctcccagtaaaccaaacctaaccccatgttcccaaacgtgtgtctctggaagccccctctccccagccaaagcgccaggcacgctggacagaggccaccctagatacaaggaccgttcccacctggggtctggccctgaaagaaaagtgggaacgtagtcgacaaggactcctctccaagagagattcctaagacagatggtggaaccctggcgggcaggcagcagcggcactggctcagtcaaagccacgctttatactcgttttgggaaagtttcgatgggtgttagcccaggccagaaccacagtggatgtgtaggcagccaaccacttggctccggatgctccaatccctcccctgtcactcaccccggagttacaccccacgtcgagccccagaatcggcccgttctcgggactctcaggaaagagctgtcgaagcagctccgggggcaggaggcggagccgttgctccggagggtggaagcgagaataatgaggaaaatttccgaacggggcggcgccaggtgccagaactcgcgattcctcttccgctgcggtctccttaacactccctccatccagttccgtgggcaccgccattagcctcaacacagcctctgggccgtggcggaaccggaagccgggaacctgctgtcggcgtgggcggtggcggtgccagcgcgcgtgcgtcgaacggctagggcgggtggctagaattctgcggtgaatcagaaaagctgtcctgatttcctctcgctgtatacctggagccggcgagcgcctggggcttgccttgtattattgaaccctcatcacaacactgggaggggattagcaatatcatccacgttttacagggatgaaacaaactctgagggctaagtgtcttggccaagctgacatagtttgaaacttgggctacttgacccagaacaagtatactagtttgttgggatcttggaaatcaattttagtccaatttcctttctttataaatgcaaaaagtgagaccgagagaacttacttgtctggggtcatacattgaatctgtgactcaaaaacttccacccggttcaggaaagggtagccaggaggtgcaggtcacttgcgaagccagccgactcagccctgtcccccaggggcaactgtagaccatgagctccttgagaggcaaggaccgtgccttaagagccagcacttaaagagtgcttaccaggcaccagacacccttgtaagctccttagtcaatcctctcaccccgtgagaaaatgaccgtattattattctttttatatagatgaggacactggagtaaaacaaagtaacttgtccaagatcccacagttagaaatgatggtactaggattcgaacccagggagtttggatccagaggatgtgcttgcaacggtgtgttattctcagccttgagtctcctatacttaacatgggcctggcacaaagatgctcaacaaatgttgttgaatgaaaactcaatagagaatacaataaggccagatctgtttggggaaactttaaatggaagggagaaaggatgccaactgaagcagacatagtggaatggagttgggcaagatgtgactcagagattggaaataacagagctgataaggagaggaactgaagggtcaacctaggtagcaggttccagtcaaaagccaggatggcccagaatatccgtcagggtcaaccaagcatcagcagagttgtgcaggacccccaaccccacccctgcacctggcccacccatcttaaaggggtatcctgctccatgaggctggcagttcggtaaacttcttataaggcactggagcatgactcctgcaaacagtaccatcaggagttaaaataagc

SEQ ID NO: 57981 - DNA, 683 bp, Homo sapiens
tggggccagtgcagagcagtttctgttgagtattggttccctctttccccaacctgtgctcctcccctcaaccccgcacccctgcctccctcccacctcctgcagccccagagtcagcccccaaccccatgcaaactgggttcattaatcaaacacagaggaggatttgcttggccattgtcaagctgtgagtcagccgcactggagagacgggtttaaggctggcactggcatggggccaggcacgggcaggaggccgggatggggtgtgaggcaggcaaaccgggcagctgcccacaggatggagggtaaatgccagcttatgggggctgggggttgggcagagccattgataggcccgtgtccaggaaaagctaccctgacgctctgccctttggccacaggcctgagcttcaagcctgtgcaaactatgaaatgtacagtgtctttaacaaatggcttcgctggggcgatgtccacaggacttggcttccaggtgccaaggtgctctaagtgtccctggaggccaaaagccctactccccgagcccctggctatacagccagaaggtggccggggtcctaacccgctatccccttgcagctcaacaacaacacaacgcagggccaggccatggtggtggagctgattctgaccttccagctggcactctgcatcttcgc

SEQ ID NO: 57982 - DNA, 649 bp, Homo sapiens
agaaaatgtggttcttcaagtcaagcctattgattaatataataattttgccagtttattccttgtgggctttgaagacctacaatgtaacttaaaatatctatttttaatttcatttttagctaatgcccctgttgcaactgccttttaaaatgcaggacatggtcagcacatttcctaccaaaagcacagatgacgtcacatgagtgattaagtgggaaaatcgccagctcagcagcacaagaattatttctgtaatacagggctctctgctgggctgcgtgcaggaactacgtctaataaatttatactaagtagaggcaaaggattatgttgtaccacattctggcatcagagagacaatacagcaccttcacagttcgaagggcaaagcaaaaatcatttgctactgtgtcctgtatagtgaatttcagactttgtatttcccctcaaaggcctgctgatactatagaaaaaacagtgtcgttacaggcggttctattccaaatagactttaactgggaacactttgaggaaataagatcttcacttaacagtcaagaaagaaagacattaactggatgttatgaaaactatcaaggaaatgaaataaaaagtcaaattttattagaaatttaatgtcctcaga

SEQ ID NO: 57983 - DNA, 1227 bp, Homo sapiens
agacatacgagacccacgaagtagaggggctccactgcaggccgcccgggcctctcaaacaccagggctcttcccttcgaaaacgatggggtgtcactccaaccactcttaaactcgtatctgactgagagactcttgtttaggatgactcctgccctggtccagccaccacctcaaaaagacgcccccggctttccacaaaacccggcgccaagacagaagcccccgaccctcccaggccgcgtccattcgacctgccacgacccccaccccagaaaagcccgagtggagaggctgtggctgccagcctgtcccgctgtcccgctgtcccggacccccgcggcggccacggctcaccacacgaacactctgcttcctatcacaatccagcggcagacgcacctggtctggcacccccactactcacttcagtcagcctggccccacctgggccacccttcacttcgctccgcgcctcacccaacggcagagcagcgccgcgcccacagctccggtttgaaaaccttcaccaaccaatcacagagaaatttattcctcccgcgccgtccctctacggtgtgacgtacgcgtcagggccacgcggaggtgacgggaacgggaatgagcatgcgcattctgacaaagcgaagccaaaggtggccattttgactaatgtcaacggtttttcggttttttttgtttttttttgcggtgccctttccggaagtcattcaggatgccatattgactaagggcaagtggtacttcctgaatgcgaattattcttggtctcactgtctgcgggactagggcccttggaaacgattaactgaacaatgtcagctctcacagtagaatcagaagaataccaggagttagaacagcagttagtttcaagcacattcactgagctatattatcccttccattgatgtatccattcagacttttatttgacacacattgaatgagcccacatcatcacaagcactccactgggaatcggaaaaataaagatggtatggtctctactgtccagtagctacgaatggaggcgatagctctagaaaacaaaaataaatacaaaatgaaaataaaatactataattccatttaataaacgttatttagaacttggcattgtgctagcacaggagctttcatgctttttaaaaactctggacccacagtgagaaatacattttacgttgcaaccgggtaatgaaa

SEQ ID NO: 57984 - DNA, 753 bp, Homo sapiens
agcaggtgagtgcttgccatgtgggtcaggcccccgggatacgtggacatctgttgcgggggggtgtggttgtgaatggtgtggtgtgactctggtcggtatgtgtgtctgtctccatatgggctaagtgcttgaattagtcaagtgtgactcggagcgtgtgtgtgtatgtgtgtgtgtacgcgcgtgtgtgccaccagaggaagcagcagcaagaggcaggagcatcgatccgaaggagacagcgcggggagagggacgctaggggcagacaccctccctcctgcgcgcacacacgcgcgcgcgcacacacaccacacacagagtcatacacacaagccatagggcctcgcaggcagggagacggctccgggactggagagaggcagcgccgccgaaagcggccgcgaggaggggcgaggcggcgcggggagccctgggtcccgctcccggatccggggccccgcgcgcacaccagcccagagacagcctcgcagacactcgtaggcgcgcacgcgcaccctctcccctccccctcccctcccgccgcctcccggccggacgatggatccctgcagatcccagggctgagagcaccgcgcaccgcgccgagcccgggcagaccgagccgaggcgagcgagccagcgagccagcgcgcgcgggcgggcggacagatcggagccgagcggggccgggcggggcgctccctgcagggctctgcgcggcgtgccgcggcggccgcgggctccggc

SEQ ID NO: 57985 - DNA, 1185 bp, Homo sapiens
taccccactgtctctcctaagttcatcttccaggtctgtctggcctgactgctctcctgccccaccagctcccagatgccaggccttccctgccccacacacccatccctcagtcctccaccccctccctagcgtaggggcagggggtgtcatcatacccgtgcatcatgggatgactgcaggcatacaggggcctgggggtttgggccactgggcctcaggccaggagccataggaatgtgtctacctctgggcccgagagtagagcagacagttctcacccaggcccaccaggtggcagcagcaatccactgtacagcagccctgtcctctgaaccggcgcaagacagggctgctagccggcctcagacacctctaatcccatacaactccggatggagtgtaggcatgggcatatgtccagcctggagcctgtggctgggtgccgcaagacctggtcatggggctggggactaggagcccttggagttctctctttgcctcatctctggacctcacccacaaagtggggagagcagtatgtctcctcttctggaggtcaatggaggaggctgttctaggaagggggaagggggcaaagaccgtattccctagtaacctactgccattgctgctccagtctggcctgaaactcttttgtctctcccctgctctgggctgtattgactcaccttatgacctgttttgtggactttgtcaccatccagcagtagtaaaagcacagccaccccaacttggggacattcaaggaggctgtggggaaaaggccaaggataactggtttacttttctctttgcagctttttaatcagcactgtgaccagggctgcactggggcatggagtggggagaagactggggagacagcccctggggctgagatatcttctgaggccctcctagttttgcaaaagcattaacgcacacaccatgccctgggggctcagtcccaagtgctggaagaagaggtgctggtgcttggttgagtgtggtccttggcatggcaactgggtctactttcaggttctgctgataatgggataatggaataatgatggacccaaggggctaggggctgaatgaaaccaaaaaactgagtttggctgggcacggtggctcatgcctgtaatcccaacactttgggaggctgaggcaggtggatca

SEQ ID NO: 57986 - DNA, 1845 bp, Homo sapiens
tacaggcgcccgccaccacgcccggctaatttttttgtgtttttagtagagacggggtttcaccgtgttagccaggatggtctcgatctcctgacctcatgatccacccgcctgggcctcccaagtgctgggattacaggcatgagccaccgtgcccagccccccatccctattttttaatatttaaaaaaaaaaaaatctgaggccaggcacaatggctcacacctgtaatcccagcattttgggaggctgaggagcacagatcgcttgagctcaggagttcgagaccaacctgggcaacatggcgaaaccccatccctaccaaaaatacaaaacagtctggcatggtggtgcatgcctgtggtcccagctacttggtaggctgagttgggaggatcacttgagcctgggaggcggaggttgcagtgagctgagatggtgccactgcactccagcttgggcgagagagagacagacctcatctaaaaaaaaataaaaaataaaaaataataatccggaagcaggttaggtcagagagaaagttaggatgaagttcccacgtgaggtacttattgaggcactttatctgtggaatgagtcccgggctatgagcaagggtatctggaatcttggcttcggctttatggctaacttgctggttgacctttgccaagtcattcacctgtgagttcagctttcccatttgtaaaatggaataaactgtgtttccctcctcagcccctgatagttatagcagtaagaaaacgaaacgaaaagcagtcaaagcgttttggaaagttaacgccatgcgccaagatgaagctattactccaagcccctcttcatcagagggctcgagttggggttgagactggggctgaggctgtggtccgtccccctttccaggtccttgtcttcctcccgtcggcctgggggcgcccgctcacgcggcctctctattgcagagctcttctctatggttttccctcccggaccgtgaaggcgggagggcgtggccagcacgccttttccgctagtcgccccgctctatcccatagtctcgctgccctgagcctcccgtgccggccggccggccgggggaacaggcgggcgctcggggggcgctcggggggcggggggagttccggttccggttctttgtgcggctgcatcggcggctccgggaagatggcggcccgggcgggtttccagtctgtggctccaagcggcggcgccggagcctcaggaggggcgggcgcggctgctgccttgggcccgggcggaactccggggcctcctgtgcgaatgggcccggctccgggtcaagggctgtaccgctccccgatgcccggagcggcctatccggtgagtggggcaggaggaggggcgcgcgggccgggggcggggccgagcggggacatgggagtgacaggggtggggggagaagtaggagggactcccttgggaggggttcgggctctgggtgggggttgggggaggcagtgcgcagaaagagagggggaggcagttacacacctgctcctaggggcattgtttccctggggagtcggtagagaacctgggtgggtgaagtgggtccagggatacctgtatgagggccggagtgcaaaggggcttgagcagctccagtgatcagaggaacacagaacgtgtagctgacaaattgaggtcagcttctaaagagatagtagctagcagagtaaatgtggaactggcgatgtccgatgtgtcccatccaaaatagactgagaatttgagtataatctggctctcgcttagcttttggactctgtttttctatggagtcactactggagcaaaggg

SEQ ID NO: 57987 - DNA, 698 bp, Homo sapiens
tctgtgggaggctgtttctgtattaggtataacattgtgctaagaaaaacagccaactactgatttcatgtccgtttccctatgggaaattactggccatggaaggagaatatggttggtttttcctgggcagtccccggaacttagaaagccatttctccccagtcttgacctcctgcctgcttactcctacccatgggttgcacacagactcccctgtagcccagtgcttgttaccagttgctggccagcaacagcccagggggatggcaacacccacctagccgtctgccaagccaggaggtcagcacatgagcacacagtggtgtctgccctctaggccaaggtgcacagtgttaggagcctcttgctccactctccagatcagcctggaaaccagagcttccctcgtcttagacaaacagatggccgtgggcgatgcagagccctgaactgctgagggtgctccttccattctcgcccttccccaaaaaacatacaccaaacttacccccaatcacagcatctgagaccacaaagccccacggacacagctgccccgggtactgcctgccttccccttttctggcctctgcaaactagccattcacctgatgaagcccctggggcagtaccttggaaacccctgagaggaggagttgaaggaggctcaaagcctttcaaggacagtgtgcact

SEQ ID NO: 57988 - DNA, 566 bp, Homo sapiens
agcactgtcagccgatgagcccaggagaaaaagctgggcctagtctctgccccattcctgttccacacctgtctgtacccctgtctctcctttccctggctctgccagactctctatctccctgggcgccagcctccccacccacccctggagggcggggcttggctgcacccacgtgtggtggagttaaatgctcctagccggcagaggagctagggagtgtggcactgagccggctcaggcagagacgcggcaccatggctagcaagaaagtctgcattgtaggctccgggaactggtaagcagctctgtcaagtgatatgggggaagggtaggccccccaagacagaggtgggtaggaggcagaatgggtgggaaaggccctcaggttcctgttcagcccctgctgctatcttctatcatagcagcacaggacagacggtgcccggccctctcctgacccccgccctcctgggcagctgcacctgttcaccatgggaaggcgtctccagagctctctatgtgaagagccgcttgagtttgggggtgggaagatgagaagtggg

SEQ ID NO: 57989 - DNA, 4123 bp, Homo sapiens
ggcacagaaaatccaagccagagaatcatgcaggccagttcaacatggtagggagcagggcaattagcaatctgaccttaaacctagggctagggagttcacattctcagaaggtagaaactcacagccatccttcctgagctccaaggtgggagggcaagggacaggagggttaggcagtgagtgggggtgggggtagagtggaccaggagtgggaggctaagctgagcctttccctctccaatctaggtttcccttgttcatggctgtgtacaaggtgtgctacgagggccagccagtgggtgaattcatccactgcctgcagaatcatccagaacatatgtgagtggggccagggcccaggccaggccgcttttttaccccagtggagaccagcagaagcctggggtacctagtcaccaggatctccaggactcccagggagcagagtcttctcatcttttcactggaggacaggaggctatggggcccagctacgcacctggagatcctgaactgtcaagccactggcagcctcatgccaccacatttgccagaaatgcagttgccctgtccctctccagatgtggggctttctccatatcctctgggaggggtggaatcaagccccagtgctgcctgcttggtggcgggggtgatgtatgtggagaagggttgggggagaggccggtagggcaggggctgctagtggctgtctcacatacaccagtaatcctgttaaagggctgaagaagtatcttagccacaggagcgatgaggcaaggattgtcagggaggggtctgggcttctgagctgatgcaggccccaaggacccctttgctgacctctgccaggacccacacagcttcgatggatctcagtgtttgttaacaaaatacaaagatctcaaacaaaccccttttagcttctcctagcaacatctgtgtcctcagaaacctctggttctcccccttccccctcccccaggctgccctggcacccaaattgctgccatgctggcatctgtagctcggtggcttgacattctccccagggacttcccggttcctagttctttgccagctcctccccactctgtgcgacctttccaagccttccctcaccctccccgccagcaccctctttggggagcaggaacttaatctgctgacagagctacacctttcataacaggctcagatcactcagctccctgtgacctttgtattcacccaggcttccttctcagtagctctagctgggggaggtgtcagctgggcccctcctgtgctatctccccagaggacatccctgactccacccctttcttcctcccaaactctgcacctcttcctcagctgctccagaccggccagggtaaccagctaaccatgcctggcatctggaagccagcaggccagagggtggcccaaaggctgatgaacggtagggaagggtgagcagattcctatgttggtgggcaccaatattccaagggcagctctctttgctgaatgagggccttctcgtgaggtactgacaacaccagcaactcgagagctgggaaactcaaggaggaggaagaaaatcaaaaccaccctactccctggggtgaggaaagaacaggaggggaggaggaggagtgtgctctgcacttgccttgctccaggatggggtggcagcagaggaatgtcacaggtcagcagcctaggcctccagctataaatagtccggagggcccgagaggctcccgcccgtccagcagggctgtcagcttcctgtgtggcagcacctggcacactggctctggccagcattatgctaaaaccctgttactctccaatgaaccagggaggcgggctcctctctgcgcctatcccttgagaattctgtcttaccagtgaagggtggggctgcccagatcaggcagcaggagtgaggggcacagtcaccccaggccttgctgagcccaggtctgggtactgagtgtccagagctgcctccccaggaggttaaggtgggggcaaaggggaagcttcaagcactttgcctacttttgttcactccccagtgcactgtgactcaggccttcccatcaggcctatttgtctacccaataaagcgtgttttttccagaaacaagaagagttgggagagggagcttcagtgcatgtggcagtgcgtgtgctggcgcgtatcattgcacgtatgttttccctcttaccgtaggaaaaatgaaaaaagaaatccctcctccataatcgcagctactccaggggtcagcggcggtgcccactcagtccccatccctctctctcccctcccgccagcgccccctcccgccctcgccgcaagctggccccggccttgccggcccttcttaggggctttatcatgcctcctgcaagaatagagatcacacacgggacggaaacgttagactctcatcccttgtgcccattccttggtcacgggccaagctgccgcatccttagcggtccaggcatcgcggtgcccctcgggcccctacctggactaggcccacagccgggctctagggggcgcgcgatccacctccagaaggccggctgcgaaaatctacccagctactggcgacgtcaccgcaccgtaggctgaggattggctgactctgatttagcatcctaaaacttccggttccagagcttggctcgccaaagaccctccctcgagggagagaaaccacagcccccagaattcagcgggcctctccgagagcacggcgcgtctgaggatgcgtagtaaggataacgggcccggaagccggaagttcaaagccggcctccagccagagtgacggcctgcgcggactcccgccttagtgggcggagttgtgccgcgtctgatgcgcagttccctttatagcgcggcaagccgaatcctagaggctaacccggcaggtgggagggagaaagttgctttctgcaccaatagctgaggcgttcagggttgtccagggacgctaccctcacgtgtctggttccgagtgctgcgttcggctgtgctgggaagttgcgtagacagtggcctcgagaccctgcctgcctgaggaggcctcggttggatgcgaaggagctgcagcatccaggtacgctgccggctagggccgagcaggggctgccagtcccactgcctgcgcgcccacctgggccagtctccgcttgccgcgtcctcccatcccctagtctgcaggcctggtgcccttgaattcacccgcttctgttgcgttgcggaccgcgagctgcactgcttcctgcccaagcccaagctcctcgcagcagtaggtcagtcttgctagagctcagcgctaatcctgtcaaacctcgactcctgcctggcgtctcgaccctccacgctccaactctgcctcttccttgctctatagacctctgcgtcctgataagtggctctccggggcacccttcgtgcatatcggctatccagctccacctcttgaccgctttcacttcctggaatgctctcactgctcctcttctccaggccatccttctaaaaagacagttccactcccaccccgattcccacccctacacctttctgctaagttttctcaagcccccaccctgtctttgagctgttgtctctgaactctcacagtgcctctccatgagaccataagctcctgtatgacagaagccatgttctttttagcggcctccgtagcatgatgtacgttatgttatgttatgttatgttatgttatgttatgttattttgagacagggtcttgctttgtcgctcaggctgcaggtgtgcgccaccacgcccgggtaatttttaaaaaaaggttttttttttgttgttgttgttgttgtttttaaatagagaaaaggtctccctatgttgcccaacctggtctccaactcctgagctcaagccatcctcccgcctcggcctcccaaagtgttgggattaccggcgtgagccaccgtacccggccgatgtactactctctaagtgccaaacaaaaagtagataaaagatgatggataccttaaaagccctgagttgaccactatgcagtgtatgcatgtaacaaaatcgcacttctacccatacgtt

SEQ ID NO: 57990 - DNA, 1640 bp, Homo sapiens
ccctatcccaaccagatttctaccctcctaccaacaaacgtgcatgagttgacataccaaaccaactcttagggccaaactaatcctgttccccccaattctcggaaactcaagcgtcctaacaaatcttaagagtctgatgagtccattcctttcccttggaacgtctggcccttgcgttgacccctcggcttccatggtcacaactagctctggttctcctggccccttcctatccctctcttcggggcctctgccagagctcacactgaacctgtttcctcatctgtaggacccttggaggttgggaggaggcctatatgacccccccaatccaactccggatctaacattgaaggggcccagcattcccctagaccctcactctttctcttgcccacgccccaaactccttctccatctaggctaccacctcgcccacgcgcctagcatcacccgccgcggcccaagctcccccagcccctgcttccgggctttccttgcagttctgcttccggccctcggcccttcccacagcggggcgcccccggcccgcgcccggcccccgagccgctcgctcccgggctctcaccgctcgaagagcagcctcacgaagaagatgcccgccgccagcgggaacaccgagaggatgtgccggccgcgggggtaaccgtagccgtcggccggcccctccagatcagcccagctcacgttctcgggtagccagaagcgctcgctccacagccagccccacagcaagcttaggggtccctgcgctgctgtcgccatcttacgcccaccccgaagccaccgccgccacaagcgtcagctgccgccacagccaacggaacccgcggggaggcggccccagggcggggcccggccggcggccacccccttccggccccttctggtcactgccacggatccgcccgcctccctggcagggccgggcctcttcaccgcccatctctcctcccggcccacttccctcactgcaacccggggaccgcctccggggatccacgccccttcccgagcctctgactcgcccagcccggccctgggaccacgcctcgggcggccctgggcccgccctcttttgctgctggtctaggccacgcttctactcctccctcactcttccatccagctacggccacaccccttatttcaggcctagctcctttacggggacattctcctttctcagcctgttggaatcgaatccgttccggctcccacccaggcggtacctctgtctccactcccggaggccagatcgatctctcaggtcagggcttctcttggatgtcagctggtcctgcccactactgtccgccactagagttcttttcgctcccaaccttttcttcccttcgtgccccgtgacctcagcctactttcactgctttatcccttaaaaattagtcacttttcctcagaaaaaatggacttaacagtttacaaaaggccgggcgcggtggctcacgcctgtaatcccagcactttcagaggccgaggctggcggatcacctgaggtcaggagttcgagaccagcctggccaacatggcaaaaccccgtctctactaaaaatacaaaaattagctgggcctggtggcgctgtgcctgtaatccc

SEQ ID NO: 57991 - DNA, 432 bp, Homo sapiens
gcttgaaaagaaattatagaactgcttgattctagtgtttaaattttagcttacaaaatgatccattgggggaagaatgtatgcatcagagatataagaagcttaaaaagttttcttgctggaaaagaaggaattacagaacagctccagaagctggttctaccctaactgccagcagcactcttggctctgtaaggtctcgtgccacacaatggatgagtcatctaggtctctgacttcacctgcccttactgtaaccacacaggagccctgacaatcaaagtggcactttgccttggtaactggacactgtttttctcagatacctatcatgtgatcaaagtatacttattgacatgaaaagatgctcataggatacttttgaatgaagaaagcaaattataagacagcatgatcctattttaatttttt

SEQ ID NO: 57992 - DNA, 1427 bp, Homo sapiens
gagggtgaaaagggtaagaacgtggagaagtttctgtgcaggacagggagtttccaagtcccataatcacatctcaacaccgtctgatatccttccctttctctctattcctgttcccccttgacccccaacagctttcacttgggttcccaagagagcctcataaattgtctccatgttaccaatctctcacctttctaatatagctttacactgttgccagaaggctttttctaaaataccggtctgatcatgtcactctccccacatgaaaaccaattgcgttccctggttttcttactaaatcctaaccttagcagagcatccgaggtcttccatctggccctaaatgaattacaccagttccttctcccttctgtatttttccatggcagactgcttgctttcctattccctttattcgtgttcagcttccataatcctttgcttcaatctcctatcttagactcgactcattccacttcaagctcactgctttgactccacaagtccatcccttccactaccagtgcttcttaaacttccctgaaggtaaaaattacctgggatacttgttaaaaacataatttcctggactctatccacacatactgaatcagaatataggatgattttaaaacatgtccaggccaggcacagtggtgtgtgcctatagtcccagctactcagaaggctgaggtgggaggattgcttgagcccaggagtttgaggctgcactgagctgtgtggtcacaccactgcactccagcctgggtgacagagtgaaaccctgtctcaacattttttttttaattaaaaaaatttaaaatgtccaaaaaattctgacattcctcctatcagagaaggtggagtcaaattgcccttccccgaaatgagtcagctttagtgactcacttctaatgaagtgaatgtggtaaaagtgatactgtatgacttccgaggctaggtcataaaaggcaacacaactttgaactcccccttttcttccctccttccctctgtctctggatgattgccctgggaactgagccaccaagccaaacagccacatggaatggccatgtgtaggtgttcctaccatggccccagctgagatcccagatgacagcatcaaccgcctgacttgtgagtgagccagccttttgatgattacagctcccagcctttgggccaccctggctgatgctaagtagagcagagatcctgcccaaactggagcttcaaaagcaaaataaatgctggaattattattattattattattattattattattatttaagacagagtctcgctctgttgcccaggctgtagtgcagtggcacgatttcagcttactgcaacctccgcctcctgggttcaagcaattctcctgcctcagcctcctgagcagctgggactacagt

SEQ ID NO: 57993 - DNA, 1150 bp, Homo sapiens
gattctccaacatccaaggattggcagtggtgtggtagagccctaaacttgcagaccacactcctccactgttctcccccaaactgtgtaaccttggtcaaatgatccaatatctttgggttgtggtttcttataaaaggaggctacaccagatgacctttaaggtcccttccagttccattttatgactgaccccactgtgcaaacatcaattggcctttccctgaactgaagtctgttccaaagtcacatttggagtgaaatgtttccctcttctgaattacatcccaggggaggtacagtcagcatctcagtagagccaggtccaaattagtttctacctacattcaagtttcttttggctgccctctctccccaagctctgcagcactggccactcagtgccagggagagagctgggggcgcagcgtggtgtaataggaagagcagggctttaaggtgagacagacttcggggaaatcctaactttgttaccttgaacatattatgtaatattttccatttcactttcttcagctaaaaaataaggataatatctatctttaggaggttttgatatagatttaaggagataatatatttaaaatactgggtatattacagtagtattaagagcattttaagtataattattatcattgactcttgttataattctcattttaaagcctttatcaaggagaagtataatgtactttaagttcaggagacaaaccctattttccaacatccctttcagccaaagaatacataaagccatacccttgatatcacctagtccctacccattaatctggatcgtttggttattttgccccactaattaccaaaggaaaggagttccaacctttgtccagaagacgagagattagaaatgagtcaacagtttccttatttgaagagtgaaaaatataaagtaccactttgtttctgatccaggagtcttgaaaactaaaaaaaaataataataaagtactgctaattcacagcttaccagaagtaaaagaaaaataaagtactacttgcagctcttggcaaccgaagagcataactgatctggttgaatgtatggttcatcaggtactgctttcaataaccttgacaactgtagaacacagagagtatttaa

SEQ ID NO: 57994 - DNA, 1399 bp, Homo sapiens
tgactttgggccaggtgctgtggcttacgcctgtaatcccagcactttgggaggctaaggtgggaggatcacttgagcccaggagtttgaggctgcagtgagccgtgactatgccactgcactccagcctcggcgacagggcaagactctatcttgaaaaacaaaaacaactgactttggtctaaaatttgtaggtcatgaagaaccacccaagaactttcctaatcttttttttttccctttaaattaaaaaattaccagatcaaattcaagtctaactccacctctctcccaattaataaaatttgttatttgctcatttggttctttccctccccgtcccagctgatcattaacttattctaagggcaaacataatccaacgaagtgaggttttcttatttttccagtagttttttttcacacatagtaagaaaaatctctttcagtaagtagaaaaacagatcattaagtcactagcttcaaatttaaggtaaagagtagagaaaaacatagctaattagaaaaagaatgtggaaatttacaattgaccaagaccatcacgacaaagcacagacttcctctgaacagcatatttctcctttaacctttgtacctttccatactttaacatcagatgtactgaataccagtgcctggaacatgtaggggctcaataaatatctgttatatgaatgaaaaacagtgttacactagtactgaattgccacacatctcagcaaaggcccacctacataactgaaaatctgccgagaaactacatgctcataagtcttgccaattacatgcttaattaaggcaaaatagttcattaaggagccttctttacaatctcaaagcaaaagaaacacatacgcttattttaggaaggctccttctgttaaagatataaccttcttaaagcagccctttgtccttaataactaatcaagttttctccaaatacagggcttcttagtttcacttctggacatttccaggaagggcctggcttccattcttatctgaaattttagatgatgtgctgtttttcaggacttgctcaatctgaagagtcagttcagatcagtttaaccaataccttcaagcaggagaattaaaatggatttactaaaaagtgactcttctctaggcaagttctttaatccttcctttctttaaaagagaagctggccgggcacggtggctcattcctataatcccagcactttgggagaccgaggcgggcggatcacctgaggtcgggagttcgagatcagcctgaccaacatggagaaacgccgtctgtaccaaaaatacaaaaaaattagccaggcatggtggtgcatgcctgtaattccagctactcgggaggctgaggcaggagaattgcttgaac

SEQ ID NO: 57995 - DNA, 1492 bp, Homo sapiens
cacatcggctgcaaggactgctatattctcaacattcctcaaaagggtgtaagtgtcttaaacagagttcagctggcgtaatggaagggagaaaaaatcgaaaagagagggaatggctgaaaatgaaggaaaaagaacagttgaatattacagtatttccctggaaggagggtatttggagttttaatgaattgtcaccttcctccaccacaccagaaagtatacagttagaatgcagtgttctcggtgggagaggacggggtatttgcagctcccgcccttgggcagcaaaggctcagcccgacataagcactccccacccagcgcaggccccagaagtgaggaaagaacggaggatcagcgtccctcgaccccttatctcgagggggagggactcacactccttgcactccccccgccccaaaagtcgaaggagaaagagggtgtggagagaagccggggtcttcccgcactctccggttgtggagagagaaggcccttacctggctaaaagccgcctttcctctgcgctgctaccagccctgtcacaggtcccggcgctctacctagcgcacctgtcgcgaccaagctgctaacacctactgctcctgcggccccgccccggaccccgcccaccgccgcgggggcgcgcacgccagacagcctcccgtgcggcctcgggctgagcgtgcgcgccaccggctacgtgcccagcgctcgcgtctgctccagtcgctctggcggtgcggggcgctggcgacgggacagggtttttgctgcccggggcctagtctacctcggcacgcttttctctgaaggagacacgcacttgcacgacgtgggcctctgtgcagctctactttgtccttaactcctctgactcaacgttatcgcagtttgactctggagccactcaggtttttcctaagctcaactctagccagctaggttcctggtgctttgggggtaagttgtgtgcagggagggtgttttacaggaggctgtgtggtgtagtggaaaaagctgaattaagtacattaatcctgaaaacggtttgacaagggcagatgacgtccaagttctccaacagctgtttttactcctccattcagaataggagctgtgctaatggtttggagaccgtcaattggcctagcacttggccatcctgcccccaaattcttgtcccagttccgtgccagctgcatgatgccttttgatagtatccttctttcctgtacctcaagcatagtagggtttcagaccacaagttttctgaagcttttcggaattcatgcagcttgatgcgttattagtaggggctgctcgtgggaaaacgcttgtaattacacttcctcaagaagttaatgaaaatgtgtgagaagagagatttccaacaggtgatgaatatgccagccagttattcccttcttccttcaaatatccagcctagactgatttctggataggtattgtagaaataaaaatttca

SEQ ID NO: 57996 - DNA, 1142 bp, Homo sapiens
gagccaccacgccaggccagacagttcattcactgagtagctaaagtagataaaagaagaaaagatatcgtttcctttttttttgagacggggacttgctctgtcacccaggttggagtgcagtggcgcgatctcagctcactgcaagctccgcctcctgggttcactccattctcctgcctcagcctcctgagtagctgggactacaagcacccactaccacacccggctaatttttttgtattttttagtagagacggggtttcaccgcgttagccaggatggtctcgatctcctgaccttgtgatccaccctcctcggctcccaaagtgctgggattacaggcgcaagccaccgcacctggccccgatgttgtcttctataagtaactttcatcctagttggagataatcaccacatacttgcaagaaagactttatccttatcctcttgttctgtcttctgcttgaggctttggataaaggcaaagcccttttaagcccaagcaggacaaagtccaaatctgaaaattgcactatcctccaaaggtctttaccttccaatgagtcagataattttggatcattcccattaatgagtcatgctgaccaaatgtagtttttgtgtatttcttgctacaacttttaaatattcccttccttccctttctacatttgttgagtgactactgtggaaacaagactcagaaagttaacaggctcttgtataaaagtattttagtaatttaacaaactagtgttgctgggcgcggtggctcatgcctgtaatcccagcactttgggaggccaaggtgggcggatcacctgaggtcaggagttcgagaccagtctggccaacatggagaaaccccatctctactaaaaatacaaaaaattagctgggcatgctggcaggtgcctgtaatcccagctactcaagaggctgaggcaggagaatcgcttgaacctgggaggtggaggttgcagtgagccgagatcatgccattgtactccagcctgggtgacaaaagcaagactccgtctcaaaaaaaaaaaaaaaagaaaagaaaagaaactagtgttatctgagcattgacagcaaactatatactcaaggatcaattttctgttttaataaaaaat

SEQ ID NO: 57997 - DNA, 1150 bp, Homo sapiens
caacacagcaaaaccctgtcttaaaaacataaaggactaaagaataatagttttctaggatatatcttagagttaaccaatttgggtttattttatttgatgcatggtttgctcttccagtatgtagagtcatgtcttctcccacctccacccaaagtgttaattgaattatagttgtaaatattaattctattccattacttttgttttcttcttcatggcatccagaaatacatatgttggatctggtttgattattttatcactttgttttcaatctttttaatctttttaatttttcttggcctttcttatttccacactctatatctcacattatatatttggtccttactattctttttgttgattgaggtcacattctctgggacgcagattctaagacagagacatgtacacatttggaatcgacagttgtgacaaagtgaaaggaggaggattggacaagagtaacagctgaactgtaatcagtgatgtgctagtaaatagttaacaactggctcttgggggaggaaagctttgatttgtaacatttgacaatttccagtgtataaatatgtctttcttttttttgagatggagtttcactcttttgcccaggctagagtgaagtggcgtgatcttggctcactgcaacctctgccccccacgttcaagagattctctggcctctgcctccatacaggcacccgccaccaggcccagctaattttttttgtatttttagtagagacagggtttcaccatgttggccaggctgatctcaaactcctgacctcaagtgatccacccgcctcggcctcccaaagggctgggattacaggcgtgagtcaccgcgcccaatcagtgtgtaaatatttatatcatggctaactgaaaattggcaacatgatgttactgaacatggagctggaaagaaatgcatagtagctaatcccagcactttgggaggccaaggcaggtggatcacctgagctcaggagtttcagaccagcctgaacaacatggcgagaccctctctctacaaaaaaaataaaaaaatttggcctggcgcggtggctcatgcctgtaatcccagcactttgggaggccgaggcaggcagatcacttgaggtcaggagtttgagac

SEQ ID NO: 57998 - DNA, 1719 bp, Homo sapiens
cagcttccagtgaatataaagcaggcagaaaaatgtgaaaaggagagagatgagagacgggcctagcctcccagcctatacctttctcccatgccggatgcttcctgaccttgaacattgaactccaagttcttcagttttgggacttgcactggctctccttgctcctcagcttgtagacagcttattgtgcaaccttgtgattgtgtaagttaatacttaataaactcccctttatatatatcctattagttctgtccctctaagagaagcctgactaatacaatccccgtgttggaagcctggccctccgctgtacagagttattgaggaaggagaacagggtctggaggcagcaaacctaaggctgcacgccaacttcctagaactaaatgaaaaggaaacccctaactttccacacacctaagtaacaaaaggaccagaggctactccctttaacctttttctgtgaggcagatgggaaattggctgccctcaatgaatcagactgattgcaggccagtctttgtttgcataaaagtgtaactttgagacctggcgtggtggctcatgcctgtaatcccagcactttgggacggcaaggcaggtggatcacctcaggctgggagttcgaaaccgcctgaccaacatggagaaacactgtctctactaaaaatacaaaattagccaggcatggtggtgcatgcctgtaaacccagctactcgggaagctgaggcaggagaatcgcttgaacctgggaggcagaatttcaagaaccgagatcgcaccatggcactccagcctgggcaacaagagcgaaactctgtctcaaaaaaaaaaaaaaataggagtataagtttgtaacttcaccctagcctctgattggttgctttttgctgcaaccaatcagactgattgcaggctaccgctttatttacatgaggtgagcatgaagtgatcaataggcaacttctagagggtatttggacccaagaagattctgtatccaggtccttgagcagctgctcgggccactcctgcactgtggagtgtacttttgttctcaataaatccctgctttcgttcttctgttgcttcattctttatttgctttgctgggcattttgcccaattctttgttcaaaatgccaagaacctggacaacttgcagtcacaaccctctactggtaacattatgatttcccttcattaccaatcataaccaccttctaattcttcaggggtgtctgctggtttttagtttccttcattatactcatttatttcttccttctgaggcatcttcgggtttagactgggaaaggcagactgtgccactttgccatcatgttaggggcccataatgatgtccctttcatgactcagcctaccccagggttgttgaacctttgtgtttccagtaatgtagagcagaagatactctttcttgagtggtcatagtagtagcccagaaatgaagatgttcaacctgaagaactgcaaggagaatataaaagcaaaggaaagacaaagcaatatatacgcatgaaagagaacaaaataggcattttactgaaagatactgaaatgtactttcaacatgcttgtatttaattttacagtcatttgggaatcttcttaaccctggaaatgagacaagaaaattaacctcattataaattgctttaaacacatttgtgggaatataggtgagtcat

SEQ ID NO: 57999 - DNA, 1444 bp, Homo sapiens
tcccttctcctgtgtggccccaaatgtttcgcttccttctgaatctgcctcatctgtccattctccttttccaagagcaacccttgtgttttcattttttgggtcccttcttccagccgctgcaggcttgactttggaagctcttcttcctcctgtcctctttgcttttgcttttcctcttgctcagcctgctttggagttgcctgtttttgctcttccttccacatctcttcttcctgccactgtttctggctctgttgttcttgctttccctccttcatctggagccatgcctttttttcttcccaattctcacttatcttctcatagtgctccttcaagagatttctttctcccagcaactgctgtttgagactcatgccagacatttgttcttgaccctcttgcaaatattgctcctgcctttgtttttccttctccttgtggtctttctgtactgttgagactgttggaatatctctttcactttctatttcagccaagatcatttgtattaaattgttaattactggatctgtgctctcatatgagaggagggtactgctttcagattttgcactaattggtgacttctgaaaatgcaatcctggcataaatgagactacctttttttgttttataggtttctctccaacttgttcttccttttttgtatctttgtattttctcaagattttagtcacagtttcagccactttttggaaatattcctccatttttgcctttatgattcctaatttttcagcttctgctctttttaataactcctcttccttcggaacagtctttttgtcaaaagcctttcctatgttatcaattttctgttttaggaaagccattatggcttcctgaaattcttcgaggttactctgttcacttttgccatctggactttctagaactctggtagattctgaagtctctttagccactcttgagagtgatttaacaagttgatgagacttgacttgtttggtcaactcttccttctcttcagttttttcttctttgcttgtgatagttcctgaagagatatggtgtttctttccttttatttttcctttctgtggctcagcagtatcatcaaattggatcatactgagtggctccactaggcttctaatttcacctttgccctctttgtccaatgactcagtggtgggttccactttaatctctgctgcagttggacgtttgtcaaatggagattcacgtttgaccttcctaaattgctccaacatcatcatacttgttccacttttgccaccttggctctttgtttcagttaaagagagatgttttctttttgcttcagtgggtgactttgatttatcttcagaaaaggatttcatttcttttcttttctttttcagtacttgtagctcatagtattgactaggtttggcctctgagactttctgtc

SEQ ID NO: 58000 - DNA, 1799 bp, Homo sapiens
gcacgccagcttgggcaacaagagcaaaactccatctcaaaaaaagaaacttccttgggccagatggttttgcaggtaaattctacccaactggcaaattaatatactcctgagatagaagaccgaagctgtatcgctggccttcccagataaaagcaaactacttctggtgggccttattgacagattggaagaaataatcatttgccagatcatagcggcataccaggaaccagggaatgtgttaatttgttcaagcaatgaagccacatctggtacagaagctgtgactggacttagtacctagttaagcttacaataatccactgtcgttctccaaaatccatctgtattctttacaggccaaacaggaaagttgaatgaggatatggtagaaatcaccactaaggaatctttgaagtccttgatgatggcactaattcttccaggaatgggatatttgttttatttttactgttttcctaggtagaggcactagtggctcctatttggcctttcccaccacagtagccctcactccacaggtaagggagtcagtgtggggattctgtcagctgctgagtatgtatattccaattacacattttggaccttgtgaaataaccacaggatgggtttggggacacactagtttcactgtgagatgggcctgagctaaagcttttttgattaatgggtagaccacaataacattttggatctcctgggattaatgtcagctcagagccagtgcccagtagtcccccaaaaggtctgattatttcctttttcccaatgcacactctgttacaaggtcagcagaaaaagtaatagtatacaggtagacccagggtccttcttcaagagaacttgaggtcctgttcactcaaggagctctgagtctgtcaactggctcaagtttgggaattgactgatggactctgactcgttttcatgattcatgattcaggtatttattttcattcgaccgaggaatttcctacttgttcagattaagtaagaatttagtaggcttcctatctattcatttctgggaacatcttgatcaactagccaatgccataggtcagtgtgagtcagactattttgattgctgctttcctgctgctgtccattacagtaatcatatccaccttgcctttggtggttgggtgccactactgggtcccagttaggtttacaaattcagtgactacagttcccactgttaaggtctgaactctagagaagagtgatcacagagctcttcaaggatgccggggcttccttcactacattttttctcatactattggtgaaagggcctagcacaatggctcatgtctataatcccagcattttgggaggccgaggtagccaccacccctggctaattgttgtatgttttgtagaaacagggtctcgccatgttgcctagggtggtctcaaactccttagctcaagcaatccttccactttggactcccaaagtgctaggattacagccatgagctaccatgccctacctccttttttttgtttttgagatggagtcttgctccgttgcccaggttggagtgtagtggtgcgattgtggctcactgcaacctccacctcccagattcaagcaattttcctgcctcagcctcccgagtagctgggattacagatgcctgctaccatatctggctgatttttgtattcttagtagagatggggtgtcaccatgttggccaggctggtcttaaactcctgacctcaggtggtctgatccacccttgtcggcctcccaaagtgct

SEQ ID NO: 58001 - DNA, 3750 bp, Homo sapiens
ttcaaaagatgagtgtttgaactaggacatacaagtgggagcgatctatcctactacatattgctaaagacaataaggaatttggaccatctaacaaaaattatagataattttaaaaattttgtttttattgtatttcgtttgaattaatgacagaacgtcaaagaagacactgtccagattaagtgttattactggtatattaagcggtgacatgggtaattaattcaaatgagcctggggcaaagttctttaaagggaaacccgacctcctagagggcttcttcaactgtaaaatggggatgataataatagtgtttattgcatagaattgttttaagatcaattaacataaaatgcttagtatagtgccaaacacaatgtaagcatttaatatacattagctgctattaacatatttgctagtatcatagttttttgttttttttttcttgtctacttttcttctgtgagccaccacttttcggcagggttggtttgttcagtacacttcgccaaggtcggctttaaaaatcaaatctagattgtgaactatgaaaactgcggaattatcagtgctgtgtagctatctgacaagtgataaaatgtgtcattacgatttttacacatccccgtgccacagaatggcgtctccttctaatcgttccccccgacagatgatagtacatcccacactgctgctggaaaagatagtgcaaaagttgagcgcgccgagggctctcttttctcccggaaacaatttttccctagacccggaagcagttgttgtttcaagggaggtgggactgggcgggtcaggccgcagcggctgacggcaggggaggagccgggtccactgccgggtggaggggcaaggcgagtgtgtgtccttatcctagcaattggggcgcgggcctgtgagccagttggagttgcggcggcgggaacgattgggctgagcagaggacgacatgttgcttttcgtggaggtgagtgcattatgctagtctcgtcctgctcttaggagagcaggagtgtagaggcgccggccggtcccaccgccatgtgactttccgggccgtacacgccgcggaaccggcagataggctgacacagcacctgggccgagcaggcctgcagcttccctctgcgcgctcacaacactctaggaagctatgggaggtgaggcccgtagtggagaagaattgaaggagaaaaacggagggctgttctggtgtggcggtgaggttcagaggaaggggaaagtgtcccatatggacctcctaaaggaggcagcattggggggttggggggcggagtctgagggaggagagggtaatcaggtgggcgcgttccgggggccgagcgcggcctcgcggggcccctctgggagggaggcgagcaacatgtggggccacggatggagaaaggtgaaatgcggtaagtattttgaaaagaaaattgaaaagttcttttgagcaacttccaccaaattctgcccgggccccgtccctaggtctctggaacgttctgtgggtgaaagcgagttactttgaatcgaggagaagccagtagggtttggaagccttgaaaggcaccgctttgaccttttgtaaaagttactcaagcagcagctgcgtgatgaagggttggttctatgaaccgattaaaagccctttacaaggaaaattccaagaatgagggaaacttattccgggaaaagccgttttttgtaatgttatttgaacaatgagacacttttattacttaaactagaacgtctgctgttggcctattttagttttcaagatagagttggatacctgccttacagaaatacgaaatttaatttcccttaattctgtcctcttgtgtgcagtgagcgtcagctgactgcctggctaatgctttgagtagattccagatcatattgttcttacattgtgaaaacgtcaaaccagcaaagctgcaacttcgcaacttggcatttgttaactatgcccataagaagaatcttttcaatgagggaaggaatttacgggttgtataatgaatctaggagccggggccagcctatggcagatttttttttccgggttgtgggaaaatcttactccgtaatattccagcataaagtaaataaatgattttacggtttttttttctctttaaactaactgatattgtgtcgccgataagcttgatatctttaaattagttttttaaaagactgctacattagagtgtatctaacattcataataaacattcattggaacattccggggaaatcatgaaaagacttaaaattactgaactcattctgtttactgttttctgtcctcattgttgttttccttaggcagaataagaaatcagataagattttaagccagtgccagccagtttttttaaggaatgttatgctatgtaaataccacaggttttaagtgtgtgttttgctgggcagaagaaagattgtgaagtttatattgacaggaactccacaatatacttttgacttccaaattgattcctttggctttattaaaatgtaagttttaataacagctccatttattgtttaaactaggtcttctcctgtctctaaagcgatacttaatatgttttacagatgacaaaaccgagccccagaggttaaagtaactttacttagtaaaagtaaagtagtttaactgggatttagatccaggtcatgctgatgtcaaatcatggacgggatgttagcaattcaggcctgtccgactccccaggttagacaaattctatcgtatctctcgccaaactagtgtttaaaagttgtatctccattaatcattttctttgtgagtcactatgtcattcttcattttctcatatgagttttattgaaaattaactgtctttaaatatttggggctgaatatgtggtattaaaatcagtgaaaaacaacatgttggtcgtttggcgttttgttaactaatatttgatccctgtaacctcatgatagaggaattattctcagtgagagaaccaaagctcagaagttagatgtctaaggtcattcaagtgtaaataatgtgggggctaaagtctgaagtctgacttctagaacataaatttctggcttcaaaattatttttgtactttcccataagtcaaaggttcttaatctaggtttttggatagaattgaggaagtaagtacctaagcttggttgaggaaaaaaatttgcgtgtttattttctctagcttctaactgaaatctaaatggaaaagaagtgaaaattctttaaatgttaatggcagcaacagtgtatgtgaccttgtcaccaagacaaatcacttttttacatgtattacagcttttgcagttatcttgaaatatttatgctcattacttgctatatgtcaaaaatattgttaacgtattgctatattagacattttaaaatattttgataactgcgtttcaatataattggtttactttgtgatcctatatattttagaaatgtaaaaaaacggagaagagatccatagattaattggactactaaagaggtctgtgtcacagaagaggttaagaactgctttactaaaccaacttgcttgtggatcatctttggcagggttaatctgggatccctgggtcctctgcagttgtgttcaataccttttacttatgtgtatttttctggagagattccagcttaactatcccactagaatcagtaggatagataata

SEQ ID NO: 58002 - DNA, 2982 bp, Homo sapiens
tctttttaaaagctaaaactgaaacggaaacagagctcctggcagataggaccaggagccacagcgaaggaggtggcctgtgattaggtttttataaatgggcaggtattaatcagggaaaatggagtaaaggacacgatagacatacattgctaagtctagtattggaaaaagtaaggcctgggacccctaaaaacttgctcgagagtgaaaggtaaatgctatgtgtccacactactgtggtaaagccgacagtccataccatgagcccatttcgcgcagggaaattcgagtggtgggcttgggcccgtcgttctggtagcttcccagtagagggcgccgtaagcatatgcgtcttcagcctgactgggctggagaggcggtgcgtcctcctggccggggggcgggggccgtcgcgctcacgtgacctttgctcatggcggcggcggcggcggcggcggtgctggtggtgctcggcggccggagccggatcctgtagccgggtgtgggcccgtgtctgtccgtccctccttcggccccctctcttgtcttccggagtgtggctggcggagctgggatggcggaacgaggcctggagccgtcgccggccgcggtggcggcgctgccgcctgaagtgcgggcgcagctggcggagctggagctggagctctcggagggtaggagccgggccggggagagggcgcccggggccctgcggatcgcggcgacttgggagacaggtccccgccgcgcgctctggcggccgtgcggcgagggggacgagggtgtagagaacctggcctggcgctccacgaccgttttccctcctctcccaccccattaagtggtttcctgtggctttcattgttttcccatggaggggactaagtaagggcttgtggaaaggtcctcccgggcccacactgcttctgcgcttcctgccccccaaaacccgagacaaagctgcgccctcccgcttctgcccaggcgtctggcccaggtggggtgaggggtagggctgcgaggagggtggctgacagctttctcctttcctctccccttttcgtggagggctccacgccttgttccagcccccccttccccctttcaaaaagagacacatgggaaatccgcagcatcatttcttctctttcctttaacaatgcgcgatgcctccccagtgacaggagtgagacacaagcgggtgagccatttagggtcctaggaagataagaagcaatggcattaacccagagagacacacggtgctgcttttagaccacctttgtcataagaagtttttttttttcctggtgcctgttattcgggccgaattttccgcatctggtcaccttttggagtctttgatgaaggaaggagaggaggctaccgtttacttgcaaatcctggctggcattctttcttttgacaatggattgggacagggagggttcgatttattttcagaattaaaaaaaaaaaatgggataaatcaagccactgttattagagaactccttgtacaacaatgagagaaacacagtgctccgttgtgggcatgtgatcaggcttctggggcagttgtgatcagttctgtgtaaagttcctgtttttatcactggctgcccctgagacaaaagcagcattttctccaagcttgataccagtactttgattgtgtctccagagttgcatattcttactgagttccttgtggaaggccctcttcactagcatttttcaagtggatcaaaaactcttgattggaaaagaagaatgtgaccaactcccaggagcttattaaacattacttattgtttacttattaaggcattatggttccctcccctctgagaatcctttacaatgaaaaaccaaaaatagagttgaatgttataaatcctgttgggcactgaaggaaataattatttttaataacccttttaataacccaatgtgtaggaaagtgctgtttttacctgtacttaactatcaacatgttatttttcaattaatccaattttcaagttattcttcggccagtcccgggaatcactggtattagattagtttgtttctgtgaagtgtttaagaagataggaatcctctgggtttgtctgcccagttataccttaagttccccccgcttcgaaaatcgaggagctttttgcattaccatcaattctgtctctcaagataactcattcttctcctagactaaagcattgacattaaatctgtgttgacttgcattaaaatctgacttttaaaactgctatttgaaagtaacaaatcatctagctttgattagagagaggtttgcctggatgcttgcgtcagagggagattaaaaataggagttgattgctttcacacggagagggaaatcctggaagctccttattctgggtatatctgcttccagctgattgttgtttacatctctgggtgtttctagacatctctagaatgtctagaaacattctgaggaactatttctaggacccacactgattagctcacctctctctccttcagaaaggtgtgaaacttctacaaattgtgaatgccaaggcttaaacattttaaggacaagtgcatggtttgctttccaatgaaggattattttggttggcatctgacttggtttgaatttgtttcttatagatatactacacttcttgtatttcatttgttttagcaatggatgactggaaaaaatacaattgaaaaacttgggcctgcagtgtcagcatattggtcatctttcttgcttaaagtacaggggatggttggctggagaagtggatagacattaggaattcaagtgaagttaaaataatccaaaagtccccatatctgtgtagtatggtgttatttgtgatgcctgtagcatatttggagctaaggtttgttcgttttgcattttctctacagttactctgctctaacataagtactttgtctttttttgttttagat

SEQ ID NO: 58003 - DNA, 1672 bp, Homo sapiens
ttcttcctcagtaaaatgtttgttttttgagtgcagagattttactgtcttgttccctgctgtctctctagtgcctagaatagaagactcaatagacacttgttcagtgaacaaatggactttgcagggagaagattccaatggaattctttagatggtggcagctttaaagagtaaagaagtgtaggctctgtccccagggtctctgccaggaaggatggggacccctgtggaagctggtgagagctgcccctcaggggcctatgtgtttcctggcatttggtttttaatgtttgcttgtttgtttttcccttattttcctcactatataccctctgatttttacacttgacttttacagttgggtgatatgtgacaactttccgtttcttcagtctgcctgactactttgcttatccaattcatttggtatttattatgcaaatactttcagaatacacagctccaagcctgggacagtgcttgggtgagagctggagccacgccactgtgctccctgaacaggaggcagacacttctcatttttttgtgtactttgcacatgcattgattctctttttcctctgcctttttttttttttttttttttttttttgagacagagtttcactcttgttgcccaggctggagtgcaatggcgcgatctcggctcactgcaacctctgcctcccgggttcaagcgatttcctgcctcagcctcaccagtagctgagattacaggcctgtgccaccacgcttggctactttttgtatttttagtagagacagggtttcaccatgttggccaggttggtcccaaactcctggcctcaggtaatacgactaccccggtcccccaaagtgctgggattacaggcgtgagccactgcacccggccttttttcctctgtcttaaccaaatgtaatatccgtaggatctgatctaaagcataagttaattaggtgggtttttctgtagaccagacattgtaataaaaccaaaatcagttttgttttggtttaatgggtcctggttggaaaaaaactgaatatttcacatgcctggtttttcaacgtcttttcttggctacattccatctttggcaaaatgttggaaaaccatggaagtgaaataattagccatatggcaaatattggttttgttgaaccaagtcagacctttggtcagtttattctagtttatgcaaacagtgtggccaactaccaaggacgttcatgggctgtgcataacatgtccaactgtacacacagagtatttgtctcttaggtcctacccacgttatctcaggtctctttgactacctatatctaaggtactgttcaaacactaaattaattgtaattttgcacataggaaaataacaaaaatcttatttacttattatattgtgaacttcaggtttgtctttatggctgagagataaaacttgtgaaacatcttaataactaagattatccttggccgacagcactttgggaggccgaggcgggaggattgcttgaggccaggagttcaagatagtgagactctgtccctaggtggttatggtgatgtgcacctgtagtctcatctgctttggagttgaggctgcagtgaactatgatcgtgccactacactctaggctgggcgaaagagcaagaccacatctt

SEQ ID NO: 58004 - DNA, 4160 bp, Homo sapiens
ccacgcctggctaatttttttttgtatttttagtagagatggggtttcaccatgttagccaggatggtctcgatctcctgaccttgtgatccgcccacctcggcctcccagagtgctgggattataggtgtgagccgctgcacccagccaaggagagcatattgagtgagcagaggctaaacacagaactggaaagcaccaccatttaagggggaagctgaaaaaaagaacctggaaaagaggtcagaggggtatgagtgaccagagggagaagagcaaaacaacaaggagtattaagtgtctcttgttgcatagagtttgagactaggactgagaaaatgcaattgagattacaagcagaggtcattggtggtgacctttgcctaagctgttttagtagggtttagggacagggttggggcaaggaaggggcactgcagcctgttgaaagtggataaggaatgcaaagcagagaggaagtggaagtagaggcaggcggggtaccctgctgtttcaagcctggccgtgtgaggtggagagaaaggaagtagctaggatatatacacattcatctgttctttgtctctctcctcactagaaaataagttgcctgagggcaggaacttagttttattcactgctttatctccagagtaaaaaattgctcctggcctgtagtaggcactcaacaaatatttgatggccaaacaaatgaattatgttaagaaggtagagacttgagtgtgttcatttgttggtggaggggtaagaggtcttggggaggaggaattgaaagtctagagtagaaagatgtgatggaacgaggtctccctgagtcagcaaagcttgagaccctaagtgctgctggagtgatcattcaggatgccaggaatgactccttttctgctgaaacagaagggaagaaggaaaggatgggagcagaggcagatactcataggtgatggatgaggaagctgagggagttcttgcctagtggccttatgagtattctctgagttaaaaataagagtgttggccgggtgcggtggctcatgcctgtaatcccagcactttgggaggctgaggcaggcagatcatttaaggtcaggagttccagaccagtctggccagcatagtgaaaccgcgtgtctactaaaaatacaaaaattagccaggtgtggtggcatgcgcctgtaatcccagctacttgggagtctgaggtgggaggatcgcttgaatctgggaggtgaaggctgcagtgagccagatcgcaccacagcactccagcctgggcgacagagccagattctgtctcaaaaaacaaaaaacaaataaaaataagagtgtaatatatgtatccttggaacatgcattgtgaagacatacaaaaaaacccaccagcatttaagcagctgtgcttctgtggaaagtcactgtggtcagtgacatgaaaggtaggtgaggtgaggatgtgccagagaagatgagtaagagtaggtgagacaagaggtctctagtctcagctgggaatgtagggtgtggtttgacctgagagaagggagtgtgggtaaccccctttcctctagaaggagcagggcgctgtccttgggctctcagggaagtgggggaagaaagggcagtgtataagtcttactctttcctgtgtgagaaaaaacgcagagaaacttaagccttgagtgaattagagtaactctttgttagtgactcctctggccctcaccgggctggtttttcagtgatctatttctgattcatttgacaggaaactgctttcccaacttttacaagctgttatctaaaatggtttgtgtgcttaacagcaaaggtagtagtgagaaggaggatgtgacagagtcacagtgagtcataaagaacaagacatgaccatatttgtttacctcatcaggttttacatagaattaatttaaagaatattaaagtgtccattttgttttaattagcagttgtttagtaataagttctcatgctttggaattctctgttttcagtctcatcaaattcaagactacatatttctcatgacctttctggaagggagaggagagtagtaaggatgagtcttgtagtcttctagtcttcagttgaaattaaataacccaaccaagatgattgtttttcttttgctgtcagccttatcagccattactgcaggtcaacccctgacaagttgtgtagggtgagggtagcgtcgaactagagttttggctgttgctgttttgcattttgtgtgtgtttgcatgtgttctctgtaaagtgagcagaggatccttcagaaagggagcagattccaagggtaagaagggatttcacctacaggaagttgtggattctaaccattttttaactgccctatcaaggaagacaacttttttccttttttttttttgagacaggatcttgctctgttgcctaggctggagtgccgtggtgtgatcacagctcactgcaacctctacctcttgggctcaagcaatcctcccgcctcagcctcccaagtgggcaccatgctggctaatttttaaatttttttagacagagattctcactactttgcctaggctggtcttgaactcctgggctcaagtgatctgcctgcctttcagccacccaaagtgctgggattataggagtgagccactgagccgggcctaactttatattataaaaagtacctgttactttttggagatgggagaaacttttttcccccctgtgacagaaggtgaaatcagagatttgaggtatgatagttggaacttggtattatcataattagaattcatcaatacttagaattcatttttttctaagccatctccttactctaactcattccccatgattctaaattttttagtcattagtcaactagttagaactccaattaggcatgtattctggggaataaaatatgactttatcagcattttggggaactcagggacaagagattcatctggtcaagttggcatcaacaggctgaggactcatttctcattttcatggagaaccaagttttagccaaatccttattttctgggaatttatattatgtatgtgtgtctaaaaaaacactttcaagacttttgaaacccaatgactggactctttttacacattctcatttcatttttttttttttttttttttgagacggagtctcactgtgtcgcccagactggagtgtagtagcgcaatctcggttcactgcaacctccacctcccaggttcaagtgattcttctgcctcagcctcctgagtagctgggattacaggcatgagccaccacgcccggctaatttttgtacagatggggtttcgccatgttggtcaggctggtcttgaactcctgacctcagctgatccacccacctcggcctcccaaagtgctgggattacaggcgtgagccaccatgcccggcctcagttggtttttagagaaatcaactggacagcattctgagattaggagaatgtcagagacagtgaggtaacatggaaaagattgtgggtttgggtttcacttctgtttataagctttgtgaccttgggcaagtcatttaacctctcctatcctttgggagatgaagtggctagatgagagaatctagttcttcctagctcttagttcctgagatgacctatgattagatctgtttatcaaagtatatgaaaaggagatcctattttaaattcactggaacagggcctggcgtgatagctcacttctataatctcaggactttgggaggctgaggtgggtgggtcatttgagctcgggagtttgagaccagcttgggcaagatggtgaagccctgtctctacaaaacaatattaaaaaattagccgggtgtgatggtgcatgcctgtagtcccagctacccgggatgctaaggtgggagactcacctgagcccaggaggtcaaggctgcagtgagcagtgattatgccacggcactccagcctgtgagacagagtgtgagcctatctcaaaaagaagaaaaaataaattaactgggcagttattttttaaagaaaatccaggccaggcctggtagcttatagctgtaatcctagcactttgggaggccaaggcaggacgattgcttgagcccagg

SEQ ID NO: 58005 - DNA, 3056 bp, Homo sapiens
aggacaggagttcgagaccaacttgggcaatgtagtgagaccccatctttacaaaaaatacaaaaattagccagggatggttgtgcatgcctgtagttctagctacttgggaggctgcaatgggaggattgtttgagcctagtagtccaaggctgctgtgggctaggacagcactcctgcactccagcctgggcaaacagagcaagaccctgccttttaaagaataaaaataaataaaatgtgtatatatttttatacataggaaaaacgcattgattttagtggcaatttcatctagaattgggtttagaggggttagagtaaggaacttttacttcttattaggtatacttccaaaaaaagtgataattatgagtgatactttttttgtgtatgcttttctgatatttttcaaataaaatgatcttaagaaaaaactaaaaattaatggagagcaggaaaagggagataaggatccagctagctactttaacttttaacaacgatgtcctttaaaaatgtttgtatttgtatgcatactcatgtatgttgtgtatatgtgtatatatacacagacacacaaaatacagagtaactgcagtctgacattcaattaagctacagaatgcatggtattggcatacatttttattttatttatttattttttaattaatttttttgttttttgagactgagtcttgctctgttgcccaggctggagtgcaatggcacggtctcggctcactgcaacctctgcctcccgggttcaagggattctcctgcctcagcctcccaagtagctgggactacaggtacctgccattgcgactggctaatttttatatttttagtagagatggggtttcggcatgttggccaggctggtcttgaactcctgacctcaggtaattccccgccttggcctcccaaagttctgggattacaggcatgagccactgctcctggccttggcctgcacttttaaagtgtaagatactaagaggtgtttttctgcacatcacaaggtacagttcttaaattctttaagaagtgacaggatttgttcagaaaatgtgcagttttctagtgttgcagtaatgtgtgttcaggtttccttcacacaggttacagcttattcataaccccgagttaaagtttaaattttatgtaattagccacctatgtgacctttgaaactaagtgaggaaactattccggagtagtgaaactttgagtacagctgcttcggttttggactacaaattggaattcttctattgagcaagagtcagggacgaaagtgggggctggtttaaaaaaaaaaaaaaagggctgggcgcggtggctcatgcctgtaatcccagcactttgggaggccgaggtgggtggatcacaaggtcaagagatcaagaccatcctggccaatatggtgaaaccccgtctctactaaaaatacaaaaattagagattgagaccatcctgactaacacggtgaaaccctgtctctactaaaaatacgaaaaataagcccggcatggtggcgggtgcctgtagtcccagctacacgggaggctgaggcaggagaatggcgtgaacctgggaggtggagcttgcagtgagctgagaccgcgccactgcactccagctgggtgacagagcaagactcttgtctcaaaaaaaataataataaaaattagccaggtgtggtggcgtgtgcctatagtcccagctacttgggaggctgaggcaggaaaatcacttgaacctgggaggcagaggttgcagtgagctgagatagtgccactgcactccagcctggtgaaagagcaagactccatcttaaaaaaaaaaaaaaaaaaaaaaaagccatgtggttgttcatgatttctgcattttttgtttaatatgacattggtagcctgtttaacttcattttatcatggccacttataaatagatagcttaagtctgtgtgcacaaaattatgtttcattctgttaaattttttgtttttttcttttttagatagagatttaagttccttatataactaaggaaaagtcctattccaaatttaacaatcaaggtacctagttgtatgaaatttggaaattttcttaaccctctcttctgtgttattggcactttttgattttctaggagctctggggtttgcaagttaaatctgagccttgagtattcctgctttaaccagcgggatggcagccattttgccctgtgttagtgccttgtccagtgaaggaaaatgaaacgcctagaaactgtgaattttgctttttggacctgattagttttgtatgtaatggataacgttaagtttttaaaatttccatgtgatttcttgggttttaaattcagggcttactaacagtgtactcgtggggccagctggaattttgaaaattgaagcttcctgcattttattggccagtttcttcattgattttttttttcattcatctttttcatgaggctaggacattcacaactgaattgagaaattgaagtactcagaatctaactatgaatgtttgagaggcacccagtctaaaagaacgattagactctaagatattcataaccattagtttattaatagctctataaaagttttccatgttctagggtcctgaggggaatggtctagataacctaacagacttttccatccctcatgattcattttactctattgaaaattatcttaaacagaaggaaacgaataggcctggtagaaccagattcgaaacagtgttgcttcagtgggaagggagtggtttcttagtcagtgcttgtggaggctgttactccagaggcagcccgcttctctgcagttagtaaatactactgtagcccagtggcagatactgcggacataaatcttaaagctagtaacatgttgttcttctaggaattccattcagctacagatttaaggtttatcagtagtatttccagaaagatggtccgacacagtggctcacgtttataatcccagcactttgggaggccgaggtgggtgaattgcttga

SEQ ID NO: 58006 - DNA, 1045 bp, Homo sapiens
ctgcctcagcctcccaggtagctgggattacaggcattcgccaccacacccagcaaatttttgtatttttagtagagacagggtttctccatgttggtcaggctggtcttgaactcctgacctcaggtgattcacctacatcggcctcccatagtgctgtgattacaggcatgagtcaccgcgcccggtgcatttttttgtatttttaatgaagacaggatttcaccatgttggccaggctggtcttgaattcctgacctcaaatgatctgcctgcctccgcttcccaaagtgctgggattacagatttgagccacctggtcggtattgtgagactttctgaatcactgagccttgattctttatctataaaatggagataataagctcttcctactttataggacttgaagaagcaaatgggagagggtgagtgaaagtgggaagctctgaaatgatttttaatttgtgtgccccacacaccttgccttccatagatggtccaggctgtggtctggttgctgctttcctgtgtgtggtgcatggacacaggcaggagtgagtagattcccagaggacctactatggcttggatgatctctccactttggggcgggcaccatcccctccatgtcttcttagattgttagatataaagcatcggctgtacattcttactttacacactaatgttctcacaacagtggcagggccttcctaggcagaggacatctacaaagagtggatgatggtggctgccacctgctgaactgtggctaatgggctgctgggtggggggatattgcctgagggatctgctggagcccatggcaggcaaaagccagcaaaaatttgttactgttattgtgactacatctgtatgcatgaaccacttagctctagaggaattttggttacataagcttagtggtggcttagtaaatggattctgcagttcttgttgtttctcccagattgaacttgcctttctgccatatgattggcactactgattgttgaatcatttcttccagaacaaggaaaaa

SEQ ID NO: 58007 - DNA, 352 bp, Homo sapiens
aaactttgttgagtacatgccctcctcccttttaaaattacatcttgtaggagattctggcatttctcatttatatattgtgaagttaaaatatatttcctagaagaaaaatatttcacaataaggggaactgaaagcatttgctagggagagagttaagggttgctaaacttatggcatgctggattggtgtgtgctgagaatgctttcgcaacaacttgattcagaaaacatttactgaatgcctttggcaaaaggctcctgctagatgctttgagggataagaaaatgaacaaaacacaggctcagttttgttgaagggccttccaggttactacattgactgtttctg

SEQ ID NO: 58008 - DNA, 568 bp, Homo sapiens
tcattccaaaaaggcatacaactcatatcaggaccctttgatttgtaatttttttctgagattttaatttaatttaatctttttgatggtctcgcccaggctggtctccaactcttgcgttcaagcaatcgtcccacttcagcctcttgagtagctgggactacaggctcataccacaatgcctggcttctttttctgtttttttttttttcctcttgagacaaggtctcattctgtcacctgggctaaagttcagtggcactatcttggctcactgtagctttgaccttctgggctgaaatgattctgtcacctcagcctcctgaatagctaggacaagtgtgtgtcatcacaccctgctaatttttgtattttttgtagagatgaggtctcactatgttgcccgcagtggtagtctagaactcctggactcaagcaatctgcctgcctctgcctcccaaagtgctgggactacaggcatgggccatcatgcttggcttcttttttttttttttgaggttttgatggttgttggtggagtgggtggagaggggaactaacatttatt

SEQ ID NO: 58009 - DNA, 917 bp, Homo sapiens
ctcttactcattcttcagtgtcctaaataatctgttttcttccttcactgttcctttaaaactgttcttaactgggctactgatgatctacctgccaaatccagtagttattttttgatccttattttatatttgtgacagtgtgcactcatcttctcctctctgcctccattttcctcattctctcctggtctccccactgtgtgtcatcatcgtctccatttcctctgcctgttctttaaatgttagtttaccccaggattccttttctggttgccttctttcatgctgcattccttctgggtgatatcattcacacccaaggcttcagctaccacctcctacgcttgatggttctaaaatctatatatccattctagagtttctctctcctgttgcctgctggatatcctcccttgtttttgacttgccatatgtaacagtgccagacaaatggcattcatccaacgttgagctaaagcagtcttagagcccatgagatccttattcctacagatgaagagactgaggcccagagacgtatagtggcttgcccagtatcagataaatagtttgtaacaaaatggggaggaaaacctaagtctctggacactgggacttgaacacaagtttataaacctatgccaaacacagaatggtgatgtttactgcctcattggaaaaacccttttccactttggcctaagcgacctgcttttgcgatccccatgctgtggcagtggcagtattctccttacttgtgtttttccctgtccatctttggtttccagagcagtatgaattggctaccaacaaaattcttcatctctttaaaagctttcactttttttgcgcctgccaaaggagatacttagattttgatcactgttaattttatctagactattgataaagaa

SEQ ID NO: 58010 - DNA, 1265 bp, Homo sapiens
caaaaattagctgggcgtggtggcgtgtacctgtagtcccagctacttgggaggctgagacaggaaaatggcttgaacctgggaggcagaggttgcagtgagctgagattgcgccactgcactccagcctgggcgacagagcgacactccatctcaaaaaaaacaggtcaacttacataggctaccttaaatagctgaggtaggtcatagaaacaaatcaacatttgaaaaacccctagaaaggagagataactctgggaatctcaaccttgaagtttaaaaccttccttctttctagggcattgtcacattgtcgttaaagtgattccatttaggacctgcagtttcttgattcagagtttaaatttaaaaaagaggatctcattggtctagctcttataaggggtatatttactttacagagcggtatggaaggatagtttgtttgtggattaggcccattcctagacaaaaggaaactattttttttgtgacttaggaagctacctcagctgttatctacctcagtaagattttgtaagagttttttttttttttagcgggatacaaaatactgtgtacagtatgattcaattttgtggaactatagagtgacctttggagtgggggtagaaaatgaagagttttgtttggatgtgttaattttgagattcctattagacattcaagtagagagctgaaattttttgtgcccaaagtggcaaacaattaacatctgcccttatgtttttctagatcaaaataaatccttctcttcctgtggcatagaactgaggggtctcaaccaagttttctttcagacttgaaagaaattttctttcagttaagaaaatcctaagcttcttttcttgaaaaataatgagtgttctccaggcacctgcacagcgctcattccatttgaggcagaatttcctgcttggcacagatgcatgttagactcagtattctgtccccacccacctccccacatctctgtcaactctttgtctggtgtgttaaggagtcacacatcattctggacttcattttcctcctccgtaaaattatccctggcttcttttatttttgtttttgatttttatttctaattggtcttaatcaaattataaataaaaatcatctgaacgtcccctttacctttttttttttttttaaacaattgaggcagtgatagttcagctcacagtggtaaacactttcaagagccggaagctaataaatgcaaatgtttgctttttcagata

SEQ ID NO: 58011 - DNA, 2702 bp, Homo sapiens
gagtgcaacggtgcgatctcggctcaccgcaacctccgcctcccgggttcaagcgattctcctgcctcagcctcccaagtagcttggattacaggcattcgccaccacacccggctacttttgtattttttagtagagacggggtttctccatgttggtcaggctggtttcgaactcccgatctcaggtgatccgccctcctgggcctcccaaagtgctgggattacaggcatgagccaccgcgcccggccacatcgttatgtctcattgtaaatccgtttctgtagaaaatccttccacatgggttaaaggacacaactcattgttactttatgggattaagaaaaatctgagtaaggccgggcacggtggctcacgcctgtaatcccagaactttgagaggccgaggcggaggatcacttgagcccaggagttcaagaccagcctgagcaacatagagtcctcatctcttcaagccgagcgtggtagcgcgcgcctgtggtcccagctgccccataggctgaggttggagaatcgcttgaatcccggggttggaggctgcagtgagtcgagatcgaaccactgcactacagcctgggccacagacccccgtctcaatctcggaaaaaaaaaagagactccatctaaaaaaaaaaaaaaaaaaaaaaagctgaggaagtcaaagccttcactcttcatttctccttccaagaggacagggccggcgtcggtcaaggtcaattggcaggtgagttgacagcgccgccactaatcgatgaaaacgccccccgcgagcacccagctgctcatggcctccggaagcggacgtagggcgggtggggtacagctcctaaggagaaacggaaccgcaggcaccgtccctctcccgctgcagcctgaggaacgcgttccgaggaacccctagccacaagtcaggaccgcgtacaagatggcggcgcgtcacgtgggcagcgcggtgacgcaggacggcggcccgcgcggaggcagcgccatagcctaccccaaacgcacactagtgctcagttttgcccccctcccctcccccgcccccgcccccgcccccaggcttgtgtagatcatgccgccagtagcggccctgactgccgaggaaacggtagcttaggacagttggctgttaagtgacactgattctccccgccccgcctgacccccgagaaggaggcttgtcccccgctgcgtgagggggtggggaagtgggtagtgaattcggatctacctgggaggggggagtggaagttcccgccccggagagcggcgaggcggcagccacaggtaagtggggggcggggagggacgtgccccgtggcccgggcggggaaggacgcgggaacgtggcgccggcggggacgcagcgcgggtcgcgcgcctggtgggggtcgcgcgcggtggtggcggtgggggaggggcgcagcggcagggggaggggccgcccgcgcttccggcctccgcgcctcggtgcagagctgcgctgcgcccttccagtcgtgcgtctcctcctttccctcgcccccaaataaaagtaaagcccgaaaccgcccgccgcggggtggctttcgcctcagaagccgccctttgcagtcgcaggcgctagctctccgtgggaggtctcgaggttgggcccggagccgggcggagggcggcgcggatatggcctcggcgcggtgtccgccgagcggagcccgggtctggttaaccccgcgacagggtcctcgaagcgcgtcggcgctggcgaccctgagggaagaggcgcgccccttaccctcctggagcttgcagtctagcgggcaaccgacgcacgggcattgcgcacgccccagacagtcctggagagatgcgcctggcagcggagacagagtggggacagtaggcggctttacccctggctaggaatgacacaagggcgtctgtaccctttgggatgggcgacccagccgagggtgactttctctttgatcttgtatgtcaaaaaacgaagcctggcatttctcactttgatcgacgccgtgcagctggcggctgaatcgctttgaaatgattgcaatgtgaaataatgtctggttgtggcgctagtgttttgaagagattgggcaactggtagtctttgagaacctttagggttcagaagctcggcgtggatctggcaggcatctttgtcaaactggcctcacctgtgatgagttcgtaggcatttatgtctcagaatgcattttaacctgaggtttttgttaacagaaatgcgttcttctaaaatgctcttttttcttggagtttatcatatgcagttatctccgtgtcttaattagaatcaatactgttgccctaaagtcgaatgtattagctctttaatacttgccgttatcttttagggttaggtttggtctgtgagctatctgtccattcctacccgatcaccagcaggtggcagtcccttctgactttaaatatagggtgtgctatctttgccagtttttgttttgttttgtttgtttgtttgtttgtttttaaatagagatggtgtcagaggcgtgtgaactagaacaactccatcttaaacaggagctgggtaaaatgaggctgaaacctactgggctgcattcccagacagttaaggcattctaagtcacaggatgagacaagtcagcacaaaatacaggtcatga

SEQ ID NO: 58012 - DNA, 2270 bp, Homo sapiens
gttcttagcaggaggctagactagagaagaatctacttccaaggtcacttagtttgttggcagaattcttttcactgtggctgtaggactgagtgcttcagttttttggttggttcttggctggaggctgcccatagctcctaaaggccaccagtaactccctgccacgtgatcctctccgtatgcagttcacagcatagcagcctgcttcaagtccagcaggagagtgagagcaagtctgctagcaagacagtcttatacataatataatcaaaggaatgacatcccatttccttgtgataaaacatgacatcccatcatctttgcttaataaggttggttagaagcaagtcacaagtccctcccactctcaaggggagaggattagacaaagtcccaaacaccaggagctgcagatcatgggggccaccctaaaatctgttgggcagaccatccaagtagatttatccagtaggcagctagatatatgagtctggggtccaggagagaggtccagactagaaatctaaatttaggagttgtggctatataggtggtatttataattatgggatgatttccagactcccccaagatgcagaaagctggaaagaatgttactcttaccctgaaacaagaataagttgtatgttctataaaataataaactcatagaggtggggtgtgggcatggctcacctgtggcagagcacagaaaataagcagggctgcgtactagcaggaaaattaatgaattgctaaagtccaagtgtaggcaagcgtgagcgtatagaatccttgggagctgcagacacaaagacagttcataccctcttgtaggtttttctccaaggacctccagcagttgcttaggagaaaaatggggctggggacacaagggagaccagagaatgccttggtaggtggtacaggcccacttggacctttttttcctttggaaaaaaaggctttaagccgctgggaaaaaggaaataaacccagttttccattgtgtctgggaaaagtaaaaagaaaaagaaaacccacaaaccctgagggaacggcaggaaactgttaagggcttagactattagagtttttctgccactgggagaaagccccaacccctgtaacccagggacatagggcctacctgagactgagactgggccaggacaacaaagaacctccctgttggtgctgtcaagtcaagcaacagcaatctacccctgggggagggacaagagtatggaaagagcctctttggggcagatgcagagatgaagcctaaggctgagtgtgtggcaagaacaatgagaaaaaccctctgacataccagccccaccctaagcagaaagtcatactagaggaatttgaagctggtagtacacttaaggtaatccaaacaacaacaaaatccaaacccagctcagttcctgaatagatgactcaaccccttccctacgcacacacacaccctagtgaagaggtgtactctcttgttttcccatttctgaagataaatactatttactttagtctctagtgtcttacccatgatgtctgtcattcaggcaaaaattataaaacacataccaaaagcacacaaagaagcaactcactgtcaaaaaccaaaacaataaacagaaccagactcaggataacccagctgttggaactatcagagagtgaatttcaaataagaatgaataatatgttaaaggctccagtgggaaaggtagaaaacatgcacagacagctggggaatttcagcagagggttagaaactatatgaaaaagtcaaatggaaatgttagaaataaaaatggtgtggtggctcacgcctgtaatcccagcaatttaggaggccgaggcagacagattgcttgagctcaagagttcaagaccagcctgggcaacatggcaagcctccatttctactaaaaatacaaaagaaaaaaaaaaagccaggcatggtggtgcacaccctgtggtcccagctactcaggaggctgaagtgggaggattgcttgagcccagtgggcagaggttgcagtgagccaacatcgcaccactgcactccagcctaggtgtcagagtgaggccttgtctaaaaaaaaaaaatggtgacacaggtgaagtatatgtttgggtttattagtagacttgacacagctaagaaaagaatcagtgaacttgaagataggtcagtagaaattacccacaacgaaaacagagaacaaaggaaagggcagggagaaaaatagagc

SEQ ID NO: 58013 - DNA, 8006 bp, Homo sapiens
tctcaactgggctttgtgacccaggtattgtcctttgctaagagcctcagaatgctgttttgttttcacaattctgaaaaacagtttcaggaacaacattcaggctatttccctaaacaaaaacaaaagataagtgcaaaagaaaaaaagaaaagagtgtgtcaccagaaggataatgaggttgtctgatttgtaaaaggaaatatctatagctggagataaatggcaaagttgtccagccaggtaggttcccaaaagtattttaattttcttaatgattatgtctggggttactttggtacttttcttacaagcaaactttgtggccataggcctctccattttaaaaagaataattaaattctctacaaaattactttcattctcctttgctgagggctttagaatcttccagtcctgtggagttgctcagtttcttccctggatcctgttttcaaaaacagacagaagggcaacccgctcgggtccccttccacactgtggaagctttgttctttcgctcttcacaataaatcttgctgctgctcatttaaaaaaaaaaaaaaggaaaggaaacaggccacagacagaaaacaggccactgattgcctcaggattaggaatgcagaagggaggatcacaatggagcaagagtaatcttttaggggtgatggatatgttcatttatcttggctgaagtgatgggttcacaggtatatagatatgtcaaaacttatcaaactgtacacattaaatatgtaaagtttattatatgtcaattccacctaaaaaaatctgttaaaaatggaatagatacaatatttataaaatacatgcaggttataacaaatcatgaaacaacagaacactccctgtatccatcacccagttttttaaagtaaatgtttactatttttaaaaaattatttttttctgtgttccctagccaccctaaagctcaggcctttttctttttcttctttcttttttttttttttttttttaaagagatagagtctcactatgttgcccagacaggatttgaattcctgggctcaaggtatgcttctgtcttagctcctcagtagctgagaccatgggcacccaccactgtgcccagattcgggctttcttgtaaaaagcggatggatgcttgaaactattttctgaatccctttggctcccaaatgtgaatattctgggaaatatttttatccaaattagctgagtaatcgagtagttaggcacattttgaagactgaggcttgtcctttaaaagaagggcagcccacaaactgacttccttgagccaaaaattgttttaaaaggggaagtacagcccaaaacagtgattttaaaatatcaacaaaaagagtcaaattctgtaaaatatttaaagagatttattctgagccaaatatgagtgaccatgtcctgtgacacagccctcgggaaatcctgagaacatgtgcccaaggtggtcagggtacagcttggttttctacattttagggagacatgaggcttcaatcaaatacatttaagaaatacattggttcagtccagaaaggcaggacaacccgacgcgaggcagggagcttccaggttataggtacgttttaaatttttctggttgacaattggttgagtttatctaaagacctgggatcaatagaaaggaaatgtctgggttgcaataagagttgtggagactgaagttttattatgcagatgaagcctccaagtagcaggcttcagagagaatagattgtaaatgtacttaaggtctgcgttgatgtgaatgccggcttgaggtataatgaggcatatctgacccccacttcccctcatggcctgaaacaatctctcaagttaaattttaaaagcgccctggccaaggagaaagtccattcagatggttagaggccttagaacattatttttggtttacaaaaacgttgagttgtgaacactgagagcctctgcccagaatgtaaaagagagaattcttgctgactgtggccgggcatgcatgtcctttcacttcctttttttttttttaaaaaaaaaaaaaaaaaaaaaaaaaacagggtttgggcgggggaagtaagggggatgtgttatgataaaggggccttggcagcactcttctggtgtggtttgaccaggctccacccacgaattctgttttcttttagaggtcactggagagcccggtggggtgtaagtacactgcgcttataaaactctagcaggaagctagcagctgtctccaaacccagagaaggggaaacaggaatcgattaggaataaaggattataatccactttccttctgaggaaaagctgggaaccttctcattttgccttatgaaaactaagctgaatcgactgctgccaaacatctattaggcaaaattggcctcttgcccatgatttgactttccagcacagccagttctttttctcctctgcagctgattggctctggagtgtggccagaagcctctctcctgcaattaaaggagtcgggtctctaactgttgatctgtttttttcccttctgagcaatggagcttaccatctttatcctgagactggccatttacatcctgacatttcccttgtacctgctgaactttctgggcttgtggagctggatatgcaaaaaatggttcccctacttcttggtgaggttcactgtgatatacaacgaacagatggcaagcaagaagcgggagctcttcagtaacctgcaggagtttgcgggcccctccgggaaactctccctgctggaagtgggctgtggcacgggggccaacttcaagttctacccacctgggtgcagggtgacctgtattgaccccaaccccaactttgagaagtttttgatcaagagcattgcagagaaccgacacctgcagtttgagcgctttgtggtagctgccggggagaacatgcaccaggtggctgatggctctgtggatgtggtggtctgcaccctggtgctgtgctctgtgaagaaccaggagcggattctccgcgaggtgtgcagagtgctgagaccggtgagtgaaagggtgtgaggaggactagttagtagcagctattatcatagagggcaggcctgtcaatttcaggtggctgaaacattttaacataaaaagtaaactactagaaaatactgtagaattttttaaaattttagcgtgggagagaagctataaagagaaagattgataaatctgaatataaaaacttaaaactgctataaagaaaaaacctcctggccgggcacagtggttcacgtctgtaatcccagcattttgggaggccaaggcaggcagatcgcttgaggtcaggagttcgagaccagactgaccaatatggtgaaaccccatctctattaaaaatacaaaaattagccaggcatggtggcaggtgcctgtaggcaggagaatcgcttgaacctggtggggcagaggttaaagtgagccaagattgcaccacagcactccagcctaggcaacagagtgaaactccatctcaaaaaaaaaaaaaaaaaaaaaaagaaagaaagaaaaaaaagaataagaaaaaaaaactccccaaaacaaagttaaactacaaaacaagcttggaaaaaatatttgccagggatgatagacaaagggttaacttccctcatgttaaaagacattacatgtcaataagatcaatatttttcaataagaaaaacaaaagggaaaatgggcaaataacaggaacagaaatgtaaaccaattataggacaaaagtgctcaaacttaaagagttaattaaaggagatactaattttacctattatactgttagggacttcttttaaggtcagtatagggttggggtgggtttaggggactggacaccaccatacacattagaagaggtaccctctttgggtggtatctgataatatcaaaatttaaaccacacatactcttttatccacatgcaaaaacttgtccatacacaagaatattaagtagaatttgtaattgcacaaactggaaataactgaaatgtctatcaataggatgctatgtaagtgagttgtcatattgtataaaggaacactgtgcagctgtcagaaagaacaagaagagttatctgtgctgatacttaaaaatccccaagggataatgtttaatgaaaacaaaaagcaatcaagccacagaatgttaggtagagcgtaggcccaccacatgcccattgtgtgaggcagggagaggagatacatatatgtgtataagttaatgggaatgacagacaagtaactattaacagtggttgcctttggggaatgggattggattcagggaaagaattacttttcattttaaacctttccgtaaagtctgtaattctttatacctgtatgtagttttcacatattacccttattatttttagctagtttaaaatcgttttatattctgaacaaagttgaagatatggatatcttaacatttgaatttactcttctgggggaaaggcatgttttgtaatccccagttttcattttttgttgagacagggtttccctctgtcacccaggctggagtgcagtggcatgatcacagctcactgcagccttgacctgctggactcaagcaatctttccgtctcagcctccccaccctcccagcagctgggactacaggcatgcaccaccacacccagctagtttttgtatttttgtagagatgaggtttcgccatgttgcccaggctggtctcaaactcctgggctcaagtggtctgcccactttggcctctcaaagtgttgggattacaggtgtgagccaccatgcccaaccatcagttttattttctaatagaggaagttcctcaggaagaaaagaacttggagatagggtttagggaaaatcatacaatcctgtcttggctcaatatcagagtagtaaataaaaaaggactgattcttatacccaaatgctgggttcttatatgctaagactgggcaccaactggcacattagtagatgttttgcttacagtgttactaatctcccaacaccgctgcaaggcaggtaattattatctcagttttccagtgccaaaaatcaattgaactcttaaagttatcacattcgtgatagtcttccttagctcctgccaagcacccactctctgctggatataacaagggaactttattacattttcatttaaccctgtcaacagtcctctaaagtacatatcttcatgttaggacaaagaaacagactcagagagattaaggaatttgcccaaagttacacagctagtagacatggctctctttaatgcaaatgcaaatattccttttttttgaaacagagtcttgctctgtcgcccaggctggtgtacagtggcatgatcttggctaactgcagcctccacctcccaggttcagtgactctccttgcctcagcctcccgagtagctgggtttacaggcacatgctaccacgcctggctaacttttatatttttagtagggatggggtttcaccatgttggccgggctggtgtccaacttctggcctcaagtgatccacccaccttggcctcccaaagtggtgggattacaggtgtgagccaccgcgcccagccaaatgcaaatgcaaatattcttaccactgtaccacagtgcttgttattggggttttcatctttctgatttcaacattgctatcactcttgctggctcttcttcctctacccatctcctaccactggggttcctttcttggtgacacaggatttttgctccttagctcagctaggtccaggttcttgtctcacattcaggaagaaataggcacgtgaacatggaagagtgagtggagtagaatttatcaagcgaaacagaaagctctcagcaaaaagaggggtcctgaaaacaggttgctggttgcccccttcgcaactgaaaagctgatggagctggattccctgtttgtaaaggcatgaattcctggtggctccaccccattcccccagcgtgcatgtggggccttagtgggctgcaggcatgtttaggcaagcccctgtgcaagttcccttatctgcacaaaacatctcatgtaaccatttgtgggactggtcagaagttcttccgggacccttccctactgtctgcctaaagcaagctggctaactcctttcattggttcatttcacttatatacactccccagcaatctcatatacctccacagttctcaaataccacatatatacagatgtttccaaatctaaacatctatcccaggtctctcttctgaccccaaaccttcatatccagccgtctactcaacagtctcctggattgctcagaggcacctcttaacatatgtaaaccagagggcaacactgacctccccaaacctgcctctcctcctttatgctgccctatcctatgaagattttttttaaaatcagggccgggcacggtagctcacgcctgtaatcccagcactttgggaggcctagacaggaggatcacttgagctcaggagttcgagaccagcctgggcaatgcggcgaaactctgtctctataaaaaaaaaaattagctgggtgtagtggtgtgcacctgttgtcccagctacttggggggctgaggcagtaggattgcttgagcccaggaggcagaggttgcagtgagctgagactgtgccactgcattccatcctgggtgacagagccaggccctgtctcaagaaataataaatgaataaataaatcaggaaattccaatttttctattcgtaacataggtcttacactgacccatataatttggggaaactccatcactaaactgaattctctctctaaactctgcctgaggagccaagactaggataactagaggaggccaagaagagtggtgcagttaccacaattttgtgaggtgactgtctggtcccttgctccttactcccctcagaggtagatatgtagaaaacttctgaagatgtccccacacataacatgtaataacatctattgtgcctgtacttgatcaacatttataaaactcctcaatgaaagcagcagttgctaattcctacaaagagtaatttacatttagcatccactgactgaataaaatacctaatgacaaaatgttaccttgaattcagtaatgattttagatgaatcagaattttcattaatcatatcacgtacatatttgtgaaaatggcacaaaaatttaaaacatggttattcagtctcaagggtgtgcttagtgtggagtgaccctcctgctcagaactctacggttctctcacaggtttgcaaggcagtgccagagaacaattttcaaaaaataaattaaaaaagcagaaatgaaaaaatccttgaaatgtttttttttttctttctttctcagggaggggctttctatttcatggagcatgtggcagctgagtgttcgacttggaattacttctggcaacaagtcctggatcctgcctggcaccttctgtttgatgggtgcaacctgaccagagagagctggaaggccctggagcgggccagcttctctaagctgaagctgcagcacatccaggccccactgtcctgggagttggtgcgccctcatatctatggatatgctgtgaaatagtgtgagctggcagttaagagctgaatggctcaaagaatttaaagcttcagttttacatttaaaatgctaagtgggagaagagaaaccttttttttggggggcggtttttttggtttgttgttggttttttttttttttttggcgggaagaaagagttttgctcttgttgcccaggctggagtgcaatgacgtgatctccgctcactgcaacctccacctcgcgggtttaagcgattcttctgcctcagcctccctagtagctgggattacaggtgcccaccaccatgcccagctaatttgtatttttagttgagacagggtttc

SEQ ID NO: 58014 - DNA, 915 bp, Homo sapiens
cccgggttcaagtgattcacctgcctcagcctcctgagtagctggtattacaggcatgcgtcaccacgccggctaattttgtacttttagtagagatggtgtttccccacgttggtcagtctggtctcaaattcctgacctcaggtgatctgcctgcctcggcctcccaaagtgctgtgattacagacgtcagccaccatgcctggcctgaaaccttttttaggtaaagttgaattccatccttaaaagtttctgttatatcctatttagccattttctattgtctcccaaagaattcacatcaaaaaaacagctttgaactcccccttcaaaggaaacagtcgactttcataattagcatctaccattatccccaaatcttattttattcattgacttgaaattttttccaattgcttttttttttttttttttaaggttaagagcagaggtttactaggccaaagaaagagaatagctctctgttgcagagaggggtcctggagaaatgggttaccccagttgtcttatttaaatggttacccatcagattttaattttatcttctctttgagagcttggtaataagaagcacttaaatcactccaaagaagactttaaaaagggagcagtgaaaaggtcttaataatttattgattgaattaagaaatactagctaattaagaatctgagtctaaacagcacagattttttctttctgcttttaaattgtgttttaaaaaaagagacagggggctgggcgtggtggctcacgcctgtaatcctagcactttgggaggccgaggcgggtggatcacgaggtaggagttaaagaccagcctggccaacatggcaaaaccctactaaagatacaaaaaaaaaaaaaaattagccaggcgtggtggtgggtgcctg

SEQ ID NO: 58015 - DNA, 4115 bp, Homo sapiens
acaagagcaagactccgtctcaaaaaaaaaaaaaaaaaaaaaaagaagtagagacagggagacagggtctcactgtgttgcctaggccggtcttgaactcctgggctcaagtgattctcccaccttgacctcctaaattgttgggattacaggtgtgagacagtgcacctggccgaaatagctcaagtttctgaaaaacaaatctgaatctatttgttattcttagcgtcactggtctggctttcagaattaacatacaaggttgccacacctagttctgcccagctttatgtcttttattccagtattccaccaaagtttgttttcctgcattccagttctcaagtcttaagataaagattgtacttgacagtttagtatatccataaaactatttgaggtggttaaggttcttgggttcattttccttaatactttgctgaatattgtagattgtaggcaatgaaaaagtctactaaattaggaaaaccttgaataattaggtatcctaggtaagagcccctaaacatcaagcaatctgtgagtctgtaaagaaataaatattttttggattattcttatctaattccacccctgttggaagatgatttctttgttctttgcaactatggaagctgtgaaaatcatcacaagtgcctctgaaagcgagtgttaggttggttagagggtttaatattttctgcaatggtttgtaggaattttaataaatgtagtatattttctgagatgattttgtaaaagtactattttaaatatcaaatcaaccaataaattcacatttgtgttaggaacagaaatatggtttatatctttgctggcttggtttcctttttcttaatgtctctgggaggcttattccttcattgtggaaattttagctatttaaacatgtaaatttttctttctacagccaggtaactataaacacagccaatagattttacacaaagcaatcctagaagtatcagaatgggttttgaaaagttcaagtccatcatgtgatcatgtttggctactttaaaaaagcaaaaaagttcaagtctaacgatcccatttgtgaaatccacagagcagaaagaaaggaagcttttactattttaactatctcttgaacgtgaaaagttattgatgcagtgaggtcgaatgcacacctactgcttcctaagctctggaacatgaatctccttcctctgtcatctccccagaattggaacctccttaatccaaccatctcactattggtcagtctagtgattgagaaataggaaaagccacaggttgaaatgatgaaatgtcattacactgaaagataataccaaagtacaaagtcctaggcacagtcttgtcaattccctcttgtctaagtggtgtggcaaatattattgtcacttttcagagaaaactgaggtgtagagaaataaataaatgaagttttttacagtcattccacaagttactgagcaagtcttagaagccctgactccccaaaccacaaaatctcctttgataatcattgctgccataacaccttcttttactgctttcctccttgaatccagagaacacatatttataatcattttaagagcctgaggaaatgacttcagcctgtgcaaaagggagaaagaaaaaaaggcaaaacatgtccaatgtcttttaggtcctatattggttaggaatcctttgattccaagtgacagaatcccaatccaaacagacttaagcagaaaaaggactatcaactcaaattagtgaaaatcatacaggcagaaagcctcaggcacagcctgaacagggctcagataatgttatcaggagccagacaatctctagggtcatgtctgtcctcccctctgctctattaggtagcaagttggtagaaatggctctgaccttcatgcttccagggcacaagcccagttagaaagagcaagcctactttttgtggccataccagaccaatctgatttaacctttatgtaacaaagttgtgagttgtttttcagttgccaatggaccctcaggtcatgtgccctgagcacacccagatgaaccaagcctgcaaccacagggggaacctaagctaagtgctcagtccaaggatggggactgaattaagaagcagacacatgggaggatccatgaccgatcagatcaagctgtggtatcaccccatggcaggatccagtcagatcatgcctcccggcatcacctcattgcaagatccaatcagatcatgcctcattaccctatacttacaaaacctgaccaagcccccagctctgggagatactgctctgggagatacagccctggcattctccttacttgttgcaagtaataaaatccccttgctaaatgctccttggttgtggtcattgggttgaatttgcaatggatgctaggaaggcacataacaaatatacattataaacccattgctggatttcaccggatttggatcagaccctgtctgtcttcctatgggagatcatatagtacaatgcttagaacactggattttcagtgggataactgcttgcaacaaagaaagtaaaagacaaattgaaacactggctttggcatcaaagtgacatggtcaagtcctggttgtgtcattggttgagtctgtgaccttgagcaagttatctgttttttcatctgtaaatgggggtatctacctaaaaggttatgctgaggagtaaatgaagcaatgcacttggcacttaatataggttgacttcattcaacagatatttattgagtgtctactgtgtgctctgctcttagtgcctggcttagagccctgaataactagacatatccctgcctgcgtggagcatacaatgatgataaatgttttctatagatgaggaagaagctcagggtgcccagcgaatgtaatctgacctatccaagaggagaagctctgaggctttcttgaggaagtaacatctgagctgaattccaaagaatgaaaaaagaatatttcagtcaactagaatagctcgtgccacagccaagtgaaaggaggaaacacactatattcaaggaaatgaaagaaaccagacagggctgggcaccagagcctcaagggcagattctaggatggttactatttccatcagtttcttcctaaatcttgttaagaccctgggacaatgagccaaatgcttattttaatggctgacacacacacacacacacaaaggtacattaaaatgtcttatattctgaaacattttttattcccaagtgttctaatattcaaattgtttcatctgaattcctacatagttcaaacttgaatagaaagtaaagcagacattgcctaatagttccttttgtactcttgatcgtaccataagccttcccctttcgtcttggtttagaaaacacagaacttaacataactgaaattcttgtttatctgttaaagtaattaaaagtctgatgaatcatagcaaaccagtaccaacaaaagcaaaaaggcaaactgttcagtatcactttaactctctcaatatttaaaaccagaagcattaggctacattaaaaaataaaaagaattccctgttgaactgtggagccactggttaatcccagtgccagagaaacggagcagaggtcacctgaacaaagggcaaagtaaataatgaaccagcaatgtgcaaggtattattttgtttctaaaggaaaccatcttgggaacctgcagagaactacatggtaacatatatgtgaactaggaaaattaccattcagaatttaccgttttttgttttgttgttttttgagacacggtctccctctgtggcccaggctgtaatgaggtggtgtgatcatggctcactgcagcttcaatctcccaggcccaagtgatcatcctgcctcaggctcctaagtagctgggaccacaggcatgcaccagcacacctggttaatttttttatttttagtagagatagggtctcaccgtgttgcccaggctggtctcaaacacctaggcttaagtgatcctccctcctcagccttccaaagttctgggattacaggcattagccaccacacccagccccagaatttaacattct

SEQ ID NO: 58016 - DNA, 862 bp, Homo sapiens
gattaaaccggggaggtagaggttacagtgaactgagatcacgtcaatgcattcccaccttggcgacagggcaagactcttctcaaaaaaataacaacaaacaacaacaacaacaacaacaaatttaaggaaacaaattcctggttaggaaggtgggtgaaaaaaaaaatctatacatgtaggcaagcagtttgtgatatgtggactaatattccaaatctcactctagtactaatctcatgctacttggtataaataggtattttaaagtgaaacatttagcattccctaggagattcaacaatacaaatattggccactcctagaaatagactttggacctagaaacagtgtttggtatgttaatgggaatagtgggaagaaaatacattggcggactatacaaatattagaaagaagataaatatcttcactatcttatgtcaggacttacaagctaaatgttagaagtttcctctttttttgcctaaaacttgaatgccagaatgagctgagttacaatgcagcacggaaaactgatcactggttaaagtgtggtttctggatcttgttactggatattaaagctctttggcaatgccttcatatctgtttaatgactagaaaacaattcaagaaaagtgacgacaaagacaataattacaaaataggctgataaccagagttaattatgattgccaaacagaagaaatgtttttttaagaaatgatgtgttaatatgatgtgttaatatcagtagatacaaaggatataatctggttgactaaaatcaaactgaaatttcactgacatagtaaagtatcactttacaagatagtcaatttgaccagttcattgtgaa

SEQ ID NO: 58017 - DNA, 1818 bp, Homo sapiens
gtagtaagcaagggttgcagtattggtcctgtgatgcccacagagtgtcacttagatgacttagttgatagaccactttcattggagatgtttgttatattgttctgagacattgagaaatgagactaaatggcctggaaataggctaaaatacttccgggggcagagagctaatgcaaatgagtgaacttattaactagtaactcttggctattgctgggataggaccatagagggccctgtccattctctacacttgccaaaagcattcaaacttacttttaaaaattctgcacagggaccaaaatctaccagttggcaacttctgcctaatgcatattctagcactaatcagagtatgaaacaaatgcttcagtgtgttatgttccttgtgctgctaaacaacaaagcttggtgacaacccaacatgaagggtatactatatattacacaggatagtttgggaatgaaaacatgggttctggagttaagctatgcgagttcaaatgccaactgcacatttcattagtaatgtaaatgtgggcaagttacttttggccttccagttgactcatctacatagaggctgatcctcttgttgttacaaggattaaatgagataatacaactgttcaggccaggccttagaacacagtactgagttagccatttttaaattcataagctaagggacttagagaagctgacagatttagattcattggtcctaccaatgaaggagcagaaggtattccagagggcagagctaaaggaaatgtttcaaaacaggatcctcacattgttttgaatcctattttagttctgaaattaaatccaaagtaaagagagagcactaaatgaggaaggacaacatggagaacaaaattcttcctagatgaattccactgtgttactcacagggaagccttgcaacagagaaagggaaaatgaagttctggtgacactcctgggacaaatcaagtgctgactcaagttttcctgtcatgtgcctagtaaagttcactgtgcctgagctctgcctttgtttttaataaatggtgtcaatatttccatttatatcaggtctgccaaaatgctccttggtctttaagctaaatgagtttggtttctcttcaaatactaatttttcattggcagcacatatagaatgtaaaagtgaaacagtgaaataagctacaggtagaaaatagtcagcttagagaaaagcagaataaaatttttttcccaagtttcaacatggtaatgatgtgacctttagctatggtaaaactatttgactaagtgggtaaatggaaattaatatcctggtatctgcaattaatccaagctttctgaggactaaatccatttatttctctatcctttctaaggagaaaatcctaacagtgtggacttagtgtgccattccaggtggtagttgctgtttcagtattttttgtatcaaagttgttgtaaccctattaataaattatttcaaggttaaaaaaatacccaggaaaccaaattggaaaaagaaatttttttttaattagaaaccaagtttacatacggttaaatggttactaaaagctcagttgtaaccactcctaacaccactagcagaacctcaagggagccaagagctcttcccttttcccctgttaatttccagtataatgtagcagcacaattatttcatgtcacatttaagaagaacaagaaccaatttatataaagtacaattgtatatccttaaacattccacataaacacactgtcaaaactcactggatatgctggaattggaggacttaaatt

SEQ ID NO: 58018 - DNA, 3180 bp, Homo sapiens
gggcagcagacttccctttctgcctcaaacacactcagttctttaaaggtgtcattcccatgcctctcagggaaaaacagattacaaagacattgtccttcactcttaccaggccaacttccaactttaaatcctaaagaagtattaaactggttgggcacggtggctggcacccaggggctcaagacaacctgggcaacctagtaagactccatctccacaaaaaaatttttaaaaattaggggtggtggcatgcacttgtactcccagctactagggaggctgtggcaggagaatcacttgagcctgggaggtcaaccctgcagtgagctgtgatcatgccactgcactccaacctgggttacagagccagaccttgtcttgtggggggtgggaggggaagtcttgaactctcttattccaaaactaaacaactaaacttataccaactgcacttcaactaaatttggccagcatgcagctgaagtaagcaatgttttttttcataaacttaaagtttctcattttctgactagttcctaataatgctatgtgtataaatagccgcttctttgaagggaagaattagaagacaaagcagtcttccactggtgtatcccagatagcaccacgagaatatgagaaggctttttaaggccataggaagggcagatatctgtcagcagacatttgtacgtatgtgcatggtgaggaggcagagaataaagatgtctttgattcaacaacactcacccaaattcttagcaatgaaagtcaaacaagaaagatctggcagggcgcggtggctcacaccaccccagcacttcggaaggccgatacaggtggatcacttgaggtcaggagttccagaccagcctggccaacatggtgaaaccccgtcactactaaaaatacaaaaaaaattcgccaggcatcaagaggctgaggcaggagaatcgcttgaacccgggaggcagaggttgcagtgagccgagatcgcgctattacattccagcctgggcaacaagagcgaaactccgtatcaaaaaacgaaagaaagaaagaaaaagatcctactttgtagatataattctctaaccttcactgagtcataactgaaccaaagctgcctactagctttgtagagtaatccaagggaccactgctgatttcctaacattagagtaagattagattcataagaagcttccccattccttaacaagaagtgctgccaggctacccagaaattcccctcccgagtcccactgccattccggaaacatgagaaaccaagtatgctgcaatcatggcctttttagtactggctccaaaataaactgagtaggccaagcaagactgtcaatgaaatactgtccaatgaaaaaataaacagccgaaggtttcaggtttcatttacccaacacaggtatcacaataaatgacctagtataatgatagtttccaaccgtatttaataaaacaaacacgcagcagaaatcctctagtcacatataactacactataccctcagatcaaagttaatgatgtcaatggaaagtataggccggcgggttcactggtgataagtcatgagactctgagcaaagaataagtaataaggttagaattctttagaagtgttaaggggaaagaaggtaacaacaacaaaaactcctccacatcaagagttctaagtactttgttgtttattaactaatttcataccaacaaccctgtaagactgatattatcaatccccattttaagtacgtggaacaaaagaagaaagaggcaaacaacatgctcaaagatttacaaagccaagaaatcatgcgaactggtggggcttcgggttccagaagtcagtgtaaacatagcttctccatttttcaccaacagtcactaaaattgaggccagcaagtttttagaagcctatctccccttgcaaactctccttccatataatttttgcttttgcaagagatgtcacatttaagcggtagctttaaaagtggggacacatgaaacgcacagctgggagagccatccagcccacttacatatgtgcaatatccccctgtagaaaaaccctgctcattggagcctggaatccagagggtccctgagagctacacaaacagccttaaaaccaatctacccacaattactgagccgcgtatgcaggctattcacacagaaggcgctccctgaagtcggttaggttataatgagtcttttgttgaagcggggcggcgggaggccccggagagcagcccggccccctgcggcgccgacgaagaggccacgaaagaccttgccctgtgcccgtcggcctctttcgaggcgtcgaagcaggtcagcgcaccccgacacaggccgggcgcgccatccggtgcagctgggagctgggccatgtgtcctaggccgcggcggggaaggggcgagacccccgcgacctccggcgttccctccctgcccccatctttgggtctttctctgaatggcgcgactccatcagtcctggactctgggcctgaggccctccctggccacacctcccctcacagccccgcacggcgagccggtgtcgcatcctagccccggagcctgacccccgacacaggccctcgagccgccccgcgcccctccctgccagcgagcggaatgccgtgacccctgaccttgccttcccctcaccttaccagctccgcaaccacctgacacgccgcccccgcgcccagggctccatattccgggagccagcgccacgctggctaacgccctcccctccccgcgattggtcgacaggacggcagccgcacatccctattggctggagtccctgcagcggccgggatgcgtggcccgcagaccagggacctaggctccgcccacgcggagtctggatgcggcggcccctggggcacgcggcggcccctggggcacccggcgggagctgcatgctgcctagttgctgcttgcgttggccagacccacacagcccctggactggggagctccagtccgctagcagtctggggacagataagattcctgccctagttcgccgtggcgccacgttaggtactgacaatcaagctacgaggtatagctctatcctgtaaagggtagccaggccaggcgcggaggctcacacttgtaatgcccagcactt

SEQ ID NO: 58019 - DNA, 2177 bp, Homo sapiens
ggacacaaatacataaacactgtaagtgacagatgctacaaagaaaatacaaggccgggtgcagtggctcacgcctgtaatcccagcactttgggaggccaaggctggcggatcacttgaggccaggagttgaagaccagcctgaccaacatagtgagatcccgtctctactaaaaatacaaaaattagccgggcgtggtggcggacgcctgtaatcccagatactcgggaggctgaggcaggagaatcgcttgaacccgggaggcggaggctgcagtgagccaagatcgcgccactgcactccagccggggcgacagagcaaaactgtcacaaaaacaaaacaacaaaacaaaacaaaacagagtaacatgagaataagtgtgaagtgtgtccttttcgccggcactgcttcagatagggtggtcacagaaatcctctcagaatagtaacatttaagttgagacagagcttggtcttcggtaggtgcttaacgaaaaccattttcccacaaacttagttctggaaacgacaaagagaggaaaaagtgtactcagtccgcacaggggccgctcccaggcctccaaccttcgccgccagactgactggaaagtggacagttcccggcctatccacgccggcaccattagagggcgccgcgggtcctcctagccccaggcactggcaaactgacatctgctacctaacagtcgaggctccgacgccccgagtccaggcagagggcaagggcggcgctgggaagccctgaggccctaaggaatcgcggagggtcactgggcgcctcaaggacagggtgccctccgcgtcgcaaacccacaccagtggcataagaactcgctccctctgggacaccctgtttccggcgcctttaaacctggaagtactgctgtgtccaatcctggccctccttccgcacttagtctttgagtccttccctctcctggcttgtgctggagccaagcaggctatggctaccaatcagcgctcagaaaagacgcatgcgtcttcgaacgaacgcgacgtacggttaactttgacccaaagacaacctcttctctcccgcttctctcgctgtgaagatggcgctctccagggtgtgctgggctcggtcggctgtgtggggctcggcagtcacccctggacattttgtcacccggaggctgcaacttggtcgctctggcctggcttggggggcccctcggtgagggacctgtagcgagaaaagcatttttgacgtccaggctctttcagtgtctcaaccttgcttgcattctgtctcttaattctcagagttccacgccttggccctggaatttttattcttctgttcaggattcaaactccgatccccactagtgacccggcttcctgaccctctgtactctcagtgccccatattgtctggtttccccgcgtgtcctgagctcatctttcagcctcactttttcggctcaggttttaccgctgctatctcgattccacctctttctgacttagcctgcagttcaaattgtcccacaggcattgcgctctctccagaggcataccctgagttactttcctgcctggcctttgcctgatttgtgtttcacagtctgattgcctatctcttcttgaccccaagaccttccttggatttcagaagtgtcaagccttgggatacaatctccgagactcctgctttacattagggactcaaggcgtgagggagcttctaggactgattcccagatagtctctttgatcttccttgtaggtcttcaaagcttcacctttctccaaaggcagatgtgaagaacttgatgtcttatgtggtaaccaagacaaaagcgattaatgggaaataccatcgtttcttgggtcgtcatttcccccgcttctatgtcctgtacacaatcttcatgaaaggtaaaaacgaaactacaatagaaattccggaatcagctcttgggcagggtcaaagagttagcataaataagatcatttgcaggttctgctatggggatgtgagccgagatatcttatatttcataaatgcctgcgccttaaactaattcctataaattagcacttcttgagaatgtttctagaaagatgttatgagaaacaacttatgacagcaacatgagggagggagaatataggtatgttctcgtac

SEQ ID NO: 58020 - DNA, 592 bp, Homo sapiens
agttataccatttttttttcctttggagatagggtcttgctctgtcgtccaggctggagtgcagtggtgccatcatggctcactgcagcctggagccatgctgggattacaggtgtgagccaccgcgcccggccctaattttaaaattttttgtagagatggggtctcgctatgttgcccaggctggcctcaaactcctgggctcaagcagtccttccaccccagcctcccaaagtgctagttacaggtgtgagccaacatgccaggcccagctgcatcaattcttaggactgttctcaggtgtgtgtgtaacagaatgactcattatgggactttggtctgaaaagcagtatttggccagatataccacagttatttgttacccagctaaaaataaagaaagagtgagttaggagaaatccaaccacaaggactcagcatctacaccctcaataattaagttccagataaatttcattcttagggatggtattgctgttttcaactgaaatgtgtcttaaactgtcccccatcagagggccaacaaggggccaggcacggtggctcatgcctgtaatcccagtacttcggg

SEQ ID NO: 58021 - DNA, 1178 bp, Homo sapiens
ggagcgaagggacatgtcaagtcaccagttccttttaatgaacactcctgccgaacccttcagctctcggcccacttccctctgattcctgctaaccttcccgctcattccaatcctctgcagcccctacccagccttccgcatcccttcctgcctgctactcacaaattcccaaccactcctcccacattttcctctgttccccctccccttccttcactttcctccatcctacatcattctccactccattccgaactcaatcctcatctgcaatcctgcaggcttccaagccgcccatcggtctcccgcgagctgcccccgcagtccgggccagcgtcctcggtgcccctcgctcccacgcctcttcccgactcggttccttcccaacggcacccgacctccccgccccccgaccgctcccgtccgagcctctcatttctgacccctccatccgcacggctctgggcttgaccactcctccacggccgcccgagggccgatcccgagaaaggacgaggcggcaccctccgccccgcacccctaggcccattaccggccccgccgcagctgcctcctcccgtgatggtctctgccgcccccgctgccgccgccgccctagcccggtgggaaggagggaggagcgagcgagtcccgggccccgcggcgacggccggggagctcccagggcggcagggcggggagggagggcggtgggcagcccagccggcaggcagagagggccgggcgtctccggcaactcgggcgcccccggcagcagacgcccagaaccgccccggctccggctaacaataggatccggccgcagcgcactggctcttataggcgccggcacgtcctgaccgagacccggggctggctgggaaatggagtctacgggccggcccacacccagcagcatgccgggagttgtaggcggtaactgctgcaaagccgaagccggcgcgcaaaccggctcccgaggcggcagctctgctgcaaccttttaatgggggaagagaggagactcagctacagatcttaaataaacgaattctcctccaaagctccctttttctttcgtgtcctgaccacacgccattaggaacatgatccccccttctcctcgctcatggggtcttagtcttcagcaatatgacttattgcagcctgcgcag

SEQ ID NO: 58022 - DNA, 1717 bp, Homo sapiens
catatcgcctacaatcgctttttccatttcttccacaacactaactactcaaagcgacaaaagaacaagtcccttttccccaatcgtaaacagctttttaaaactctatacacctccttcccactcaaccccttttcttagtgtctatccgcctttgttattcagaaggtgtagggtctgggaaaatctcactcacctcatgctataggcaccagcacccagttcctggccgatcccggacaggctagcatcaaagtcctgcaccaacccggattcaatcacttcgtcggccagaggcagcttcagagcccaggccatcctggctccttccttgccccaggagacaccgtgtcttgtacaaaggcgcggagggtaattctacccaacaggagtaacgcaaaccaagaaaactacaaaccaaggtttcccacgcagtgcccaccagccacccccaagcccgaccagcactgctctgtgcacaactaatctcccgtacccttggctgctcgttcttggctgccccaggttccaaaatcccccctgcccagctctcaggaacgtgaggacccctttgctcaactactgcagacttcccagaggcagctctggactcccgcactcccactcctcttgagagttcgtagtggtggcttgctgcttcccagtcagaccagcagcagccgcaggaagccagcccggcgctcccacgctgcttttgcaccttttcccccgcccctttctgctggaggccccctccctcccaggtctcgctctctctttcccctccaggcctcgcttccggtcagtcccacgatcacttccggtcaccccttctcaaccccacggcttagaaccaaatccaggtttccgctgagccgacttctcgccctctgtagccccccacggcctggaaacatggaaggagaaagtccagcacaggcgtaaaacctagactcgccaggcccttccaccgtccgccgccccagcgccaaccaatcatggcgtcctctttcctcgcctgcccggcgaacatgacgtcacgctgtcgttcgcctataaagaagagaccgcgtcagtctcggcagcgatgataggcgggctgcgccacggctctgcccccgagatgggctgggcgatcacggggaggacccggcgtgcaagtgtccgggtttaaacgtgtatccgtgtagttaccagagttctggtattcgctacccatcaagtcgtcaccctgagccatggaaggagcccttcttctagccttatgaacccactccacccctggcggactcttgacggcttcccaaacgctccttacgtgtgtgcgcttgctcctgcccatactcctgtctccttaaactcacctctccggaggtcaagaccctgcataagtcccacttccctgtatattcattttatcttcggcatcctctctaatgcatttgaacagaaaagcatgagatcagtaaaaatgtggtttttaggccgggcgcggtggctcacgcctgtaatcccagcactttgggaggccgaggcgggcggatcacctgaggtcgggagttcaagaccagcctgaccaacatggagaaaccccgtctctactaaaaatacaaaaattagctaggtgtggtggcgcgggcctgtaatcccagctactcgggaggctgaggcaggagaatctcttgaacccaggaggcggaggttgcagtgagccgag

SEQ ID NO: 58023 - DNA, 2404 bp, Homo sapiens
tgctgggagctcccttggccttgccaggtgagcctgcccagggagcctgcatcgggcccattattatgactatttattaataataatatcgatattaaatatttatgaagtgctcatgctctgctagaaggtggccctcccatcactgacccacccttccagcaacgcctgggtccctacccccgggtcccaccggtcgtcccggagtttgttcattcgggagaaccgtgacaggtcaccctggccgccccagctggccctaaccgccgggaacccaggcgtccgtgttctccagagaggcaaggatccgcttctggtcgccactggttctgtgtacagagcgtcccctgtggtccgcaccccacaagggctccaggggcagaaacggggaggggccaggtcggggttccccaccgggtccacctggcggccgccccctccgctccaggtccagagcggcccgcgggcgggcgagggcgcggcccccgggtgtctagccccagctgggcaaccgcgcgctgtcccgctcccgcagctccccgccgccccggcccagcatcccgccgccccggccccgcggctttttttctctttatcataaatatataaattatgctaattacgggcattgcatattaaccaaacccgaaacctcccctgcccggccccctccccctccgtgcaaacccctccccgccccggaccccgctacttaccggagcccgagcccgagccgccttcgccgcgggtgtctggcggccaccgattagagattcatctcacagcccgggccagggggccggggccggggccggggccacggcggccgccgcccgcagacaaagaagccagtgcggcttggctgggctcggctcggcccgggagctggtcgggacccgccgccgcccccaggcccccagcctgggctgggcagagccgaagggggctccgcaggctaagccgggcggagaggggacggccgggaagcgggaaggggaagccgggtgggggggcggtcaggtatatatttttcttcgttcccccttccacgaccccccccttttccctcccccccttttttccctccttctgctacttggatttttttagctgctgcgtcatgagcataatttatgcaaagagctttgccgcatgctgcaccgcccgcgccagccgccgggggcggcgggctgggagggcggtcagggaagggaggggagcacgggagccaggagcgaggggtgggggtggggaggggaccctctggccctggccgagcgggaggtcccggaggctctctcccgggacagggatggacggtcagtgggtctggttactcagcccctccgaggtgccgcggaggtggtttcatttcggaaggtgccagagtaggagctggagtccggaccctccatgccacatggccttcagctgagggttggggcggtgactcccggccaccgcctttcctctaggtagtcaactgtcctcaatgttgaaagtcaagtttatgtctatccctccctccctagaaaggcgggggaactcagacatcgctcagccaacgtggagaacctctgaacagctgtgccccagcgccaaagcagcgaagggtcccaggtctctcacccggtggcggccgtgggctgtgttgtctaaaagcagatttccggccttcttgtccaagtagacaaggaaatgtgaacagaaagacaaagttcagtggaatggtgaaaaacctctagcagcttcttaaggtagagaggggaccagaaaaggggtggatgtgggtggctgagggaaagcagattggagaagtggtggacaactgaaagaggaaaaagttggaagaccaaagtggaagcgtgggaatggagagaagaactgggaaggaaggaggctctgtaaatccagtgaatgtggatcccaatactgaggccacctgctgtcatcctaggctgttccccctcccaccctctcccgatatttggtggtctgaggatagctagaggtagatgggttagaggcagtgtgagaatgcagttggaggcctcagtcctccccgggactgctccgtaaggcctcgtggtggaagggcattgaatggcccggcctcgtcgttaacctggccagtggactaggctgttatcagcttgctgtttccatctggaagtgagcaggtactgctggcggcggatttatgagtaaccaatgtattaggagtcagaatacttaggttttagtcccaactcttccactagccgtccaggcaagtaatttaacttcttcattacttataaaacaaggataatatttataatgacatttataatgactacttcatagggttaagtttgtgagcctgtatgtgaaaaaactgaaagctgcaagctctatacaactg

SEQ ID NO: 58024 - DNA, 1334 bp, Homo sapiens
gaggtgaccttgagtgaatgcgtgtaggtggaaaaaggttccggggaatgcttgcatcgttctgcatccgagcgtccaacagagaaaagatcctgtttccagacaatacctgcatttggtttttctccagctgagggacaccggtagggggggggaggacagaaacgagcagggggtggggccaaggcgagtgggcgggaccgcgcggaccctcccgcggccgactggaggcccggagcaggggcggagtttccggcggcagcgccactcgggcgtcgggtgacgctaggcggacggaccatcatgtgacacggaagtagctccgaacaggaagaggacgaaaaaaataaccgtccgcgacgccgagacaaaccggacccgcaaccaccatgaacagcaaaggcaaggaccgagggtggcagaggccgtcggggggagtactgctggcccagagcgagcggattcggagcccagggtcaccaaacgccaggtttggggtgggctgcgccatgctccttggccggctgcagtccagggcgctgcgcctgacgccttcgtcatacccaaattacggcagcttgctgcctccaggccctttcctccgtaaactctgtggcgcagtttggagctgcgggctcgggtggtgggggggcttgacatgatgggcatccgcaggagcaaatagagcgctagcgcaggcattcgcgtaggccaatggagagccggcggaggcggggcgccgcgctccggaacccccagcggggccgaacttaactactgaattgctggagttggttcgtgggccggggcctgtgaggtctcttttccttcccttcgcaccccctcgcccttcgctgacgggatcagaacttctccccttttctgtggttgtaccagtgtgtctgtcggaacatgattcccataacgcaggaataggttgagggggtaaaaaaggaatagaaaaaaaaaaaaaaaaaaggccgagcgaggttgctcacgcctgtaatcccagcagtttgggaggtcgaggcgggcggatcacctgaggtcaagagttcgagaccagcctggccaacgtggtgaaaccccgtctctattaaaaaatacaaaaatcagctgggcgtggtggcgggcgcctgtaatcccagctactcgggaggctggggtaggagaattgcttgaacccaggagacggaggttgcagtgagccgagatcgcgccactgcactccagcctgggcaaaagagcgagactccgtctcagaacaaacaaaaaaccaaacctgatcccccgcttttccagtgaggatattcctcctcacccctcagccctgc

SEQ ID NO: 58025 - DNA, 508 bp, Homo sapiens
ccacagtccccaccatgtcagccgcatttcctggagcctctctgtatcttcccatggcccagtctgtggctgttgggcctttaggttccacaatccccatggcttattatccagtcggtcccatctatccacctggctccacagtgctggtggaaggagggtatgatgcaggtgccagatttggagctggggctactgctggcaacattcctgtgagtatgacctcatcagaagaaactcagcccttgtgtattttaactttctgaaatgacttcatattcattctcttaccatttctggatgatagttgccagtgttggtacaactactgacatccaatactcaggcagaaagtgtttgagggggcagaactgtggcaagtgagtagcatctcactgggggctgagttaaccagattcttttgttttcatgtctgtcgagtcctgcttgctgcttttccagttcattgtggtacactgaactggtctagtaatgctccttattcatt

SEQ ID NO: 58026 - DNA, 2562 bp, Homo sapiens
gaagaggggcaaagacaggaatgtagcgggtgggcccctatggctttgagtcctggaagtcccaggaaagcctctggtgccaggttctcccaagtcccttcccctttttctcttgtcctcttctggtttccctgaatatctcctcaggctccaggtaccaacagctctccacaggagcaggtctgaggccgcatgcagtttgacggggtgttaccttcatacgctctctccaggtcctttcaatgggccaccaaatttacttagatctctcaaggcctgagaaagtcaggcaaaggttcgcaaatcagcagcgaacccagtttcgccaaagcgcggtaacaggtaccctagggttccacagctaggagttctggtgacgccatccaccaggtgtcaggagagggccgggaaggtcaggacccgcgcccaggctccagagcggagtgggcgcagcgcagtagccgggccgggaccgggaggcgacggccgtgggccgccttctggctcgcctcggacgctgggacgccggactggccgccccctccgggcctgctttcgccgtccagggcgcggtccgcgcacagcctgccaagcctcactgggccccagcccgcgccccgcgccccggagatcctcgacgcccctgcgaacgcggggtggacgcgacgggctgggttggtcctcgccccgcggccccgcccccgtccccgcccccgccccgagccccccgcgttaccagcaccccgcggagcgcgctgcgctgggggcggccggtgcgtcggggagcggcgttcccagccgccgcgaccctctgccccagcggagcgctgagcttcggccgctccgggtttcggttcctgccacggccgaggtggctgcggcgaatgtgggcgacccggctctccggcgcccccgcccttccctcgtgctcacctttccagtcggacgggctgctggtgaagggccggcgccgctccgcgcgtccttttgaactcaacgggggcgggcaccgcggagtcgcggaggccagcagaggccgaacgaggaccccgagcggaggaagccgcgggtggcgcgcggggttggcgcagaggccggagggggtggggggcaggccgacggggtgggacaggaaaagcggagagaaaccgccctctgcaggtccccttggctcccccgggaggaaaggcagcctgcccttctccgattgtcactttactctccatccggagccgcttcctttctcgccgcgaggctcggggttggggggggaccagattggagccgcgggctaactgggatccgtcccatttccctgggcttgacgttctctgaatttttagctaatgtggaaagttacatttatttgcatttgtttatcgcttgctcacataggtctgtgtcctgaagcttggcagatgagcgaacttagccagcacacccccggccgtgaagcagggaggtgaagcggggagagcaacgagccccacccgggtcttgccagctggacgttcttgtggggcagcgttgagcagcggttaggagtgccgtggactttggattcaaacagccccagctcttctgcttgctagctgggtgactttgggcaaattaacatctcgaaaatctgtttcctcattcctaaaatgcgggtctgaaagtgatcatgcctgtaaagccatctcatatccatggttctagaagcatggtgagcacctcaatttgaataatcagtgccatgctttagctacctcttgactcactcgtttgtggcaggaaatgttcccaaattaatcagaagaattcagtgactaagaggatgtaatagtatatagcgcaggcactggaatcagctctgctgtgtgatcttggacaagctgcttctgttccgtttctcttatctggggcaatacctgtctgaatagagtgactgttgggacgaaataggttagtaaatatgtactgtaaggcattagaaccttgcctggcacatagtaagtgctcaataaacgctaggtcttgttaccttggcttcccgtttaggattggaacccttgtgattattctttccctcccagtgatagacttctgtgcttacttcgcactcctaggcgttctgtaggtttgtaaaccagtatttatacagaaatactttctgtagaaagacaggcatcatcagattgtgcatgttaatccgggaacagaccgaaagggaaggtctcagaggagagaggcataaagggagaaaacaaaacaaagtcacaagcaaagcaagagtagttgcttttattcctaaagtgttcattataaaagaaaccagagggcagggcactgtggctcccagcactttgggaggcgggtggatcacttgaggtcagtagtttgagaccagtctggccaacaaggtgaaaccctgtctctactaaaaatacaaaatccgctgggcgtggtggcacacacctgtaatccctgctactctggaggctgaggcacgagaattgcttgaacctgggaggcagaggttgcagtgaggcgagatcacaccattgcactccagcctgg

SEQ ID NO: 58027 - DNA, 2277 bp, Homo sapiens
cctagcactttgggaggctgggagttccagaccagcctggtcaacatggtgagaccccatcttattaaaaaagggaaaaaaaaaagttccggagatggttgcacaataatgtgaatgcatttaaaatcaataaactgtggactgaaaccgtgaagatgatacgttttatgtcgtgccttttactacatacacacatgaaaaatccaaacactgtcggtggcttacggaggtctcacaatttggtcccgctagccttttaaaaaattattattattattattattattattattattattattattatttgagatggagttttgctcttgtcgcccaggctggagtgcaatggtgtgatctcagctcactgcaacctccgcctccggggttcaagcaattcttctgcctcagcctcctgagtagctgggattacaggtgcccaccaccatgcctggctaatttttgtatttttagtagagacggggtttctccatgttggccaggctggtcccaaactcctgacctcaagggttctcttgcctcggcctctcaaagtgctggaattaacaggcatgagccatgggcccggctccttacacccactccaccagcactctttctgctccctggcttactttgtttaagccacactgtcttctttctgcctcattaacaagtcaagcctcaggcctctgtgttggctgctccctttgcagggagtactaagagtagtctttcctggctactccggtgaaaagagctccctaattactcactcactaacccattgccctgcattcttcttttttttccctctaatttagttaagctggtggagtgtgccagacagggagggaaccctggctgctgacctagccactcaggaatgaggtctgtgccctggttctgactcagaggtggggaagaaaaagctccccagctcagcacgcggtctcctcccccatggtatcaaatgcccttagactcactctcatagggctactactgggtgcctggagtggaggtcagagagcagggacattgtatttcggcagagacacagtcctgtttgtgtgtgtgtgtaatgagagctggttaatctgatcaaacagtcaaacgtgtgggaaattttatcccactgtggacggcagagatttctgaccatggatctgagggttttttcctcctttcctcactgaactgaatgttgcttaaagtatctctagcgtctgaaagccctctgggtagggttgtttatcatagggtccacaaattccctggaattaaatgcaaaaatgtgggttttgcatattattgtgggcagtggtgcactattctagggattttaacagattctgaaaggatgccaggacccagaaaaataagaatgactagcttaggtttttcaggcaggtgattgttttgtttttgtttttgacacagggtgtcgctctgtcacccatgctgaatacagtggcatgatcagggctcactgcaaccttgacctcctgagttcaggtgaccctcccacctcagcctctcgagtagctgggactacaggcacataccaccatgcccagctaattttttatttttttgtaaagacagagtcttactatgttgcccaggatggtcttgaactcctgggctcaagtgattttcccacctcagcctcccaaagtgctgggattacaggtgtgagccagtgcgtcctgaccatgcagatgatttagagatgctggaattggcctttggagagaattggctttagaagagagtccagggcaacaagtccaggacagacagagagaaggtgaacgtgtatatggtggcctgctaggggcgggtgctctggaggggatactggggctactgccaactctgccctactgaacacaggctactctgcctgttagatgctgcctatgccagcctggcattatgtcacttgtctagctagtcagaggagttgcctacctgggcacttgcagctcacagagtcacaaagtttagggtgaaaagttaacagtttagaacccccacgtccaaggctacgggagcccacctcttgcatcagcgtgacctggatgtgagacacgaagtcaaaggaaatcactttggaactttaaggcttaatgaatgccctgttggattttcgatttgcatggggcctgtagcccctctgttttggctaatttctcccatttcaaatggttgtatttacgcaatgcctatacctccattgtatctaggaagtgacttaacttgcttttgatt

SEQ ID NO: 58028 - DNA, 1422 bp, Homo sapiens
caagaagtttataaggttgctactgtgactgtttccttttacagacgagaacactgaggtttggagaggttgttacaccctttttccctcttgtgattggtggtaggaaaatattaagtagaggagagacacagtaaagtgccaagagctctggcactcattacctagatcctcgcgagggtggagtgagcggtcgaaatgctcatgcctactttacagatggacagactgaggatcggaaagactgaggtggcctgggggctgtcagggaggcagcgcctccccgctcctggcagcaggtccctgtgggctgaaacacgagcctccacctgccgctgattgacttctcgttttttcagtgggcccaagatcctgtaaattgagttccctgcgcttttggatgtcagaaacttcactgagcgcggcactgttggggggcaggagaaaggtaagacttggcactgacgcgggccacagagcacgcgggtcaccacgacagctttcgggtctcgccgcccggcgctggcgagcagccagccagcgtctcgcggcgggtcccggtcctcagcccgcggcccctcccggcggctcggcgggggcgtagtggaggcgggcccggggacgctcgctggcgctcccgcgcggcgccccctgccggcgccctgttccctcttgcccctgatccgctcccggcggcgcggagacgcgagtctgagagcctgcgggcgggcggcgcgctgcaggcgagcgggcgagcgggcgcgccctgcaggggtaggtgggccgcgggggcgcgggcgggcgggcgcgaagcgcagggagggggcgggggcggtggcagcggcgcttgcgggccggggccggcccgggcagggggcgcgcgcggaggggtaggcgcgggggcggggcgggcggggggcccggcagtaggggcgcgcgcgcggtggcgcgcggcgggcgcgagtcatcaattatgcaaggactcgggcggtgcggggggcgggcgcggggagcgctccaagatggcgcccaccgcagtcccgcccgccgcatcctcggcgcctttgcagtccggccgcgcctcccgggccccgcgttagggccgccgctgcctccctcgccgccgccgctgccgtaagtcgccccagagcccccgccctagcgctgcttcctgccctccgggtttcccttctcgcctcgggacccttgagcggggctcgcccatctccagtcaggggctttgccgcagagtgcgcggcggggctccaggggccgtggagctggggctctgctctccttgttttggacaggtgtttggaactcttgcttccttctactgtgtgtaccgggggtctcttaagagaactgaggaccaccagtccccaccccggacaccctgctttctccgtctcggctacagtg

SEQ ID NO: 58029 - DNA, 541 bp, Homo sapiens
caggtatttatccttggtctctcctcagctgctttatagagtaatgcagtagaggaaagactgtcaagaaattttttattacttaggtgctatatcgtttgctttttaacttcataaaattttttggccatctctgcttagtatataaagcaagttgagcaagtgtggctcttgccaactataaacttaggtcacttgggtctggaaattccctcttgaatgctatttcctgaatttgatttagagatcagagtttacgtggtcaatgtacgtctttcccacaggatagccaatgaattcttagagttttaaaccatcactctaaagcatgctaatttgcatttagaaatacaaagtgcatcatattggtgaccccttttagatagtgggatgggtatcagatgttacccattagttctgatgtcttaggcagagcctatgcagttatttggccacagactaggacattgctagtatattatctattcatgtatatgatgatgattcttggaataatttcctctggatgtggagagactag

SEQ ID NO: 58030 - DNA, 968 bp, Homo sapiens
aaaaatgtcaactaattatctacttgtctgtgtaaaattcagcttatcaagtaactgctgtatacatagcattgaatttgttgagtggtagaagtttttaaaggagtttgctatctaatacggaaggtgagagtttgtaagcagtgatgtaagccaccatttaggattaagttgggttgggttctagttctttgtgtctggtggcaatagtagtggtagtatccagttgatttgtggccattgatgtaatttataaaggtgactcagtgactacacagagtggtcaatgtcattgaaaggaaagtttattacttacatttcccaagacaagagggcattctgcaccacacagggccgcagagggaagcaccagtttcagtcaggaggcagaaggagcgaggggaaagcatggtccagagctcttactatgttttccttgggaaaggcaaggcagggcaggagaaacaggttagaattggccaatttgaataattccagtgggctttagggctgtccttagttgtctggtacctggtcctgggttgatttagggcaggtgaaatgttggcttgatgtgtgagagttagataaaggaggtggttcagagaatggactttggctctcgggaggtttaaacaactttggccattagtttggccttgtgatctatggatgccagatagacaaatacagaatcagcaaaaacacagaatacccaacacgaccttcctgcatagagctctccgtacctaccagttgaattatttaattcaatgcattattgactgccaactttgaaatgggtacagaaatttatagatgaagactttgtcctcaaggagctcgtgatatatcatgaaaaaccattcattcattaattaagcaaacatttattgaatatctaccatgcaccaggaacttgctagtctttgaagattacagggctttaatcaaacagatggaaaatt

SEQ ID NO: 58031 - DNA, 1832 bp, Homo sapiens
aaggaaggtgacttgaactgtaaggacttcacagctaatatatgcccctgggtaatgttacatagtccttatttgtttagaatagaagttccttgagggagtagaatatatcctttttgtcatatgtggttcctaatagtgagttgcatctgagtgaatataataaataactagcaattcaggagactcctgatctttgatctcccttggcagatcagtccatgccacagatttcctgaaaagaaaaataagcatgtcatggaagaaactatgtgttttttttgcaaaggttgtgaattaaggttgagagtgagatggtttagtctggcctctttttagagcagtgattgattaatgctgtctgtgttgctgtttcttccagagctgacctgtcctggacgcagcataactaacgaagctgctgcaggatgagaagatggcagcgcggctgcttgcaccaccaggccctgatagtttcaagcctttcacccctgagtcactggcaaacattgagaggcgcattgctgagagcaagctcaagaaaccaccaaaggccgatggcagtcatcgggaggacgatgaggacagcaagcccaagccaaacagcgacctggaagcagggaagagtttgcctttcatctacggggacatcccccaaggcctggttgcagttcccctggaggactttgacccatactatttgacgcagaaagtgagttggaggaggaggagcagctgcagatacctgtttcctaacaggcttagggagatgggggagaaagaactgtgtctctttgccaaagtttggataagtagttaaccttttgtttcagttctggcttgtggggattatttttcattttaattgctactaagggtcatttgtggtcttggcactcatcaactctattaataagacttctgattttggctccaggccagatcagaaaaaggggatgtaaatgaaatgggactatttaaaagagtctttaaaagatgggatagtaaaagatagtacagcctccctctctcaaacacacattcaaaattctatctttaatataaagatgttgttactattgtgacatcagtagagtagtgtggtggagatggtgtatttgctctcttgtctagctccctttgtgacattagagcatagctgctggggacaggaataaaactgagtaaagcaaacagccaatgaggacagacccaggtcattggccctgttacacagttgtctggattgattcttccagcactgattcttgcagtagagtcaattctgttattcatgcaagtagggagctcaagtgaaagaactactaatcttcatttggccaagagtttcaaacttcctgaacaaatatttgactaaatcttcagctactttctcatgattatcttctgaaacaaggcaccaagtagagaaacaaagcctcctgggtgatccaccagctaaataattgaatcttgaggactggcatcagacaccgttttagggaacccctcatttgacagattttttttttttttttttttttttgagatggagtcttgctctgtcgcccaggctggagtgcagtggcgtgatctcagctcactgcaacctccgcctcctggtttcaagcaattctcctgcctcactctcctgcgtagctgggactacaggctcagagcagctacgtaatagaaaaaagtggaaccattagtctgttctttcactgggaaatctagaaagtttaatgaacaaaatgatatgatgtaaagaacggtagattggaagtaagaaatcctgattctaccataatttaccatgtttattatttact

SEQ ID NO: 58032 - DNA, 718 bp, Homo sapiens
ctttctcttttctgtattttccgtctttcctctcatataggttcctttcccatagtctgtaaacacactcaaagcctctcccatcctaatgaatcctcacttgacctcctgtccccaggtagtctaattgcttcccatgccactgaaaattgtaaagaggagggtttactcaccacatacacatatctacccactcctccatccttgaagcctgactgcatcctcacccctttcatgatattataagatcttcccaataacatctcaaatggccaagtctaagattttttttaagttcttaactcactaaacctctctgcagtgtttgacaccatttattattccctgactcttatatctctttacttccttggcctaattttctttttatctcaaatgtttccttctctttcatgttctcaacctttccctaaaatgtttatattcccccagattcagttcttggcccatgttcctctcagttggcacattctccctggatgatctcatccagcctcagttcgaggactcctgactctagcctagcctagaatgttccttaaatattcaacaccttgccagtcatctgtttctggattttcccacaggttactcagtatattcagaattgaactcattttcttcccctcaaacctgcttatcttcttttatctactttcctagttgatggcaccagcaaaattctagatatcatttt

SEQ ID NO: 58033 - DNA, 1526 bp, Homo sapiens
tcttaattcttgtttgtcctttaaagccccttccaaatattagttaccttcctttgtgaacttcccagctcactctcttttttatttcccagccaaggggaaaaaaatctctccctcctgctgcctctcatacattatgcatatttttgttattgaactttgtacttaccctgcatcataattactagctcacatatgtgtcttccctaaaagtacagttttattcagtgttgtgtcctggtaattagcacaatgcttggcacagaatagatgctcaaaaatattttaattcaattgaattcagaacacagggcattctgggtagaatgagccacataaacaaaggccaacgttatgaattatgagaacctgttccgaggacatgagctagtttggctagatgggaacattcatactgggaaatatgatttaattattttggcaaggctgatattgggggctcttgaaagccatataaagcagattgaatattggtaagtaaatattgattgaatgaagaacatttctcacttccttccagtctttgctgaaatctctcttctcaataggcttatcctgaccacctctttaaaactgttgcctctttattcacccatcccctgactccagcattcttgatcttcctctccctgttcttcctccttttcccatagcacttgtcatcttctgtgtagcacagcctatatgatttactcattcattacagtttttatttattgtctgtctttcccactagaatttaaactcttcgggccaagactatcttgttcactgaccattcccaagcacctagaacactgtctgacacatagtaggtgtccagtcaatatttgttgagtgaatgaatcctaaattaatgaacttcagtatcgtgtacagagctggcatagaagcttaggtatgattcaaatggcctgtttctgaaagaaacaagtttattctgtaaaactgccaagattgcatcagctatttgtattataatctgggcagggcagagggagggaggtggggcaaacattgtgttaagtttgcttgtttaaaaaccaagttgggaagtaaaaagtattaaagacttttgagtttatgtattccttacctagaaatcattgtttcatgtggtgactcatacccatgctttaataatttctctctctttctttctccacagacctttgtagtattaaacagagggaaaactctcttcagatttagtgccacgcctgccttgtacattttaagtccttttaacctgataagaagaatagctattaaaattttgatacattcatatccttttcggcaaatgtggagtgagtgcggcaattgcatggttgcttgtttacctttccaatatttgacaactggattatatgttaagttttttactgatagtgtagttaactagcccatcagtcagaggtttaagagtgaactcctgccacatcccaagctaagcttcagcaaattattattttttttcttaggatgatattgtgggaatctga

SEQ ID NO: 58034 - DNA, 1102 bp, Homo sapiens
gaaatgattgatgttaagtaaaggtgctgggacatttggttttccatattaaaaaatatatatatataaatgaaaatatatatataaggcctaggtttgtgtaagtacactctttaatgtttacacaatgactaaattgccaacaacacattatccctatcattaagcaatgcatgaccatactgggttttgtgaatctgataaccaagatggctgctaagtggctaaagggcaagtagtttatacagcatggatacactggacaaagggatgattcacatcctgggaggatagagcaggacagctcaagagttcatcatgctactcagaacagtatgcaatttaaaacttatgaattgtttttctagaattttttatttaatatttttggactgtagttgatggtagctaactgcaactgcagaaagcaaaaccacagatggggggtacttctgaagttggaaaagagcggaccatgtgcttcctgagagggccttagggactctaaggatcctcaactaccctttgagaactgctgcataagaacataaattctaaagtgaatatttgatgacattcaggagaacaacactgtctaagtaatgttaccacaacagagtaccatagactgggtaatttataacagacagaaatttatttggctgacatttctagagactgaaaagtacaagggcatggtgccagtacctggtgaagacctttgtgctacatcatcccatggtagaaggccaaagggcagaagaagctaacagtgagagagcaagagagggccaaacttgcttttatcacaaagcccactattgagataaccagcccactcctgcaataacatcagtccactcatgatggcagagtcctcacatgacctaatcacctcttatcagaccttgctgcccaacagtgttgcattggggattaagttttaatacatgaactttgggggacacattcaaaccatagcagacacttatatataattgctgatacactgcatgtaattcttccctttctcctctttgagaagcatatcacagtgcaaacaagagcatcataggataaccttaaatctgctcttctcaat

SEQ ID NO: 58035 - DNA, 1950 bp, Homo sapiens
tcacacctgtaatcccagcactttgggaggctgaggcgggcgaatcacgaggtcaggagattgagaccatcccagctaacacagtgaaaccccatctctactgaaaatacaaaaaaattagccgggtgtggtggcatgtgcctgtagtcccagctactcggaaggctgaggcaggagaatggcatgaacccgggaggtggaggttgcagtgagctgagatcgcaccactgcactccatcctgggcaactgagcgagactccgtctccaaaaaaaaaaaaagagagaaagtggagcacctgatatccatgtgcctccattttggaaggtgacgctgcagacaacccaattctattcttctggagctgttcagagcaagcacttcccattgtatcacagaggacttcctccccacctccacaggttgtcctatgctttagcaattccctcctcttggcaccatacctgtatagtccaccactctgcagatgggaatgctcacaccaccatataagggattatcccattcatgaatgccaaagaaataaaatagtgataagattttcttcacctgagtatctcccacctgtatgaccctccacccatactgtggtgtcaaggaactaaaaggaggaaagattttgtcatttcttttatatatagtattggtgaggatgtggagaaattggaacactcatatgcttctggtaggaatgtgaaatgatgcaaccactttggaaaacagtttggcagttcctcaaaaaattaaacagttaccatatgactcagcaattccattcctgggcatatgccctagagaatgaaagcatgtctacctaaaaacccatacacagatgttcacagcagcattgttcacaatagaaacaatacacatgtccatcaactgatgaaggataaacagaatgtggtatatccatatattggactattactcagccgtaagaaggaaaatctagagagagaaagtaggtgagtggctgcctagggctagggggttgggggtttagggggtgatagctaaagggtgtgggggttcttttggaggtaatgaaaatgttctaaaattgattgtggtgatggatgcacaactctgaatatactaaaagccattttaaatggctgaattttatgatgtgtggattgtatctcaataaacctattaaaacataaaaagcctgtgtagtcggggagtaaagcgaaggagacagggagctgatgacaggccagcccatgtgggacggctccctgaggatagcagtgctccctgtggcctgcttgcctttaggcactgtcataggcagctgctgcctctcttttaggccttcgaggacatctacattgagcagagaaagaccatccgcaccatcctggaatatgctgacaaagtcttcacctatatcttcatcctggagatgttgctcaagtggacagcctatggcttcgtcaagttcttcaccaatgcctggtgttggctggacttcctcattgtggctgtaggtgtcttgctttctgtttcccaccccttccagcaggaacacagaaacaggggtctctctttttctaatggcagtagctgccctgggcccaggttatagatcaagatgtagatgtaggtgtgggtaaagttcctttcatagcactgagatcttcatattaggaaggggaactctgaagtccctgcatttgctccagggggactaaccaaccaactctttagtctggtgggtttggcttaacttagattcagagattaggagaagtggaatcactggtctcaaaggcccttgttattaggctggggacaggaaagttcttgccccaggccagcaggatgtcttctttttgtggctgggagaaggggtgagagaatgagatgggggctgttgggacgaaggtggtagtgggatctgtggtctctcctgctgaccatt

SEQ ID NO: 58036 - DNA, 1088 bp, Homo sapiens
gatgccctgaatttgatgtctcctcaattccttttttttgttgtttgtttgtttgttttaggtttgattctttccttaaagaatactttaagcaatgttaggattatctccaggaggggcttaacagagactcagaggattataagagagccctcaactactaaagaataacccagataagacccttattgatcctgtcctgggccagattaatcagctgagtaacagcttatctcccagcaacgtttagagccagccactgaattggcctttagacctcctccttcattctccacactgtgggcctatttgttatcagataagtcacccaccctgaagagctgggatcttcttaccttatatggtgcctatagccactcaaagcttagtttcttgcaatctttacctgacaaagtttcgtaagatgaagctgacccaggggactgttgagtccaggtacttggttgagaaagaatagcttcccttcagatatacttattaaggcctcatgaagaatctggcaactttcaattcttttggagttaagagttggctgcacttggcaataatagggaagtagatacctccatataaattcttattgataatgatggatagatggagagaaagggattagttggtgctactatgttctagatagggcttttgtggaccatagtttaggcagacattgaactctggaccatctgccttttcatgaaaattagggtagcctaatagggcaacatttacttccggatttgctttggacattgcccagggcttcagagaagataactacactggtggattatgagcacatgcatagatcaaggtccatatccctttttattttatttatttatttatttatttgagatggagtttctctctttttgtccacgttggagtgcaatggcaccatctccgctcactgcaacctctgcctcctgggttcaagcaattctcctgcctcagccttccaagcagctgggattacaggcatgcaccaccacgcccagctaatttatttttgtatttttagtagagacggggtttcaccatgttggccaggctggtctcgaact

SEQ ID NO: 58037 - DNA, 1965 bp, Homo sapiens
agcccaggagttggagaccaacttggccaacaaggcgaaaccccgtctctactaaaaacacaaaaattagcggggcgtggctgcgcacacctgtagtcccagctactcgggaggctgaggcaggagaatcgcttgaatccttgaaccccggaggcagaggttgcagtgagcagagatcgcaccactgccctccagcctgggcaacagagcgaggctccttcttaaaaaaaaaaaaaaaagctaagctgacaagaattgggcggtgcacctgccaccctgggagcctggtacctgagcccctcttccaccggcagtcccacgggctttgctgctcctttccaacggattaacaaactctctgctctttcggtatttcttaacgtttataaaccgtccaaagcaccactgccccaagactgtgctcccattttacagctgagggcaagggcactgtgaggtgagggagaatctggcccatctgcagcccaggcccccgggggcgcgcgccgctctttaggaaggagcagctttgtttcccaccagccctgcactgtggcgagcgggccggggctgccgggcgacgcccggtcgccgtcgccgccagtgatccatagcgtgagcaggacgaccagcgccccggtgcccagcgcccccacgaagccggtgaggaggccgagcgccagcggccccgcccaacccatggggctccgctcgtacaggggctgcggcaggcgctccacgatcagctgcagggcgtcccagtccggcgcggggaccgcggcgcgccgggggcgcggggccggggcaaagggcacgcgggcggcggcgccgggccgcggcaggaagcgctgcccgaacttgcgcagctgcagcgtcgcctgctggtggaggttcttgcccagctccctggccacgtccgggcggccgctgcgccgcagggcccgagccaggcggtcccaggacagggacgcggcctggggggccagccaggccgccagcgcctcccggcagccgtcggacacctctccaggcccggctaccctgcccgccgggtcctcggccgcctctcgccgccgccgccggctcggagaccccgacgtggtgttgagcggctcaggccgcgccagccggtcttcagaaagccgggacaactcggcctccacgtcgggctcgggcgcctccaggagcgaccggaaatggccgcactcctccggggtcagcagctcggccagacggacggctgcgtgagggcccatagcgtccacggcccccgccggagccagcgcccaaacccagagcgtgaggaccaaggcgctcgccagagtccgcgccgccatccctggcgggaaccagggaccgaggactgtgcggggacggggacgtggacgggctccgcgccggtgatgggggaggggttccgaacgcccgcggattgtgggagggaggaggctccgaacagtcgggaagcctagtggaggaggggactggggacaagggggctgccaacacccagcgacggagacggggactccgacatggcacttgttggagggtctcacgaaactcaggaactggggtaagagggcttgcaacacccaggaagggggttctcagccccccaggaggctaggattctgggcttttacattgtagctcctgccctaggcctcctaatagccactaatacctcaaactgaacaagttaccaacatctcttctaattcatgtactccccaaccgttcccctttacgaaaagccctagaccccttgctctccattaacttcgatattcaatcaattcctacattctctttttttattttcttttgtgcagataggggtcttgctgtgttgcgcaggctggtctccagctccagcctccgcctctgccaccacctcccaaagtgctgtgatgacaggaatgagccaccatgcctggcctcaattcctaaattctcctcttg

SEQ ID NO: 58038 - DNA, 499 bp, Homo sapiens
agtggaaagttcaggcaggactgagactaagcccccaaggtcagagaaaacacccctgcccatctccctcaccctctcccagccctggagctccagacctaggactccgggggaatggggaaggcacatttcctcacagagcccccacaagtgagggatgctcactcctcctcagagcctccagcagagatggctgaggtccagtagctgattttgtggccagactgtctacccagatggaatcctcctagcataagtcactggggacctctgccaaggcagggccaggggacatgacctttctggagactttctgcttaggtcaccttcccatttgggccctcccaccctaccttctgggtctcaggaaggaattgggcaagggcatcctaactctggatagcccttcacagaaaacactcagcggaggggttgggtggggcagggggtggggagcagcaggagaggaataaggcctcccttctctcaaaccccacag

SEQ ID NO: 58039 - DNA, 2165 bp, Homo sapiens
agaacaggagagggctcttgcggtggggaagtttgaggggccctctctggagagctgggcgctccgggggtcccccttgttgcctgtagccccagggtgaaggtgagtacagcctcctacaaccccctgactctgagacgcgggctctgttctcccgggccagaggagaagacatgaagagggtgggtgttaggggcgcggggaccctaagtagcctcggcctcctgtcactgccccgtcaccatgctggggaatctccgggccagtaacccagcccccacccctcccacacacacacacaggggccgctggacaaagacctgacggagtgggaggggcctgcgggccggccctcgggctccggacgctggatccttctgggacccgaacccgcaaaccttggctccccacccccaggccagcagacgcccccgagccggctgctcgctttcgctgcagcccccgcaccagagggggctgcgagacgggtgcccgtcggcggccgggcggctatcccctgctctgcccgccccctccccccgagaagtgaccctcggctcccacgtacccgctagggtctctcgccggccctgccctccgacccccgccgagctgaaccccgcgactagcagcccccgccctctcggccctctccggccccgggccggcggacaaagctccggacaccctgaccgaacggtcacctccccccgccccatcccggcccgcccgcggccccgtacctcggcatcacggccgggtcctaggtgagtgtgcgcggcctgggggcgcgtccggcccggggaccggggcggcggcgcgggccgggggcgacaggcctgggctggggggcagtggcgctcaccatcctggagccgctgctgctgcggctgctgcggccgccgcgggcgggagcgggactgggcagtgggggtggccggacaaggggcggccccggctccccccgcaggaaagacccccacccccacccccgcctcccctcgcccgcccccagggccctccctcgcaggccctccctcccctcccctttccctgctcctccctctcctagtgcccctctcttcccccagctcccgccccttctctggcccctccacccccggcttcttccccgccctcccccacctcgcccccgccccgcccccacctcccctgggctcgcccagcccctccttgccaccctcccggctggccccgccccctcccgcccctggctctaaaataaattagccacagaggggaaaaaagagcaagtgaccctcggtgtggagagtgtccttcgccactctcagacccgtccgccccgcctctcccggccgtcggagcgggaagctggggttggggtgggggtcgggccggcgggtaggggtgggggacggcatggggacggggccgaggccgggactgagcagcccagcccgtcgagcgtgtccgctggatgtgggcggcttcctgggtcgaagggcaaaggggaaggcagccggcctgggcccgccccgtccgcgggccgccccagaccccctttcccaggactgccttggccccctggccccagtctggaggactcttgctcacttcctccgcccccaggtgagctgagaacccactgcgcgcgggactctgctgcgcctgccctcccgggctgcagagggcaggacgcaccgccaggcaaggccgcggctctgcgctgatgccactccgggagcgggtggctgcgggggaggagggcgagcactggacgggggcagcggagtgtagggtgtgagatctaaacagagggctccactggagggcttgcccagaaggcggcagtcacactgggccaagcaggatgactggcaggaagaaaagatgagggatgaatcccagacctctagtccactgagagtgtccaaagacatccgttcaatagatacatactgagtgttaactttgtgccaaacattggactgtgcaccagggatacccaagagagtccaagaggcacagccctgtcttcctggagctcccagtcgaagggtagacagaattctgcccgacacacacacactcaaggcttcatcagggataaaggccaggaaccggctttgccccaggagaaggtaggaggagggctgtgctgatgatggagggtccagagaacc

SEQ ID NO: 58040 - DNA, 890 bp, Homo sapiens
tatctctgaggagccaggagcccaggcctctgggcagtgctctcacctctcctccaggcagccctcccagacctccagggttgagtacatctcccatggtcctttcctctccaagtaacttcatctcttagagacctgccctgagacccctgaaaaatgctgggaaagtctggctggtgacggccaggaggggccggggtggagagcacaaagcaggcttgtctggggcacgggaagaggccccgccctccgtgctgctggtccaacattcctcctggacaatggctgccttgggaatcccgggaatgaaggaggcgggcggcttcccgaacctgcgccctccacccccatcaagttgcgccctttccccagatggaaagcaggggcactttgcattgcggcagggtggggaggccagctagcctccatgcctacagcccccgcccctccttttaccaacactaatccacaacgccccgcagccgagtcctgctcagccaccccatccccatggaccttgggcgagtcctgctccttcaactgtaaaatcaggagcttggattcagtggttgcaaaactccccacagatctcaaaggccgaaatgtagtgactaaggcatgcacaggctttggagccaggttgcccgagttcaaatcctgggctgccctttaccctgggaacttaagcccctgggttgccggcttccctctcgcaaagtgtgtttgttgatacagctccactccctcccgatgggaaggcaaactcctcaaagtctataaatcccgatccatgtgtaactctgctcaaaacactaaccagatctccaaccccaggccccctcataccctgtgcggattttggcccctggacatttgcccaacaactggcc

SEQ ID NO: 58041 - DNA, 966 bp, Homo sapiens
ctaatgtctctccattctctgccaacctccccactgcctccgtgtaggttctggccttccagcccagagctctatccaccctactccattgcccatgcccccagtacaaaccgtgggctttctccgtgccagctcaagggaggtctgaccccatggggacgcctgactgcaaagggaaggatgccgccttccaccgcagcaccaccacagctccgtggacccgctgggaaaggggtggggctggcgaggaggaggccacctgccagagtggcagcagacaggccagctaaatccttgacctatgatttaagaggtcgggcatagttcaatagagccctccaggctgagtcccagctcattcacacaggtcagagggatgaggggcaaggcggagaggagggccgtctcctccgagggcccttggcttcctccctagccttctggggcataatccagcctgaaaaccacaaaaaccctgaaaaccaccagctccattcccatcagcgtagatgccccctctgagaggccgggggaggagggcggggccgggagggggtgggcagcagggcaggaaagtggagatttaggcaggcacagcgcctggcacacagcaagggcgggaaaggctcctccctctgctaaccgcggcgccctttgttaggtcccgagacgcagcggagctgcctggcttccaggtcggccctggtctctgctcccctccgttgcctttggaatttgccctcagacctggaccctaccagggaacagcgggattgtctgatggaattccacgtgcaaaccgagagaggttttgccataaattctagtccggccccgggaggagggccacgcctgggccccactccccatcaccctcccgcctcccagacccccggcacagggcctccccaggccgtgccccgggctgcccctgggagcgctatgcaaatgagatgcaaagtaggc

SEQ ID NO: 58042 - DNA, 3797 bp, Homo sapiens
ttcttgtgcaggcacagagagagagagttctggtgtctcttcctcttcttataaggacaacagttctattggattagggccctatcctgccctaataacttcatttaaccttaattacctccttaaaggccctgtctccaaacacagtcatttttggtgtcagggcttcaatatatgaattggggttggttgagggagacacaatttagtctataacagattatttcttcaatattataaaagtgaattccagatgaattaaagactaaatattaaaaataaaactgcaagattaataaaagaaatgaagatctttgtgatcttggagtagaaaattcttagtaaacaagaccctgaacacaaagtataaggagaaattctggtgaatttaaccatatcaaaattcaggagctatttcaatgaaggtcaccatagataaagctaacagaagggtttatatagtacagttgcctcatctataacccatctgacaatggctttattatctagaatattaaaagaattcctgaaaaatcaataagaaaaggataggaaaattcaatagaatactgagcaaaggccatgaacagtcaattcacaggagggaaaacaagattggccagcagggcatgtggagagatgctcaccttgttgataatcagaaaaattcaatgtaaaatagcaatatcgctttatagttctatcagattgacaaacattagaaggctgaataatgacatgtgttgtctaagacgtagggagactcttatgcactgctggtaggcacacatggtgaaacagagtgcaacctgagtatccactcagtaagtgtgtatgtgccctgtgatctagtgatctcagagaccccgatgggtccacaactagatacgtatgagggtgttcactttggcattatttatagtgacaggaagttggaggcaacctaagcatctattgcaggaagaagggataggctaaatgaggtggatgcacactatggaattctataagcaggaagaaagagggaagaaagagggaagaaagaaagaaaaaaagtggtgcactctacatctttcatcaagacagtgttaattatagtgaaccccaagtttctcttcaaagaatcagtatgtcagtatgttcagctctcttattctttgattatccattttaaagtttagcttcctggttctcttccgttcccttgctcctggttttagtaaacaactttccctctagtcctaatcagtagttcacatctgttctctggtcagctgctccatcctgactcatcccgtttatctgctttgacctgagtcatcccagtcacctgctttgacctgagtcaccctggtcacctgctctgatctaagtcacctttagttccctgttcctaactgtccttcccgccaaactacccaccccgccactctaactcatatccctgctctctttaaaatagccaatcggaattagcttaggctgtgcggtccaaccctagccaataggggaacgccacagcagtagggccgtgtgtcaggaataagaactccttctcctctcctgtccaggtgtgctcttgccattgttccattcacgactcgcacccttctatagaagtaaaaattgccatgctgagaaaattaaatttatgttcgagtgctatttccttgcagcattgaaaatttatttacaacaacagcatgaacttttttcctagaatccctatccatcagacttctgtttgcatttcattggccaaaactgcattacatgataacacctaactgaaaggtaactagagagaaggggagttatgaacagggattgtgttagataatcagagatgtctggtttatcatctgatagatttttttctaactgctgtatagaattccatagggtgcatctatcccattttgctgtgatggctagaggtttagcagccatcttgtgccaaggaggaaaagtcaagagaatcccagagaaggccctgacaagtttcttaaccaacatcaacagtttcctattcctgaactttttatcatgtattaaaaacaagcacctctttgtttaagctacatgtgtcagagttcaattgcagacaacagaaataaatctggacctggtgcagtggctcacgcctataatcccggcactttagggggccgaggtgggctgatcaactgaggtcaggagttcaagacctgcctgaccaacatggagaaaccccgtctctactaaaaatacaaaattagccggggtggtggcacatacttgtaatcccagctactggggaggctgaggcaggagaatcacttgaacccgtgaagcggaggttgtggtgagccgagatcgcgccattgcactccagcctgggcaacaagagtgaaactctgtctcaaaaaaaaaaaaaaaagaaagaaagaaagaaagaaagaaagaaatctgatcagtttaaacagaaagggatggagaagcaggcttaggtccaggaacaacccccagctttgagagtcacatgacctctgcctgtgattgagaaaacaacagtcactactacaggaagctgatgaatcaggaagctgctcaccagagccttgctgctgctgccatgacctgtgacagcaaaacggatgtcccatgctacgtagctctgttccaaatttatatcttgcacaagagcaggacgcaaaccacagagtcatagctcaagggaatctgggaagggttgttttagctttccaacttctgcagcgcagaagaaacactgaaagcagttttagattaatgttgaggagcccgtctattatggacaacataccattcagctttttggttactaaaaaccaaatgcacatccaactgatacactgcacctaaagcaataaggatggagcttaagtgaaaaagaaaaaactaacagaataagttctatagcacaattcataacatgttagttaaaaacacatacaagcagagcatggaggctcatgcctgcaatcccagcactgtgggatgccaagacaggaggatcacttgatgccaggagtttgagaccagcctgggcaacaaagtgagatccccatctctacataaaaaagttagacaggcgcggtggcacacacctgtgtgcctccgagaagctcgtagcttctcgggaggctgaggtgggagaatcacttaagcccaggagtttgaggctgcagtaagctatgatcatgccactccactccagcccaggtgacagagtaagaccctgtttctaaaaagaaaaaaataaaataaaaacacacaaatcagtactatctttttcaatgaaatgtacattttcaaggatatacaagtgccagttggtaaagggtggaggagaatgggatgtggggattaagggtgaaagagagaaactaaagaaagtaaaacaaaacaagagagaggtcttgtacagtctgatgatgggagtgataccaatgggggaatatcattggctccattttctacatctgtggaccaagaccaatccatcaagcttaatatgtaatataaatattaaagaatattttgataacaatttatcattatattaacagatcatttaatttaaatatttcatatttaatttatcacactgaaactaatctattaaatttcatacatcataatttctggccaatccctccctcactactgcctgccgcactttgtgccccgactgcccacctgcactagacacataatgtcggtactcacaatttcgtttgtttgtttgttttgttttttgagaaggagtttcgctc

SEQ ID NO: 58043 - DNA, 2820 bp, Homo sapiens
cctgattcctttctgcctgcagggggctgggggggtggggggcagtggatggtgccctatctgggtagaggtagtgtgagtgtggtgtgtgctggggatgggcagctgcgcctgcctgctcggcccccagcccacccagccaaaaatacagctgggctgaaacctgatcccctgctgtctggcctgctcaaagcggcaggctccctgacgcctggctctctccccacccctatggccagcatggtgcaccccctaccactcccgggacaggatgcaaaagaggctccagagtcagagtgccaagccagggaatcccagtcccagactcagagcccgggcctgcactttgccccctgcccttgatcaaccccactgccccaccagagctgccagggtggcacagggccctgtccagcccctggcacacacttccctgccaggcctcagcctctagcataagctccagagagccagggcccatcagtttctctctgtggatttgtatctcagctccatgatgccttgggctttctgtctcctcaacaagagtgcagcttgctgaatgtcagctgcctgagagagctggggcctgacttactagggcattaaatcctaagaggtcctactgaggtgtggcaggatcacaggccagtggaaaaagggcaggtcagatgggcaaggcccaggactttcagattaactgagaggatatcgaggccaagcatggcagggggaaggtcagtgggtgtcaagagacccaggtctgaccccggatgtttgctccatgtgacaaaagcaggcctgtctcaggaccttttcttttcttttttccttctttttttttttgacacggagtttcgctcttgttgtccaggctagagtgcaatggcatgatcccagctcaccgcaacgtctacctcccaggttcaaatcattctcttgcctcagactcccgagtagctgggattacaggcacatgccaccatgcctggctaattttgtatatttagtagaaacagggtttcaccatgctggccatgctggtctcgaactcctgacctcaggtgttccacctacctcagcctcccaaagtgctggggttacaggtgtgagccatcgcgcctggccaggacctttgtttcttatctacatattggaagatttggtcctgatgtcctttgaggcttctttagctctagttctctgacacttcagcctatatcacagctaacttcttcagtctcatctattccttatgctccagcccctggcaatttgcctcaagatgggggtttgaaaataactttacctgactcaaggagtgtctggagcacctcctagtctaagtctgcaagctccagttcttgcctaaaaccatgccagtggccacccttgggctcagacagctctgggccttttgaccacaagccagcccctcgccctctctgtggcatagtcttctctgccccaggactgcagggcggcttcctccaaggcttccaaggctcaaaagaaatttggctccatccaagaaggctccagctcccctactggcccctggctcaggcccacacccctggccaggcccagagagtgtgtctcaggagaattcaatggctctagagagacacacagaaagtttggcatttggaaatttcaaggatgtatgtatgctcacgtatggagcaggttgtcctggtccctgggtgcagggaagtgggctgcagggaagtggattggaggggagcttgaggaatataaggagcgggggtggagactcaggctatggacaaggacagccccaaggttgggaagacctggccttagtcgtcctcagcctaggggcagggcagtgaagaaagctctccccgctcctgctgtaatgacccagagtagcctccccaggccggcatcttatgtgtgtcttccaccatcctcatggtggcacttttctaggcctgtctcccagcattgtgcaaggctcggaagagaaccaggaagtgaaactgggtgaaaacagaaagctcaatggatgggctaggttcccagatcattagggcagagtttgcacgtcctctggtcactggaatccacccagcccacgaatcatctccctcttgaaggattttatttctactgggttttggaacaaactcctgctgagaccccacagccagaaactgaaagcagcagctccccaaagcctggaaaatccctaagagaaggcctggggcaggaagtggagtgacaggggacaggtagagagaagggggcccaatggccagggagtgaaggaggtggcgttgctgagagcagtctgcacatgcttctgtctgagtgcaggaaggtgttccagggtcgaaattacacttctcgtacctggagacgctgtttgtgggagcactgggctcatgcctggcacacaataggtctgcaataaaccatggttaaatcctgagctccggagtcttcccaggccgatgcctctgcagtggcccgtcgcagaggtccagataaaaccagagggatccggggagaagagggtcccaggatacacgcccagctttgcccttagacaggtcacagtttcctcacgcccctgctcagacccccgcgggggcccaaatctcagttcctaccccagattgggagcagcctagtcgccgcacctgccacgtcgccctctgctggccgagggctgcccagcggccgcctcccatccccacacagggaccgcggggcctttcccggcagggtggggcagccttccccgcacccgggggccaacgtctgtgtgctcactgacttgctgttctgcag

SEQ ID NO: 58044 - DNA, 2116 bp, Homo sapiens
atgcataatgccaattgtttaccaaaagggttctacctaccagcccaatcagagtgcctcacacggcaccctcacccatactgtcatcaataaagagctttgctatgttctgaaaaggcgcgtgccgcgattccatcacacaggctgccgcgtccagaggatggcagggggcgaggcgaggcagggaaaccagttaggagaccgcggcgatgatcccaggggacgcgctgggggcttgaggctaggcgcagggatggaggaactggaacacgcacgggattcgtagaatattcgacgggggcgggggatcgactctgataagataattctgcactgcgtggggtgcaggagagggaggagactgcacgttcggctccggcctcctccgcgccgggctcggcaccgatccgcgaagttggccgaggcgtgagccccgcccacccctttaacagggacactcccctttaaggcgggcgcccgcgcgcgccccggccccgcccttcgggggcgcgcgcggcggccgcggcgccggctccgccgggagcgcacgtgcaggcgccgggcggaggagagggaggcgggagccgggccgcgggaggaggggaggcgccgggggcgcgcgcgcgcgcgctgggcgctgctgggctgcggcggcggcggcggcggcggtggttactatggcggagtcggccggagcctcctccttcttcccccttgttgtcctcctgctcgccggcagcggcgggtccgggccccggggggtccagggtgagtcctgggacggggggcgggggccgggatggagagggcccggcaagggcgaggcctcgagccgcggccgctggactacagcgcgccccctccccacgagcacaatatggccgggtggggggcgcagaggagtcggggtgacccccagtcagcttccccgatctccgaggcgcagccgcccggcggcgacggagctcacgccgggcccctggggacccgagccctgttccaggcggaactggattcgggcagttctcaggggtcgcgctcccagcgccctcgtgttccagagaggggagtctgagcctccagctccaagatttggaggtccgtggtttctgcccttcaccgtgtccaggggcggggggctttcttccctccctccaggtgctcctggggggcgtctttctcccgccaagactgtggggttcgggcggtggggtcttagcctctccgagggaacctgatgttgagagtccgcgcacctcagactgtaggggaaggggtctctaacctttccttcaggtcctgcacttggcgtgtttcttcccctccctccactgcctccctaatgttctgggaaagggagtcacatttccccttcactcaatcccttgagttcagtggggcaatcccccctccgccctccggcactcatgccccgtggaggctatttggaggaagtgggacgaacaggcccctaaacctttttggagcctggctttggaatccctaaccctatggaaccgagttccccaagggttgatgtgaatctaggtgtatttgctttcctcctcgcctcccccaccctaccccggggggcccattcagttaatcactttgtggatgcctttcaggtgaaatcctggaacctgtctccaaacccccaagattatttaaagatcccaccactggactgtattcccggcccttggtcagtacttatttaccttcctacacgatgcctcttcccagcccgcccaccctcacacaccccttacctcccaatccccacagtctgcggctcgccttataccacccccccactctcctctctgtagaagcgggtacctttttgcgggacacttcgctggctgtgttgtttttgaggctttgggggctgagaagagcagatgaaaccctaaaatatttcatttaagagagtcttggcgaatgtgttttggccttggggtagcagatgaaggttatatttggcagttatattgaagcgattattgacccacagatggatctgggagagatgatcaggattgtattcgctcctgacgtacaaagcctgatgctttgacttctcagcagcccctaaccttccagcaatgggaga

SEQ ID NO: 58045 - DNA, 1203 bp, Homo sapiens
gtaaaattgagttagtagcaggagaacatgacattcatttctcaagacaaaagcaacaagagagatatttgacattctcataggaacattttgaaattttgtgagcggactaaaaatctaatttcaagccaagccttgtaattttgttgagtggacatggattttaagtacagtggaagtgcagtcttgtagagacctctgattagttttgtttaaacagctcctggaacagatgtgataaaacatattaaaatggctactctggttaaaggttaaagccagatggagggaggaggctggttttcagccctagaacttagctgccttacaagttgtccttgaacaagtaacttaacctttctgtgactgcctcagttttccctctgtaaaaataaggaaatattttgtgtcactcttattgggacatttgtgagactgacttactgatagccagttggcggggaggtatttttagacacagtttctgacttcagtgaataagcaatgctgggttacttttttatcttaaggagcagaaaaacatactctgtgattgatagacgtacagcatgtcacagtgtggttttctttttgtgcttttttgtagacccctttcagatttcctcaagttaatttctgtctctggcaggctcttacatcgtcgactaggcagcatacctgtgctaatcaaagacagtctggagggagtgacctgctttaggctttattggtttggcaacgttttaattcttacgcaactctgggtatgtttatggcactatgtaaatgttacataagaacatggaggctgagaagtggccagaatggtgactgtgaacacaggaaggttagactgaggactttatccaaaaggaccttgggaatctgcaatcagtacaggaagaacctgcacttattttcctctaagaacctttttagatgattatgtctttcaggtggactgctgtgttataaataggtttattctccaccggtgagctaattgtaaccttgctaccaaaatatgaatcagtaaacgatgagacgtgctgcttcttccagcatgtcctgttgaagctgcttgttgcattttggaacatgagttgaattgggttgcagtctgttctcataatagctgaggagcacagggtgttgaggtggaatggaattatcagttcgtggtgctttaggtcatcttaattt

SEQ ID NO: 58046 - DNA, 3168 bp, Homo sapiens
cgagttgtgttatttctactacgtaattcttccgccttggaataaggagagttttaggtatgtttatatacacggtgtgtaaaatttttaacctgatgagtcactatgaaacagattctaaggggctgttatcattagtccagatttattttttcagagagaattgaatttagtgtgcgtgatttaatgaactaagatttacagtaaatttagatgtttttataatttatcacttttgtttcagtggaaaatgaatgttaacagaaggctagccaaaatgtctgtctttaaaagatgtttaggaaaaggcatataaaacagagcagaattgtccagtgttgggtcagtgatcaaacagtgtgaacttaaaaacaaaactagattcaaacatagctggaaaggattttagaggtcatatagttcaatcccttctttctggttaatcatgagaaaaatgaggttcaaagaggttaaatgacttgcccaaagccatgcaactagttcctgatagagctgaaacttgaacagcagtttcttactgaaacttgccacttcctaattagtggttaaggagacacatttttacttgggtggtggctttttgttttgtttttaggttttacattgagggggggattaatatttattgaatatctactagttgttaagtactttaaaaaatatattagctgggcgtggtggcacatgcttgtagttccagctactcaggaagctgaggctggaggatcccttgagcccaggaattcgagtccagcttgggcaacataacaaaaccctgtctctaaaaaatagatatatatttcttcatgtaattcttacatagccctgtgaaatacagtcacgtgccgtataacagcattttggtcagtgagggaccacactgttacatgatggtagtcccataagattataatgctgtatttttacttcaccttttctatgttagatacagatgattcttgtgttacagttgcctacagtattcagtacagttacatactgtacaggtttctagcctaggagcaagaggctacaccacttagactatgccatctaagtttgtgtaagtacacgctgtgaggttcacacagcaacaaaattgcctaacgctgcacattaacagccccactttacagattaggaaacgggtgcgagaaggttaataccttgctcaaggtcatgtggttaatattaaagctggcatttgagcctttctgacctgtcctgctatgatccccactgtggctactagtgatggtaattctgaccttttcaggggtatgggcagcggtggtagttatctttaaaatatatctttttcagacttctcactctgtaaaatatgtaattagacatagatatgtgtagagtggcctttctcagaggacccgcagctcttagcagttgcttggctaatcttcataccatctctgtaagataaacggtgttttctggttgggtagttgaggcccagataggctcagggactcacccagcgccttatcacaaacccacacggcccagcccccagttccgttcttcgtcctgtctagcatagatttcaccacttttgttctttcctgtcttacaccaagattgtttaagtacttcccaaaaataatgagccacgtgtgggtgtgttcgttctccagaatgaatcactgtgaaagaggttgtgaactaacgaaataagcataagtatctggaagcagaggctcctgactattcagtccctctaattggtgggctctggagtgagcgcttttctgaaaggcaactgtgggtttgggcttgtgtctcactgtgctcagaatagtcctctcttgaagttgttacttttcccttcttgcttcccaaaatagaaccaatgttgttctctttgctggacatcacaacacaaatattgagaggtatgctttccatagagaaccccttttaaagtgcctgaatgtccccactgccacaaaggggaatgggagttagctttcttaagattccagtgtgagtaaaagagctttggatcaagtattctgtgagtttcagaagtaaatgtaaaagcagaaagaataagagagggagcaaacaaaggtatttggaagggaaaatgaagcgattccttagtcttttttgtgtctaaatgggttagaataaaaattcaggagaaatttacttttaaaaatcccttttatgatttggatcctagtctaataggcacctactttaaatgttctgcctttaagaaataacactacccaaactctgaagcaagaggctgcatgttttggaatttctcccagaagaaagggatctgatgaaacgtgaaaaaatacaacaggccataagtgaagatctgcactgtctacactgtctatccacctgccagggctgcctccttggtttcctcgggtgggactagcaaggaatcggctcatttatagaaagcctaaggaaggaggggttgggcactgagatatttagaatctgtctttggatttgaaaagccaagagatgcctttcagaatattggaggaagagacgaagatagactgtgtacagcctaaattggtgagttatgacagggtggcttttcatgggactgcccataagtgtctcatctccagggtccatagtgtgaatgcattcccacttgttatccagatagtatttacttagtgtgtgatctgggactcagttgggcccccaccacctccacccgccaatgtgtgagtgcttccttcagcacttccgagccccagcctcagtgttctagtgggcaaagcaacactcctgcccatgccaagaggtcagagctaggttagtctcatgggagacagtgttggggagaaccaactgctgctgtctgtgctattcttgttagttgaataaataaaggatttcagattccagggctgctgaagaggctttcagaggcgccaaattcatttgcagtaatttcctgtcaaatgggacacacttatgtatgatagttacccagcaaaactcattaatcccagaggtgattgtgtacactgcctgtttgaaaaaaattcgtgtgtgtgtgtgtgcgcgcgcacactcatgcgtgaatgcatgtgcatgctatccaggggcctttcaggatgggttaaatgtattgtgcacttttaa

SEQ ID NO: 58047 - DNA, 2273 bp, Homo sapiens
gtggtgagtgcatgcccttgttgggctagtggctcagcttggagatagggtaccccgtcatttcatttttttctactcttgcccactcacttggtttgacgataaagatgccttttggatgttcccgaaggtgacaaaggctggggtttctcagcagttgcttttgtagattagagggtgaggaagcagattttcaagttagtcccagaggtgcccgcagtgtttagagtagtggcttagcagccataggcagcggtgaggagtggaagaaccaggcagggattcccacgggaggatgtgggactgatccagaaagagatggccccagagccgagcaaaggtgactcctcaagggaggatgatggttagatgtgaggagggaccagaataggaaaaggccagtgaccaaagccgagaaacaccacataccatccttttgcaagcctaccattcaggaggcattactgtggagcccacaggaaaaggagagaaactaaagcagagcttagaggagctgtgggaagttaaagggcagaaacaggcatctgtgtaggggcctgaggcggggatagtaccacgaaatgcgtgaggtgacaaagtgggttgtgggtttgactgtggaaagaggtgccttaactaaagaagttgggcatttgagagcatctaggcagcaagactagcccagaagattagagagatcaagggagcctgaacacatcgacagggaaaggggtctttttcactcttcactttgaggggggtgtttttactctttcccttgtttttacttctcattctttccctctcctctctcacttgactcaggtcacctcaaggagcctgagcacccgtccatgtggggcccggtggagctggtaggcatcatcgccggcccggtgttcctcctgttcctcatcatcatcattgttttccttgtcattaactatcatcagcgtgtctatcacaaccgccagagactggacatggaagatccctcatgtgagatgtgtctctccaaagacaagacgctccaggatcttgtctacgatctctccacctcagggtctggctcaggtaccaagttcttcagggcatcatgtctgtggttggctttcatcagtttcccagcaggatagagtgcttgtagagaaggctggaggccctgcatttgtttctaccagcattgagtcatttggtttcctagttccccttcttttggagtctgacgtgtaataagataagataatgggttcacagaaaatctctcattccgtgggattcccaaggtctagtacacaattatccactacagaagtcctgcctctctaagctttgcaactgtacgtacatctattaaaattcagctggtcccacctgagcagtggagtgctcaatttcagggccccttttgagaaacaggagtgtgccagattcctgtgaggtggtgacagctaatcattgatctctgagcaaccacaaggggagtttaaggacatccagtaaagcttagagttgggatttggtgaatcattgacttgtaccagttgcccaagggtttttggtgggggtgaaaataaaggcagtgtgggcctccagcatagcatcagcactatttcctgtactgccttttgttgaccaagtctttctcagatgagggaaatgaaccaaacactggaccttggcataagacgagaatttaagataaaggagctcggggttgtttaggtctcagggtatagctcagctagctattaaatgtgaacatgaatgcaaaagaatttttttacttacttatttatgtatttatttatttagaaacagagtcttgctctgtttcccaggcaggagtgcagtggcgcaatttccgctctctgaaacctccacctgcctggttcaagtgattctcctgcctcagcctcctgagtagctgggattacaggaatgcgccaccacagcgactaatttttgtatttttagtagagacaaggtttcgccacatcagtcaggctggtcttgtgttcttgacctcaagtgatccgcctgcctcgtaaagaatttttttaatgaagataaaccattatttttgtgacaatggtattgcattcctttttttttttttttttttttgttttaagatatggtctcgctctgttgttgcccaggctgcagtgccattgtgcaatcacagctgactgcagccttaacctcctgggctcaagagatcctccaccttagtctcctgagtagctgagatgtcaggcatgtgccaccaa

SEQ ID NO: 58048 - DNA, 1279 bp, Homo sapiens
taagctttggtatggatggtggccgtctccctacagactgggagctgttagagggcagggatcctagctgacacatctatgtcctcgccttggttggaggtaggtatgggtggcggcgagggaggagatgggggtggggctcaacacactgtccagcccctgtcgtctggctgggtatcgccagtgctcaggggcgagcggaatggagaggaggcggggctggggcgcacagccggcaggggatccctgccggagtctgcttttcacgggttcccgtctagaccagagttggggctcagcttggagagatgggacaggtggaggtgctgggggttggagccccacgcgctgctcaagaggctgcaggctggccttcaaggcctgggctagactgcggcggttgggggctggcggtgcggctcgggtggagtccgccgggcaccgccctccctctccaccctcgcccaccccggggccgcgaggctgtgggttgagctgcagaggcgagctccctcctgggcgtgccgccgccgcgagtggggtgggagcgcagagggggcctcggggttatgctttgctgggatctgggaaggaagcaggtggcagcgccggagtgagtaaccgcctcccgaggcagctagtcccgccgcctcaggaagtcctggcgccgtagcgcaccgccgcccgccacaccgggaccttcccctcgcactagcccgcccccaccccgcctccatctcgcgctcccagccgcagacacgggcgcctctgcactctcaacccctcacccacgcagaccctggcccgccggtgacctcccctgcggctcctccttctgccccggcccagcccctcccctgctgctcctcctcctgccccggcccagcccgtccaccgtcctctcatccccatggcctcgaaccccagcctgccgagccgctcctcacagggtgctgtggctccccgctgcaaaggggcgggtcctggtagggggcgtggcctggccgacttgcggggcggcggcgccctctgccggcagactcgggaacggccacactcgtcacctcgcccccggcccggctcctggacccccctggacctctctgccagctctcctctctcctggaaatgcgcctgcaggactcggaacgtgcagaggtcggtcctggccccagccgtgccacgggctatctgagggagagtcgcggcctctctgaggcttggcttcctttcctgtgaaatggctgtggtgaggagcaaacgctcagcagtgaagaag

SEQ ID NO: 58049 - DNA, 1048 bp, Homo sapiens
agccaccgccccaggcctctttcggcactgccctcaaccacatgggcctcactgttcttccggcgtacccagactttccccatctcagcgccttcccaccggtcctgtgtttccatggcctttccccgggtaggggcctttcttttcctagcttcgctcagttccctgctacattgtcgcctcctcgcagaagccgtctctggccgttccgtatcgctagcgccctctatcattcgctagcagctcacccggctctgtttttcttcattgcacttctcgttatgtgccgttctcttataaatgtttttgtctttatccctcccatagaagacacctccatgaaaggccagggctttccgaggttcttttcctctgtggttcctagaagagggcctggcacatagccggccttggctagctttttgcgtaaatgtgaagggatccaccttcctcccttataagaggtagcagtacctcctgttaccagcagagggcaccaccgtacagcacttgggggccgcaggggatcctgctgggatgggaggtatttaaaaagcccacaggcctctcctcccataatgtgggcgctcccacagctgggaccggaagcaggagggccccctgcgctaatctgccctggcagcagcgagctggcacgccctgggtgcatcatccggtgtgctctggtgcccaaggtcggaataccctcactggtggcttggacacacccctgagcagctgatgcttctggacagatcacaccctgtcccgggctctcaaaatgagggcaatgacatgagctgcactgctcgctcacgcgtttgctgtgaggttgggacaggagtgcatgggaaatgttttatgaatgtaaacatgggacaaatataatttatgcacgcctttattggtagtgcagcagattgacaacaaacgaggggagaagataaggtatttaaaggaaattgcaaggctaaatgaaggtgggaattaagacagtgaaggagaacgaagaagttaaaaataacaactacctttcaccaagagctta

SEQ ID NO: 58050 - DNA, 1649 bp, Homo sapiens
tcaggacaggatggttcttccatttccaaagagggctccagtcacatgggagagagaaaccttccaagtgcctgcacccccaggaaaattcttaccatggaagcctgggcctgaagactctggtcagaggagggtgggcttcccagggcttcctggtcacggtggtgggcctctgagtgcatgaagcactcctttggattggggagagcagggagaactaactcagtatctactgtgtacaaggcacctccacagctgttatcatcctgacagccagatatggtggataatctgatcatatcatgttttagagacgaggaagctgaggctcaggaggtcaagtgactgtcctaagtcacacagtggtatgggagcagccagatcagtgaatccatcacctgggctttgccggggcctgcacccccgcctcgggaagtgccctcttcaggagaaagtcctatttctctgtaagctgccttctcgtgtggaagctgggtgccctgctacctgggttccttgcccttggggtggcatgaatgccaagcgatgcaggcagggcgcccgcagactcaaaggccaggccctgtcctcgccagcagccgaatcgctgtgactttggaccgccaccgagtctctctgggcctcgctctttccacctcttcctggggaagccccggctaagtttctttataacctagccccaggtgcccagcctcggaaggtgtgagcgagacctcggcaccctcacctgagaaccagctccccggctctggccgcgggttatgtaaccgggtgtgcggcgtggggggagccgcggggcggggcgctcgcggctattccgggcgccgctatttttagccccattgatgaggctgcgtcggccgccgccgccgggattccggagacgtcaatgggcacgcgtcacggtccccgccccgcccgccgggggaggcgcgccggggctgggacagcgcgcgggcggccgcgggcgcgggggcggggggcgccgcgcggccggaactgcgggcggggggcttcccgggggcggggggcgctgagcggctgcggcgcggctgcaggagcgcgaggaggaggtggcggcggcggcggaactggcgggggtcccctcgcggcgcccgggacccccggcctccaggcatgggcgcccctgcggtgcagagcagctcagggccggctggtgcgcgaccccggaaagcgggggtggagaggcgagcggagcccgcggggccaggtgaggggctgccggggtggcgggaggtgggccccggagaggccgggcaatctcgggtcttcggtggatgcctttgggcgggctcggggccacgccggagtcccgcttggaaactggggagtcgggggggggactggattcccagcggaaccgctggctccgagtcagcccccaagggcgacggccaaggctttctctccccagtccgccaagggtggggtttggcccacgaggggcgctggaggtggccaggccagagaaattccttccatttctccgccggctgcgggaaccggttccaggagcgcgggagctcgtctgccaggagacccagccgggagggaccgatgctgcgtgatgcaaccccttcgagggactgagtcaagaaaccaaggct

SEQ ID NO: 58051 - DNA, 1792 bp, Homo sapiens
gtggcagggctctcttttccttgtttttgtttttttgcccttccctcttctcttacttttccgtgagggctccccaggctcaggagagatcagggtggaagggtgacggccaaaccagggaaggctccaggtggctgaagcctggtctgtgcccagcagggccctggcgggctgttcctcactccaccgggcaggtgataactggtcagagctgcctccccacaggtgctggaggtaggctgggagggccggtgctccctgatgtggacagggggaggggtattgataagaggcgtggagagatccctagagatgcagtctgtggccctgggttccaacccagtgtgccaccacctggctgtgtgaccttcagcaagtgccattatttctctgagcctgtttgtttataaaatgaggaagagttggcacaagtttgaaaagatttctcaggctccacccggttctgaaattcggtaatttcccaactagggtgcactccccctgtaaggggctggggaggggacggtgcgaaaccaagttcagcttgtggagcggagccagagctgttggccgagcttgggcctggccaacgcctgccctcgggaaggtcctgtgtagggagactgcctggagggactaagcgagggctctaactgacgtctcaggggcagcctctcagcctgagaccctgctggggaagccgcgtcctgtgcactagctgcgcctagggctgaggtgagggcgcaggctccccagggtgtgtccgaattgcccgcctcagcccgcggcctgtcctgaccgcccagcagcggcagcagcgacaccctagggctccaggaagggcttgggaaggtgtaaaggcggggctaggctcggagggagccggagggaccgggcgcggttggctcccgggagcaactggagagtgaggagatcctcatccggggaagccccgcggccgcgtctctacagcgccccttctcgggctctggccctcccgctggttattctggacctgggggcccccagctgggacccgagtccggtgcggggagcctagtgggcctgggagctgctatttttagcgggcgcggcgggcgcgaggagcctatttatagatcaaacaatccgcgctccctgcgtcaatggaaccccgcgtgcgtcacgcgcgcagacattccaggccccccctcctcgccccgccccctcgggctccccgggccgcacctccccctggccgcctcccgccggaaccgcaccgccccccgcgcccttgtatggccaaagctcgacgggcggcctgcgtcagtggcgcccccgcccctccccgtgcgtcacggagcgcttaagaggagggtcgggctcggccggggagtcccagtggcggaggctacgaaacttgggggagtgcacagaagaacttcgggagcgcacgcgggaccagggaccaggctgagactcggggcgccagtccgggcaggggcagcgggagccggccgggtaggttcccttcggggaacgtgcatctgtttttaggagcggtgcatgaaggagatgggtgtacgcgcgggcagagaggatgttgtagggccggcatgcaagagggtaggtgtagtgtgcagctgtagcacaacgggatgagaacccaggtcagactggaaactactgggtgcggggtaggaggtaggggaggttgactacctgcaaagtggaagctgtagggggttggggttggcgccgggagtagggacttgtccagcaggcggctggccttagttcagtctcctagggt

SEQ ID NO: 58052 - DNA, 1556 bp, Homo sapiens
tgtgtgggtggagggccagggatcccgtctgttacgcacattcaacaaactcaagttttgccatccactgggcgtcctgcagtacagcggtgtgggctcatctccaggacctctctctacggggtacgcccctcatcttgcggtgatcagtgttccttccagacctctcagtccggactgagttgggcaccgcgtcagcgtctcccggccaggctcgccgccgatgactccgctcggcctagggaggcggccgagagcccgtagggctcctccttccctccagtctctatggcggaagtgagttgtacgggccgaaacaccacagcgttctcggtggtgggctgaatggactcgtccacatgagggggatcttcatcaccatcaactcttaaaatccgagacataaccacgaaaggagcagcccccagatcagagagcaacgcatgactatctgcgtgtgcttctgtgactacgcggatgttgtgggcggctacatgcgtgcgggggcccggcgagctgggcaggtgccccctccggggccgtgggatctggtgagcttcccggcgcgcggggggcggtgcggcttccggtcccggctcagcctccgacccaggtggtctggagcctgccgggagagtggtggcatctgagaggctggtcgtggactgtggttgggggaggtgggagctgttttaaccgtgtgccccctctcctgtgccggcgtgggcatcccccggggcagtggaacgcgggcgctcctccagcttccgagtccagccagcctgggcgcggggcgccgcccccgagacacccgaggagtccgttcctccctggttacgtggactgtggaggttcgcgcgtagtggcggcgggggatacgggacccgggcgggaattccttcctgcgtccgtcccgagtctcttgatatggagccaagtaagttttctggttttgcttttagctggtctcttgtggctcagcgccgtgcggaggttgaagcgtacctgcggaggtcgcaccagggcgtgaggaggaggaggaagggcatgagccgagcttgaggaatccgtgctccaaactctacactcaaggtgggaatgggcgcaccctgtgctccagccaggcttgagaaggcggctgttagcctctgccactcggggggacaagagggacgagactttccagaccctactctggtgggccctgcttgctcactgctcactgtgtggggcaggggacaacaaggttttcacagaccaaatgtggcagctgtgggaaggagaatggggttggtcaggactgacttcttggaggagtggatcctaaaatagcacgtagaatgagggaggagcccaggcttggggcacaagtgagatgtgtggcttgtgtgaacgattgcgggggacacaagagggagaagtcgtggaagaaagggagccggaccagagccgggagtctctagatgggaagaaaactgctggatggagtaaaactggagggcaaaacgagcaagagagcccttctccttcttgatccaagcatgtaggagaaacta

SEQ ID NO: 58053 - DNA, 671 bp, Homo sapiens
ataaaacaaatctctacagagagtgttgaccaaggatgttcaatagtttcatacaggatggaaatgtagccccagaatttcatttttgccacaactattttacccaaactttgttgtactctgtggttccggcaacttggctggttttcctgtagcacggttgtcacaaggaaggcctgttccttgcaggtggactattttgtttgctgatctctgtggcagcccggcaaccctgttgtctaaaatgaactgacccagagactggggtcagtaggctgcgccgttggctgaggtatggggattcggggccaaacccagggagcctaaaggcctgacttgctgtctctgctgggaagttggctgtattggccgagagactggtaatgttttactaaattaatcaagcttatcttgatatgtttttatcatgttatacatttggaactttagcttctgggttgtaatgctggcttctgtggttatggctgaagactgtcaggtcggctctattgctggactaacataatagaaatggacagattctttattcaattggattatcattcaacaaaagcaacccttttggaaaaatctggccgggtggggcgcggtggctcacgcctgtaatcccagcactttgggaggccgaggcaggtggatcacctgaggtc

SEQ ID NO: 58054 - DNA, 3850 bp, Homo sapiens
gtgcctgctctgacccatcccccacctccgcagggcaggcaggctgaggcctgagtctgaatgaccccctacaagtcttgccataaagccactggtgctgggagggcgtctgctgttcttagtggggaacacgtcatgtccccagcccctgtccctctgtgtcagctcccagcctgggcgtgcacagtcgggtgcagcagaggctcctgatggctggacagggggccagtgtgggcgcagtgtgggcagtctgagcacaagtggggtttgtgggcagtgtggatgctggggggcttagcggagggttactggagacgatagaggtgtgcggtgctcctgggctatagaatagggaggaggattagaaagggcctgggaaggcaaggcttggagggctggttaggttttggagcagtggttgggctgacaatggaattttgggcacacagatgatctgagaggggtgagggtcagagctggggtttaggatgggattggtttagggctgggttgtgaggatggagtagggcttgagcacagagaagcaagtagagtttggggcacagttcaaatttggggttagggttgggattagtaccatgtcagatgaagggatggattcagggctgagggtgagggccatttgcagttagcaccgggcacagctcggggttgggtgaggctgggtcagggcgagggcttctggggtaggatcaggtgcgtggggcctgctgagagtgtccgaggatctgctcgttctgccctgtggtgtccctgatgggctttttctccctttttgcagggttgctctcagctatggccttggttggagacccagctggtggccagaccccaccaccctttgggtttggaccagggctccaggaggtggcatcctgcagtggagccccagactctccagggatggagtatcagctgaagcaggggcccccatttcacactggaaagggcctggggtttggggttcccccctgccggggaatccagggtccccacccctgcctgctgcctgccctcctgcctcggcctcactctgggtccttgtctgggaaccttagcaccttctttgagccgctggtggtgttggcgcacttagcagagcaagccctggcccctttcctcacaaacctcactcccaggtctaggcggggaggctgggctgctcctcattgtcttaagcagagcggtcacctgaaggcctggccgtctcaccttgtcatgattcctccacatttgagagtgacggaggggcagggagtcagggctgtgtccacagtgtgtcctcaacccagactgagccaggcccatggctctcactgaggtcctctccttctgccttggtttccctctgagtccagccccatggggaagctgggctcctgggcctcaggcctgatgctccctgtgccagggcctgtcccctgctactgcactgagctggagtcgggggcctggttgtgggcttctgctcctggtctcagcgagacctccaggcttccttgggcccagctcctcatctcagccggtcgcacctgggcaagtccagtcagtgtgaggggctacttcggtttcctcactgtggcagggattgggggagctcctgagccctgggctggggtgggtccggaggggtgggggctcctggctgggctgggtgtgcctgtatgtgactcaggctggatgcccaggccctgagctggcggctttgttctcccactggccgggtagggtgcgtgctgcagccctgagtcacccgggtgtggccgagctgctggcgggacaccagagccatacaccgccacactcacagagatccacacactggagctcaggacacggcgccctgagagcggagggcccccctggtgtgggtgccgtcactggtgcctttccctcggtggtgctgtgagacattcccaagaagctccttggtgactaagggccctgtgctcctggagcaaactcagctgtttgctgagaaggccttccttctcttcgtggttactccctggttagggcctggagggggacctgcaggcacagctggagaccctgaggggcacacagagccttcccccgctgcctgataaagggcatatgcaggtgaccatgtgccatctgtccaaactgtgcacccactggatccttgaaacagttctgagaggaaggtgcattgttcccactttacagatgcggacaccggggttgctaatagttgtccagagtcacccgactagcatgtgtcccactgggacgctcctcctcaggtgctctgtgtggcctggtcccggcccttcctccacttcagtccagctcaccactaggaccccctcgacaccacccctcgctcagtcaggcaggggcccacagggcctggggccagatcttcccatggggagttgtgtcactgtccctcccaggcatggggcctggcgcccaggcccctccactgcctctgaggatgaagacacagggctctgctggactccctggagcggccctgacctgctttctctgggctaacagtgggaggtcctgggggacctccctacttgggggatccaggcctcactgcccccagggacagcgcaggaagtgtgtgcatatctgtgtgtgtgggatggggcaggagaggcagcttggcttataccgggtgttgggggaaagcagtgcaggttcggggaacctgggccctgaactgcatgtggacagccccctcccacaagggtgaggatgggcacacaggggccctgcatcctaggccaggcttgggttctcggaggccagctggagctcgcctgcttttctcaggtagaccagggtctgctacagaccctgctgcccccagaaaggcctagcctggtgcagtggggtgagcgggcggggtgtggccccaggagctggccccaccccctgcaccaccctgctttgtcagaagctgtttgaggcagagaataaagcaccttattaggtaagaaatgccttctgccaggtggggagaggccaggcccgcctctgcccccaggcctgcctgccccgccctggcagaacaccagcttctgtggcatctcagtcctggcccgagcccagcaaccccacaccccctcaccccatggagctccggccgtcctgccccagacttgggtgggggcacctggcatggggaagcctggccctcccacctgggaggcagaagaggcagcctcacgagtgtcagcttgggggctgtgtgaccttggccaggtgacccctccttcctaagcctgaactttctcttctatacaatcagcgggtgtgcaaggggccttgaattctcctgaggcttcttaaccccattgggtgtccctccacttacaaacacgggcccagggtgcacccgtctccaagggcgtagtctcagcccccttgctccaaacccagagcttgcctatggggctccccatctctgttccagggaagcaggggtccagggcaggtcagtcagttttccaggcagggcagcctgcttggcttggctagttacagcaatggggccttgtagagacaggacctgaggaagctggcgctgcctccttagacctgtttctctgccagaaatgcctccatttccagctgtcaactagaagccgaccgtccccaaagcccccaggccaggccttaggtacaatgtgttttgcatcttctgttgcccgttggaacttggctttggagataaaagtcctgactccacatttccaaagtgtcttttaagcattatccggtttgactcttatctacaggacactttggcaaatgaggcttcacagcatggctggtgctctctgccctg

SEQ ID NO: 58055 - DNA, 773 bp, Homo sapiens
agtattgtggaggaaggagggggctatctgagatgggcaacagggaaggtctctgtgaggaggagacatttgagctgagacttgaaagatgaggaagagccagatctaggggttggggtgaggatttcacatgggatcaaggtccctgaggcctgtgggctgtggcagccctctctgtggaaggcactgagcctgtgcctgctggggaagggaggccagggcaggagagatggctcagccctgggggattctgagtttaagtctgaaatttgagcctgagtgtgtggggatctgagttctgggttgagctcctgccccagctgtcttctctcctcccctccctaggggagagccagcagggcttactcaggctccgaagaagcactgtcttgtcacggccagcagagggcagaggttgctgtggtgcaggctggcagggcaggagctgacctttccggaatggaatgctgcctgagcagtcagctccagaagggaagggggcgttgggccacttccctcaccctctccagtcctcagctcccctgagacaggtctcggagccctggcctctcttgtggggaagggggcaggtgaggctggctgactgtgtggacacttgcctgatcacttcaagtcaagccacctgggccaggctgattccaacctgactagggataaggtgaaaaggggaacggctctcaaagtttagcgtgcttactattttgtcattattaagcacttaccatgtgccaggcactgtgctaaattctttt

SEQ ID NO: 58056 - DNA, 612 bp, Homo sapiens
actgagatcctttgtgttcacttaaagtcccccttcttctaagcagcctgttctgattccctccacaagcccttctcttccctgacctttatagcacccacttctgcacgtggtgacgaagtccagggtggctaccttgggtggatatctcatctctcagcctgactgtgaactacttgcgattgaggggtggacccctgtcttggaggagtcttagcacaaggctgggcttggagaaggtcctcaatccttatgcattgacttgggatttgatttggcaggattgggcccgtacgcatcagaatacattctgggctgtgtcaattcccagtagggcagaagtgcttaagaagaaaccctgccaccactggggaatccccagcatgtgtgctggctaaagcagcctgtgtggtgcctggatatgtcaggaggcgctgggaacataggtcaacgttggtgcagtctcagtgcagcacagtgtattagtcagcccaggggcctggctgtgcttatagtgtgttcttaaacacactataaagaaatcccctggctgggcgctgtggctcacacctgtaatcccagtactttgggaggccgaggcgggcagattac

SEQ ID NO: 58057 - DNA, 3461 bp, Homo sapiens
gtggcttgaatttcattgcatttgcaatgttcctccagagggcaaggcataagtagatgctcaatgcatgttactttcttccctctgcccctctctgtgagctcccacctcatgggggagaccagcaacatgcagaggaacacagaatcagaggccaagagcagacaaggactgagccaggggctgaaggctggacctctggtttactggcaggttcagaaatgtacagttttccttatctgtgaaatggacataaaattgtcttctcccataaggttgttgagagaaatacagataaacctgaaaagcatcagcacagtgcctggcacatagtaagcaattaaccaatggcagctggcactatcatgattattcttgagggtgcaggagggtgcagagtcaggaggagtttcttggagaagatgagtaaagaacagatttgggaagtggataacttccttgggagctcccttgccctgggagcagaggtggacacgagtgccccagacctgttgcaggccatgggtagtggagtctaggaagtgtggttgtgatgctgaggatgcacctcccgcagtcaggaggggcgcagggtgcaggaaggcccaactggcttccctgttctgactcgaggcatcgtcccctgcattcctatctcctgacacctgagctgcaccctcacttgcagcagtctgggcagcaacctccttccagcagccccgcactcaccctccaccctgctggcttttctgactggggcagctgagagagatgctgtgggaccagaggcttgagggataaacaggagcgtggtgcctgggaggccatctcccctgtccacttgcctcagagtaggaccgcagagcatgcctccatcagccattcctgcgagagggcacccctggccacactaggtggtcctccccagtccctgcctgggtggtgggtgaccccaggtcatgcagcatgttattatcaacacatccctcaaaggccatcctggggtccctttctccccacatgccaggatggatcagggacttccctcccccagcctctgctcagagctagcctgtcgggttagcagtgccatctccccattggctgggtgcaggggtggggcgcggtgatcgatgctcagggaaacacagagctcagctaccggcccaggcctggcagcccttcatgtttgggaccccctacttgtgctcaccttgccaattagggaggcaaatttatcattgagggccttcatctcctccttctcctggttcttcagctgctgaacagcggggtccaacttgacatccaggggcaccagcaggccggggttcacagtcaccttggagatagtgccagccgaccagcagcctgtgaggctgcgggagctgaagcccggcccgggggccctgcagctgtcccatcctgaggttccaggccgggggctgcccaccggggtcacctcacagctgctgaggctgctgaagccaaccacgcaggagcggcaggccatggtgcccccggccggaagcaggagggcccaggggggtgagcgagtgagcctggggttgcgtcgggtggcaggctctggttgctctggtcacagctggggcgggctggggactgaggagcagacacctgttgcacagtgctcattagctgcaggagggcgggacgcctcccagcctgaccaacctgttggatgatgtgggtgctcccgcccctcccccagcagcatgtaggtctccctcccaacaggtatctgcattgcttagggggctggtccacagccccctgccccaaagaaagcaggcctagctctggggagggggccaaggctggactggccgggtgggttgggggtggggagttggcaaaaggaaggccattcaagggggcaggagagaagagagagcgcctcaccgcagacctcactgcatacttgaaggctgacgtatctgggctcacatacttctggaaaagatgagtcaagcataggccttgagctcccgagtgtagggcagctatcctgggcaccgtgccagcctggcactggaaaacagcacttattatttattttctggctgccaaagagtctccctggcttatcttcccccttccttctaccccctctcccttccttccttccttcactttaactagcattgattgaggacctactatgtacaccctactgtctcagaggctgggaggacatagacggtcaaggccaaggagctctcagcattggaaatgtgagacctggttcaagactcagctggactgctcaccactcatgtgacctcaggcacgttacttgacttttgtcttcatttgtaaagtggggatgaaaacacccacctcacaggaggtagcatgtacaaagcacttggtagaggacaggggacaaagttggcctcaatcagtggtactgccttccgggtgctgagtctagcaggggcgatgggtatggctgaatgcagctctgctctggggcaatgagaatccctgccttcctcacactctttcctccccactcttctttctcttctctgcctcctttgacctcttttacaccatctgtgaagtagaaatagaaaagaccccattttgcccccacagagcctctgacagggcggcagaggcccacctggcccagggcaatgcctacctttccacagttcctgagaccccactctcccaccccagggggttaccagctctcccagccctgcgtctcctttcctggcctggtggtcctgatgttctggccctggtggctggatctgcatgtctttcctggacctggctcaatcctgctctgggtggcaggggccagagcagagagaggagtgtgtctgggagagtcacagatggtcagagatagaaggggtagcagccccctctgggcccagaggaagagagagcccctgagcggggagaaccatttgccagtcacatcgcggaccctgggcctccacctccagggcagacatctttttcacacactaggcacttctggctcacaagggcacaggaccctgtctagaggccacgggtccatcctaagcctgatcccaggatctggtgccgggtagggtagcgaggcactggtgggtgactgacgtgcgccacgctccccactcaacacccacgtgtggggccaccttggcctcccaccgtcctcactctggcctggcatccgaatggcatgtggtcaagcacagcaccttgccccccacccgtcacccctgtgtactctgtggggaagggagggggcagcagtggcgtctgggctctgccaaggccagaataacagctgatacatcagatatgtcccagatgctttgcaggaattagctcctcaatcctgacaaccaccacttgaggtggacactttaattctcatcactccaaatgacagaggaggaggctcagggggctggagtgtctagtctaag

SEQ ID NO: 58058 - DNA, 2137 bp, Homo sapiens
ggtcttgaactgctgacctcgagtgatcctcccacctcagcctcccaaagtgctgggattagaggcatgagccaccacacccagccagtaagatttatttaaatgaagaaatagagttgtgttgcgtggagcccctaaattctggaaatctgttacagcagccgcaggaagctaatactaccagctgataagtggtggagctagatgttgaacccagagtggagggctggtttccagcctgctctcttggcctggcgtggctgtgcctgccactttctctgcctcttgtcccactccctgcctgtgttttctgaagggcggctccatagcttggcggggggaaagcctggtgaggacgggagagaagattcaagccagggccaggggctgggtttcagttgctctactcccccgctcctccaactccagcctcccgcttcctgtccctctcccacagggaggcgagcagagaaacacgcctacagcagcccattttttgggggttcatgttgggggcaggtctgtgctggctgtcagagctgggagtgtggagagcactgcggcggcacagctgacaccgcctctgccaaggtccacgcagcctggctgcctccacgcttcactgggtttttccttcctggctgctgcatcatttgatgcagggggaggggtgggatgagggggtgtctttgggtctctcctcggggggcccctgaggttctgtgtggctatctcagggtagggggtgtctgggtgcctggtgtggggaggatccgagggccctgcccctgtggtgtgtgtgggtggggggtgtcccagacactgtggccctttctgggcaatgtgtctctcagcccctgcgtgtgaatctggaaacgtgagcatgcgagtatgcctgtgtgtgtgtgtgaatttgttgtgactgtgtgtgaacatgtgtccctgcaccctgtgctcactcattcctctgtgtgaacatgtgagtgtgcaaatgcggctgtctgcttgttctcctgtatgtgactgtgtgaacacgtgggagcacatgcctcctcacaccctgcatgtgaatgtgtgtggacatgtgagcatgtgagtgtgcagacacacccactcatgcccccacgtgtggatgtgtgtgtctctagatgtccttgtgggagtgagtgtttgagcatgactacttcctcctctgtgtgtgaacatgtgcgtgtgtgtgtgagtgtgtggctggggaagcgccacgccccagccatccagcattgcctcatccctgtgacacagccgctaatgactgtttgccattgtctgagcggtggtggcatcacccgcactaatgacagtctcccctgcctaatgacctggctcctgccccattatttaggagcctcaggagcactggccctgtgaccagagagatgttgaccagctcaacacatttccctttggggtgttgcgggggggtggggaagtcataaatcccacccctccccgacagccctcagggtgccggcgtgggctggaatttcaactggctgatggcatcctgggcgggaagccccaggtctggccctgccctctgtctctggcagagctgggcggctgctgcccctccccacaggtgaccctggaccctggcagccagatccatatcaggttccaaagacagggctttcctttccaccgtgaaaccctcaggccgtctcacctctgcgaatggagatgtcccttctgagcagggctctctgtgcccaggaagctctgatctgcagctgaccttggggagcgagggggtctggagcagccagggaaccacagggtccagagcaggctgcctgcgtggaggccacagcagagcctgattcagccacaccgtcaatatttcttttatgatcatcattaaattaaaatagcctctggattatggaggagagctgggcaagggggctgccccctttctgtgagcccacagccacagccatttcttcatattctcttctggctttcaatctgctccttcccattgatgttccccacttacaggcaggcctcctcctacctgaagtttacctggatctgcagggaagcctaggactctgcctggggcaggagggactccttaaaggtgttctgggtt

SEQ ID NO: 58059 - DNA, 1176 bp, Homo sapiens
cctggcccaatctctctctctcttttttttaaattttagaaaagaaacagtggttcccaggggtggtggtggctggccccagggagtgcactgagggtgagtggatggctgtgctcggtgctaagagattggcctttgaattcacttctgcctgatcctcatttttctcctttctacgaaagatcagaaatccccttcaagttaattataccaatgaaattcagaggtgtgcctggtgcctggcacatggtaggtgctcaggaaatgacaggtgtctccttcctgagagctgacagctgtcctgagccccttccagagcaacccctggaccagccatgagtcagctatggctgggcagcagggatcctcgagttcctgttctggaagcatgagtcaggcccaggtgggagaggagggaggtcatactggggtcagatgccggacccaggcaggatcagacaggcgcctggctgccaccttatcatgatgcttgttgctagtaactggatctcagaagataaggccctggggctgaatgaagcattccagctctgtgggccgaaatgttgttgacatgggctgtacgatgcgtagatgcttttcagatagcacagcctgaaaagggccagcaagctcccgaaggcattgccttcacagctgcttttgccactactgctgggggcagaacctccagccctagagcttgcccagcctggggaccccatcacctccatgagagctcctggatctagcttgccagcccagagcccatctctgatttcttgagagcctctattctttatctagatcatagcagtcaccagtgaggacccagatgtgctttccaccaggctttggagaacatctgaggagtggaaattcctattttaaccctctttcccacacctctgactcttgagcaggggtccattgtccgctgttgctgcaaactgtgaccgttcagtacaatggacagtgctcatgactggggtggggtggggacaagcttctctgcgctgtgcaaaagtcagtgtttcagccacactaggcatgtgcccagtgcccagctccttatctctaggagccattgtctcacttgtttcttatggcagataaagatggcttatccatctcttaggaacaaagcacgccactttagacagtcacaaacatgaa

SEQ ID NO: 58060 - DNA, 950 bp, Homo sapiens
aggacgtgtttttaggggatagacaatgagtaatagttctctaagtgcagcaaggagccaaacagaatgcctcctctctgggaaaggagcagcaggggccactggggcagaggtgtctagggcaggtttagcagagccaggcaatgtggaggacctggggctgctttgagttcatagctcagttctagagcatgaggtgggacagctaggagggtggtgggaagacagtgggggtgtgcttggctgtgtgtgtgtgacagagtgctacggagacaggagcctgcatttggggcaggcagatgaccaatggggaaagactgtgggaataactcgcctcatgattctgcccaggatttcctaaggtggtcttggtgaggccaacaaagtccgggtggggtggagacagaggctggatggatgggtgagctgtgaactcttgtgggcaggaatcttatctgcagcctctcaggttggcagcgctttgggaagccctccagaggatgtttgcgtgtgccacctggcacagagtgggctcttagtgctggcctgtgaatggagaggcaggaggagactggccagggctggaacggcctggaatgcttcagagaggggaggagaggccaaggggtgaatgtcaggcaggccctggaatgcagaaatgttgctcaaagtggcccccacccacaaccccagatgtgagcctgaaaagcccagagaccttttctccttcccattgtcctccccagtcctctctaggtatggaatctggagatttcatcttgggtgaaaaatccatggcccagggaggggcagtgacatgtccagggcctcaaggcaacagcagtgccctgacaaagatttcccagccaggctttaggggagaagtggatgcaggaactcctggtctaggtgggcacagcctccagagcgcagatcctgtagggggctgg

SEQ ID NO: 58061 - DNA, 1552 bp, Homo sapiens
cagaagaccttataatgactcacatggccctttcccacccactccaacctcactttccacgattcccctcactctgctctggccatgctaacctgcttcctgcatcttgcatttgccaagaatggtcatgcttcagggcctttgcacttggcgttgcctccccctggaatgtggttctcccagctctgtccatggttgttgttttctcctccctggggtttaggaaaagaccccttctcagagacggcactctcaaacaccagcccctctatcggcagcctgtctgaagttctttgaagcccctgtcactctctgaaatgttctgtcttattcattaagtgattgatggtccctacctccactggaatataacagatgcctggagagcagggaccctgtctgtctggttcactgctcctctcttccagcacctggcacatggcaggggcacgggtctcagatgagagactgcctgggaggatgagctttgctggaagctggggttggaggtgttgatgggggaagggcccccagccctggctgagtagtgtgtggccagggcagctcagcctgtgcaggtgtctgcagtggagagagggggagggcacacatgtggaagcttcggaaagctgatttccagatgagctgtgggtggtggggggatgtgagggtgatttacccacaaatgtcctccccttggagccctgtgggcctgtttacaggagggcggaggctgccttggggcacagaggcagggccgtgagtcaccccatgaagtgggccagcttccaggccaggaggggaagcacagaataacaaatggtggtttcccaaaccctgcagcctctactacatccggttctcctctcacacaacagggcggatccaggcctatagccaggtgtctaccaccactgaggggcgtcatggggagctacaaggggtctccagaggcagcggggatggcgttggctctgggggcaccagtgtgacagggcagggcaccgagctgtggccgaggggcagagtgtcagagggcctcctggggaatgctgtctctggcagagaggcagactgcctccactgagggaagaggatctgaggatagagaatggccggtaagaagggagagaagtccttgcccaggggacagggatggtggttttctgagctaaacaagatgaggcctgggactattcaggctcctggcagtgggggctgagcctaaagcagagggcactctaaggccagggagaaagtggcagctgctccaggcaggcacaggtctggaaccagagcatccctgaccaaacccggggactgtgagtcatgcatctcatggcatctgggggcatctaggagggtctctctgctccaggccctcctattctgcgcctgctctcaactggttcctattttataggtggtttctggtctttgtcagctgcctgacatctggagactcaattaagatcccatggtcttcgagctcctgcagctgggggctggggctgggggactgggggtttgaaaatcataatagcattcatta

SEQ ID NO: 58062 - DNA, 3583 bp, Homo sapiens
tcacacagcacgcagagacatcctcttctgaaagcttaatctcagtctgagctgctgtaaccaggcttagatccgggtactctgagaggatatggttcccccaaccctggggggatatggaggtagataccttgcttttatctcttaacttatcagagttgtggtccagaaactcattcaaactgggaggcctactttaagaatacaaagttaccaaaaaaaccccacttacttagaatgagaaaagtcacacagatcactagagccttggacattcaggcctcttccgtctgagttccttaggcatcgtaccagaaattcttcgagttgctgcctgactgcaacctggctccctctccccacccacaagtgccagcaactcccagcaccagcaggggccatttaagcaagccccctggaagctttcagcaaacctctctctttccctcagcctttgctctgcctgcttcctgggcttggggccgcagaggccagcgaggctcccttcattccctccaccaaagcgaggtcttccctgcccccacagagcaaactgatccccaaggccaaggccttggtgacaatgggactgtgagtcacaaaacaaacatagccagctgtcccgaatggatttttaatttctactgcaagacctgtttcagccccactggctgcttaaagccacccccactccctgctccttccttagtcctggctggagccccattcaatcagtcaacgattcacgaattattttgacatatattaagcaatgacttctccaggcctcatactggggataaaagtatcaataggccacagacacctttaggattttatgatacggtgaggaaaggcagccatctacataaataacacatacagctaccattcaccgaatcccaggtgctcagggctttagacagattatgtcatttaaccctcacaggcccatgaatttggtcctgtagttgggcccaaggcataggtgggaaatggaggccctgagacattgcctggggtcaggtggccagtggatagaagggccaaggtgaacactcccttcctgcatgcctcctcgctccttttacaaggctgaaggcaggctggaagtgtggggcaagaaggaaaaatcaatgatcctgcttggggcctggaaggagagagggctgagagcgcttccctcccacgctaggaaagagccgtcctcactgtctgtcctctgcccccaggttggctggagatggagtgggagccgtgaatatctgtaagtccttggctgcggcccatgggaagcatcccttgtgctgtttagatggggctgggtctagagaatggcagactggcccagggccctgctggaggggccaggagactccttcctttctacagggattgacaggtcccctggagcacatactgccaggctcaatggcctgggaagcactacaagagggcagggtggggccaggagcacctggggagcagccctacccctgtcagatgctccttctgggttggcccatggaggggggcaggggtgagggagaggggcagctggggcaggagggtggggtgcagtgaagggatggggtccctggtagggagcctcacgctgaagagagccctcctcttttctctcccagctgtgatgaattccactggtggcagtagcagtggcggtggcattgggctgaccctcgggggaaccatgggcagcaatgccctgagcttctccagcagtgcgggtcctgggctcctgaaggcttattccatccggaccgcatccgccagtcgcaggagtgcccgcgactgagccgcctcccaccactccactcctccagccaccacccacaatcacaagaagattcccacccctgcctcccatgcctggtcccaagacagtgagacagtctggaaagtgatgtcagaatagcttccaataaagcagcctcattctgaggcctgagtgatccacgtgcctggtatcctggcttcatgaggctgggcaggggaaaagacgggactagagaaggcagggtctccctggtgactaggaagccttttgtgcaggagactgagaaggcacatggtgggatggggtgctgctctaaggagcaggacgcttacctagggtgagccttggcctccaggtctggggctgatcccaaagattctcctgaggaagcccagaagagccacggggaaatgcaggctctgccagcaattgggccttggagggctgccctgctaagggggtggaaaggctgtttgcctccctccccccatgcccagagctgccagagcacattccttttgtgaggaggccacagacgttcagctgccccagcttccagtttcgggtggcccagccaactttcatgccagccgtcctcagcccttcctggtgctgggtctgccaggctcatggtcagccaggcctggggccctggagaggtcctctgcatcttgaattctgtggaggtagtggttgtgggggggaggtgtgtgtgtgcatgggaggagggtcctagagtctagatccccggtaacaggtctgtgcctaggaccttagtggagggatgggtttgtatctggatccatgggagtggggaaggacatctgtgttaagtcagtgcttgatgggggcttctatgtcagagtccccgacacacaggtctgtgtgtctgtgagtgtggcaggtgttctgtggcagggcctatgcatggggaaatgtgtccctgatgggcagcagcacatatgatgggtactgtggagccacagggaggtctctgtgtctgggaccccaggggtgatggtggtggtgtggatgggggagctatgtgggatgtgttggcttctgggaggaagtctgtatatttgaccctatggtcagggaactttcaaatgctgaggtgggggctggggtggagagtggaaaaagtggaccagcagccacagtgatggggttcccacccaaggtgtcaggagatccaggccctctccctcccgactaagaagaccaagtgggcaagaggaaggagagactctcagggcacaatgcatatgatcaggagctttactggaaatgctgagacaagcacaggggagagggagggagccaggcagccaggcaggagaggtggcctgtcctgcacgtgtattagaagacattggattagaaggcacagcaagtccacaccaaggggctccaggcccatctgtccctcagaagccacaggcatccaggcctccggaccggggtctttacctagggctgcgaggacagtcctttagattcgggggttgggagagctgcgggctaggagccctgtgctctcggaagcagtgaagggactagcgggcggggatgcgagacaggaaggcgcggcgtgggggccgatggggaggctgggccccgaagccctccttccccacgtctggggaccgtgggagctccgggctgcctctggaggcagaggctgctgctggtgaggcggcgtcggtacaaagtggggcgctcaggcgaagcgcacggagcggccgctgccgctgctctggccgcagggcgcacacaggccgg

SEQ ID NO: 58063 - DNA, 4934 bp, Homo sapiens
ggtgtgctcactccttgcaaccatggacaatctccaatccctcattggctctgcagcctcagagcaaggtctggatccttaagggggaaggagtgagggccaataatgtccttctgtccttggtctacccttcgctccctacgccctgtgaactagaggaagtcaaggacccgccagctctgcaggaggagggtggctctggcagcaccaagggcaagctggcttggctggaggctgccctgcagcgagctaagcaggatgtgatgtagcagctgtgtgagtactgagagctgtgatcgtcaagtggggcctggactttgagattgctgcctgccacaagctgctggagggtgaagagagtggatgatgggtcagctgggaagtgcttcagatgtggctgcagtgaggagtgcaggggcacagggcagcaccacgctcatcagccagggaagggtggagagagatgacctaggtatccaggaactcgttcctctagagctaggtttctctcaccatcttacagccctttgaacaaaaagttctagctgatgtgtacttttggcacctgggacggggtgacccatagtcatccaccccagtatcagagaccaggggccggtttgtccatggagacagctgcagggaccaaggcctagccagtgggaataaggtctctgtgtgaagtgccttcttctcaactctgcccctctccccaggcctggggaaggtggggttacatgaccaggtggggcttggctttcaactcagtagacaacagtaggagacaagggctgtcaccaggctaggggagggagggggaactgatcacccatgccacaggcatattgcattgatcacctcctttaacacctcacaaaaccctggcagggaggtcctattatccccattttacagatgaggggtaagtttcagagaggttaagtgacagctttagggacacacactagtcttcagattatggagctacctgctctggggtctcctgtagaggtttaaaatgttccctcacggtctcaccttccaagatcaagtcaggccaaagaaagtgtagtttttttttttttttttttggtcttctctttcctccaaaaagtcatcaacaaaagtgagttatatgaatttaaggcaggagtgatcagagagcgccagggagcttgcagggtggaaggactgctgtctgggagggtcaggagtgtgtgtcctggggaatgcagaataccaaacctagtagacagatggactcacctgcttccttctttccgctggcttggtctgggatttggggcaaggagcatcagtaagtaaacagtaggctggcatggtcggatcttatcttattatcttattctccttattccctccttccccgtccacaccttggcgtgcctcctcttgagaaggcagaagggctgtgtttctgttcctgtgtctgtgacagctccctctgtgcctctccttttgtcgggggctatttcttctctcgggggtgactgcgtttgcgtgtgtggggaagggggtcctgtggtctgttctctggggagaggtctgtttacctgttcctttcggggagtttgtacatctgtctcctggtggggaggagggtctgtgtatctggaggagatgtctgcaagtctgtcttctggggcttggggtggggggaggaagggctttcctccctcggacagtcgtcctccgttcagccgggctccgcctgcctgctccagccccgagcaggctccggcgccctggagacgagcgcccctggcggcggctacgcgctctgcggctctcccggctgtgtccgtgggctttagctacacagctcccgcagatgttgaacccttcccgcctccctccggagaagacaaggaaccctcagcttctgccctaaagacttagccctcttgtgtcagatgccccctcccatagagctgaccccacatcatctttcctttttgcctcccacaccgggacgtgaggcgttggagcacagcttacaggactatgactgaccatccccagtgcagatggcctggacgctggtgccattgggtagaggtggccagcttacctggaccaagaaccctgcccctctgaactgttcccaccccttctttccagggacttctctgcaataaaaagttgtggagtggtctgagctgccaggagtttaaacccggattctccaggccattcccagagcacagacaaacctggctgcggtggaggggtcagggcgagaacagtaccaggaagcaacctcctcccctcctgctgtgagggtctatgtgacttaagtatatgatgattcgatattatagaaccagagtctttaggatggggagcccggagtccatggggaaagcgagagaaagggttcattcatgcagaagagtctagcctggggcccatagcttctgggcagcagagctgagaattccattctccatccatccattcactctacacatacttactgaatggcctcatagtgcttggttcaggggacaggatggtgaggaagacactctaggattcctggagatgaggttctgggtagggaggtgggccatagacgaggaaaccgagcagaaacagaaaagggtgagatggggattgggccagtgccttctatcaccctgatggggcatttgaagacaggtggcccttgcagatgggggctggagagagatgaacacaattgggtggcccaagcttgggttctggtttaacacacaattgggccaccgagttgtgttaatatgatctggtggcgggcagaggaacaacacactatggtggaggaaattgtgggctgtgaaatcagacggaggctccagctctgtctctacttcagatccagggtgtaagttggtccgagtttttacaaggcattggattttggtggtcggaagatagagtggggtggctagataaaggctggatttctgggttctttccctgccacacagacccaagagaagcttctgtacagtgagcccacattcctttctattgcatgaaattacatcatcaatgcaacaatagtttctgctttctatgtccctgggtggggctgaagtgcgtcattggccagaggcttgggctttactttttaaggcactctagtgccagagtgtctgctgtgttcttctgggtgcctgcccagaggacaggtatccaaaaggccctcttcttgtgtaaacagaaaagtctcatgcaagaggaatgggactgaaacttggctagccggatgccaccctcctgaggggtagggggcatgaccccactgggctcacacatcagccctggttgataaatactgacctgccaacactcgcaaatgcaaacaagctgcctgaagattctttcaagattctttagtccagctctgtgctccttgcattttgctaggggatcatgagattctctgctattcaagcccaattttctccagctcctgctatgatgatcatgtcaacaagggaactttgtgggaattgtaggcaggatctaggatgtacattctgcaacctgcgtcactcaggactgttgctcacattttcccttttcaaataccgaacctggacttgcctgatgtcaatccagaagatccccagggctttggggtcaggtttgagtttcttcctgggccagggccctgtggatcacaagcaatgtttgtggtttggagactaattccctgagaggctcccctggccatgggccacattccagactggggtgggaggaaactgcccagtgcatttatggagagtcattccccagcccatttataagctttgtgagtcgggtggcttctgaagggaggagggctgtcctcagttcagtcattgcttctcagcagaagggcactataaggtgtgagtcctctgttggctctgcatgcctgcctcacactccgttgtatttaaacatgtcagatgctaacttggctgtggtcatgtctctatctgagccccaggagggcagtgaaggtctcatccatcctcagggtctgccacagagtagatgtgatggggttgaggctgcatggtcctggttggtgtgtcctgtcctgagatgtattgggccctgtttttgaccattggcatgtggcattctgcataaccccttggaagtctcttgtggagtctaaatgcagtccttcctgctgtgatttcagctgtaagagatcaaccagaccagcctggagtaaggaaggaagggccttgatcctgttcccagtcttattcttaccttgtccaaactcttcacctgtttctgggcctcagtcctgccctcctctagatctaaattgtgaagattctttttttccttcttatttaattttaaatttatttttgtagtgatgaagtcttgctctatcacccaggctagagtgcagtggcaggattatagctcactgcagcctcaacctcctgggctgaagcgatcctcctgcctcaacctcctcagtagctgggactacaggcacatgcctccacgctctgctaattaaaaaaaaagttttgtagagatggggtctcaccatactgcccaggctggtctcaaactcttggcctcaagcaatcctcctgcctcagcctcccaaagtgctgggattacagatgtgagccactgtgcttggctttctttttccttgttttcttccctacttagtccctctgagccaaaggttagctgcaaaatagagtaactatcagagggttgtttgagaaaaggtattgctgcatgtaaagtgcttaaagcataggaagttatgtaagtgtaactattatttcacttactggaattctttagaaggtttttgagccccctgaaacaattttttttttttttgagacaaagccttgctctgtcgcccaggctggactgcagtggcgcaatct

SEQ ID NO: 58064 - DNA, 640 bp, Homo sapiens
gctgagcctttggtgcctggggagatgcatcttgaaagtggagcttttgggaactaaagctgcgaaggcatataatgggctggaggaggggagactggctcataagatctgtttagaaagttaatgtctggggtggaggcggtgggttgcccacggaggggtacacggccgagtgctgagcacatgtagagaagcccctgggaaagtgaaaaactccaggcagggaagagccacgaaagccacactccacgctgatcaacataggagggcttcttgtaggaaaagggctctcctagatggcagcactgggtacctcctgatgccaagctagggtgccctctggtgggaacattgtggcaatcctggcagtccaggacatcttttctaaggcaccttctgcagcacagctatgactcatatggcttctctgagccacagaactcagggtttcggtctatgaaatggatgcatgccatgcaggtgtgatgaagctgggtgagctccagctccggggtaatgacaagcatttctgggccaaggttttcttcctgttcgtctctgatactcctcccacaagccttctgaacgattggagggggtagccctggagggcgtcatgtcccaccccaccctccgtgct

SEQ ID NO: 58065 - DNA, 943 bp, Homo sapiens
aactacaagaaatattgggagagtgatgtcagcaagatagtgggatagttccagcccttgatgtccccggagaaataccaatttaacaaccttctatgggcaaaaatatctttatgagagctctagaatccaggtgagagtttatagcacctgtgtagggcaaagaaataagaaaagatgtaacgtgtattgaaaaagggtaagaaggacagcttctttttaccgatgtcacccctcccccaagcttacatagcacaatgcagagagcaaagagagggagagagagggagagagagagagatcctctcagcctgagagttctgctgtgaaagggagagtgaagtgaacttctgacttttctacaaaccctggcattaagcccatataaccatagactctggcccctggcattaggtccatctgtagatcctggcaccaggccccactgatgatcccagatcctggcaccaggcccgctcagctgcagaccctggcaccaagcctatctgcccacaaaccctggcactgggcctacctatgggccttgacaccaaacctgccagtctgtggaccccagcactagccccacctgaggaccccgtcaccaggtctgtttatggattctggaccctagcaccaggcccacttgtctgaggaccctggcactgagcacaccctcctgtagactctggcaccaggcccacccagattgctgactggggtgactgctgaagggctttccctgccaaagccagcctaaaaagactggaagaggtgacggcttcttcaaatgcacagacatcaatgtaaggctacaaagataatgaaaaatcagagaaacatgatgtcatcaaaggaagaaaatgaagccccagtaactgatcttaatgaaatgaagatctatgatctgcttgacaaagaattcaaaataatggtttttttt

SEQ ID NO: 58066 - DNA, 741 bp, Homo sapiens
gccaggtgagagggatttttcaaaggtaagcacataattcagttgaattcaacatgcatctaataatgtacctaccctcttttaatttgttctgaagtattcaggaccctgctatgccacaggtaatcttaaactgtattgctgagtgactttgcggggttgctgagtgatatagggcacctctgaacaaataatgaacttttgaagacattttccaaggcataggtaacacaggctaaagacagtcacagttcactcatcactttctcatcaccgaggaatgaacaagaagtcaaagtaggggaaataaagcttcagagactagcataggctcccagggtaaggaaagacaaaagcaaagattggagggagtccagagctgggggaggagagaacagtcggctgagccaccttgggggaaaagcaggcattcctctttttcccaatgtgggctggaatttccaggctaaagggcgagcattgcactggctgatgtcaccgtccagtagatgcctagtttaggcgaggagccagctctggtgtctgctgttagcacccagagcagtagctccttcactagagggcaagcaaagcaaggaaagactggagtggtggggaatgcggtcagtctcatcttgttcatgctggcagcactctccctccctcctggggccagagtgggagctgatggagtcaaattccctgagtaagaccacacctccctagcaatgcagaagagca

SEQ ID NO: 58067 - DNA, 682 bp, Homo sapiens
ctgtaagaggagaggccagagaggagaggaagaggagacaggagtcagacccaggcaacacagaggctggggccagcctgggcatgccagggagtgaaacagcatcccctcccactggcagctccgcgaggggcgcagagcctgtctagggtcatcccacgccctctctgctgtagggaagtctttcctccagagtcacaggggtagaaagtgcagtatccaggaccaatggcagagggcagtgtgtgcacaaaatagaggcaccgagggtttttcccctgcttggaaatgaacagccagtgaacagataggaatgtattttagtgaatggacccagtgccctccacctttcacttagcccatctcggccaggtctctgggcaaagtcctgctgttggtccacacctctcagacatgaaccagcccacagccagcaaacacagacgtatgctttaaaaatactagtaataacagtgagcatctacaggtgtcagactgtgttccaggcactgttttactccccttatctcttttcctattctctgatctcctctaaggtgagttctttgaaaggtaaggaggtgtcgaagccaggagcatagactccagaatcagactggaattcagatcctcccatttactaaccaggtgacatttggttagttacttaactcctctgagc

SEQ ID NO: 58068 - DNA, 1172 bp, Homo sapiens
aggagtgctgtggaggaaggcgcactgaactgagagtgaggacacggaagttctcaccctggctctgcccgatgctgcccaactcccctctctgagcctccaaaacgacagcgtgctgcacctcggagccgctggctcacaggcggctgctttctcctggggcctgtctgctgccggcttgcctgtcctcctgggtcctgcccacgcgcttctgcccccaggcccgtgcaggcgtggacctcccgcgagggcctcagcagtctccaggacagagagtggaacccgccacctgctggaaaggccggagccggcgcagagctagcgcggggcaatgtggcgccctctgcggggagcccctgctgcctcgcgccggcactcaaacctccagtacacagtgcagtggagggcacaccagcagcagcacgcctgtctcaccctgctcctcagtgccctccgccctcagctccccccacccaccccccaccatggcccctgcgttgccaagggcacagggcataggaggacgtggactgatccaccccaagctccgctcaccaagtcatgccctagcctacatttcccatgaggatgggagcttcctctgatttgcacaaagcccccctgtcggttagtggtggcctgcaacccaacaacctcccaagtcagcctcctgggatagggaggatgtagtgagggggtgggagggtgtgcaggctcggcttccagaagccgggagagcagtttctttccctgctcctctgctgcctcctagtggatgtctgatgtctctccggtttgcacaaatccatcccgcttcggtcaatcctagccgtcttggtgcccattcttcagaagttcaagcaggctgacagcaggctgcagggaaagaggataatctacggctgcccacgcttctctgtgtcccttgggtccccagcacagcactgtcccccagtgccaatactggattctcaaagtctagaaatgaaggcagaagctggtgttggagattttgcccctttaatcagctgcacctcaatcccctctgtgctggctcaggttcttatgctgcaggaatcaaggcgagccttgcctctctggcctcggtctctctgctgtgtttcctgtggcttgtttgattttgttcaggacaggttgttttgttttgtttt

SEQ ID NO: 58069 - DNA, 1520 bp, Homo sapiens
taaataaataaataaataataaaaaaccaaggtcttatattctgtcaacttttaacaatgagagtcagaaatatgcctaagtattgatgttatctgagcattaagtttgaggataggccagggcatggtggctcatacctgtaatcccacacttctggaggccgagatgggcggatcacttgagctcaagagttcgagaccaacctgggcaacatggtgaaaccctgtctctaccaaaactacaaaaaattaacttgttgtggtggcatgcacctgtaatgccagctacttggggggatgagatgggaggattgcctgagcccaggaggtagaggctgcagtgagctgagactgagccactgcactccagcctggatgaaaaagtgagaccctgtttctaaaacaaaaaaacaaaagttagaggctagccacccagatggcctcccagaaaagacagacttcaaaggaatggagtcagtgttcccagggttttacttctataggcagaaacagggaagtctaacagagttccacattttccatacaaagcccgtgcataggtcacaccgatttgattgattacagcttgctacattccagagaagattgcgttaacattccatgaggaggggtaatgatctgagggagtcttatctctgacactatttggttatttctaatcttttacaggaaaaggaggaagtcacagctgcatgtgtgtggcacgggccacatagttatcctccactcaaggctcaaaataatttaagttccaacacctttaagtttgaattatttaatttcacaagtcttactgttttaataaatacccaaaagtagacggagctggaaggaaatgtagtgtcaggggaccacctggaagccaggagacggtggcactgcggggtgtttggctggacactccccacaatgccctccagggggcgccaggagcctggataaagagacccgcaggagcaaaggtggtgactgtccctctccaccccaaggcaggcccaactagcatggtcccactcgggtcctctcctccaagcctgcaagtttctcctaagttagaagcatctgggcaggaaaaataatctggaaaaagctcaggtttagagccctttgttctgatccatgcggccaccaaatagctaggcaaccctgagagtctgcccctccggggcctataaaatggggttttaatcggcctcacagggcacatgtgtggatcaaacaaggcagagccttcctgagtgctttggaaactgaaacccaatacagacatgaggaggaaaacctgaatggagctctttcctggctggaaccatggaggtgtcctggaaaaacctgagcttttttccatattattttgcctgcctgagaaagaagtttgcccaaacgatacttcaaaaggcaaggagagccaagctcagtgactcacacctgtaatcccagcactttgggagggccgatcacctgaggtcaggagttcaagaccagcctagccaacatgg

SEQ ID NO: 58070 - DNA, 994 bp, Homo sapiens
aaagaaagaaagaaaaagaaaaaagaaaaaaaaatctagtattgtcaagagtcaggacaccacttacataagcttagactgattctacctccatgaatggggttttaagtcctgcctcacaggatcgttggagacttgaaatgagatgacacacaagcaggtgaaatggatatttaagaaatgtcagctcctgtccttcctaagtttcctcatctaaatgaccattggatttccagctcttctgtctgtgtagtttctgaaagataaatgggagggatggtgtccccttaatgctgggtgaccttgatcccatggtagatgcaccagaacctggaaggagcaagcagggagggagggaaagggaattctccctggagccatcctgcctttccctgagcaaacacccagggcgtggaaactcccaggagactatctggtggggcccccggctgcccccagcatgcctgcttctgggaacagggccagataagacaggtgactggcttcagggaggattgggaggggcacaattgaaaatattgacttagggcacccatggtaagagatccttctcactgggtgctgtgactgcgctgggctcttacaccacccacctgattcttgctgagggccaggctacatgtgagcagaaggcagaaggttggtattgtttcatgaaatttttgtttcagttatatatatgtatatatacatatttgcaggtggtgataaaatgaatttcttactgtggaccactgccaaaatagatcccctgctctggataatggtgctgttaatgagtactaccaaagagtgagatcctctaaggtgacagtgtgcaaatccctgggcctggccctggggctgagtgggaggggttggcagtggggggttcctgggctcagtctggaagcccagctccatcgatgtgggtagctagggaggcactgtgtggtagttagggaggtgcagagatggggccctcagaggggag

SEQ ID NO: 58071 - DNA, 2950 bp, Homo sapiens
cggaggttgcagtgagctgagatcacaccactgcactccagcctgggcgacagagtgagactctgtctcaaacaaacaaaaaaacttgtaactccttctaaactggaggggacagaaatcttttaagggtacagcctagttccctccaccactctctgcaaatcgctttcttccccaggtcattctgccccaaaattattttttaaaaaaaagtgattataacatcttatcctaatggaatgtgggccaagcactgctgaactctttacatatgtaagtttgaataggcaaaaacttttgcctatatggatttaggggctctcatattcattttatagatgaggaaataagacttggcaagggagtccataaccaggaaccggcagagcagtgcgaaccaagaattcagattccaaagcctatgcttagctgctctctataaggaccccagggctagcaaaacgcagtcaacaagtcaagtccaggcgcttggagcgccaagggcccccgaccactgggttcctggggctccggttcctcccggcttactctgccccaggatttccctcctcccgttcccacaatgcctcccaggagccagtcagcgtgaagggcccaatcctcggggccgccgggggcccggggcccctcaggcagcggagtcccagggctgcaaaacccggcctggctcctgctgtgtgaaagtggagccaggccgctggggcggagcagggacaggacgcgagaaagggacacgggctgaatgggcgaggggcgttggtgggcgaccgcgttatctgaagccataaacttaacaggacgtaaaccccgggcggggcgtcccacgcccgcagactttgaatcctgcatgggctttccgaggccaggccctggcgcctcctccaccccaccccagcccaccccaccccaccccaccccacccacaccgcccccgacgccgagctccgccaggtggaggagagcgtcccgagactgctgcccgcagcccctcaccccgccctcggccccgcccacgctgccggcgcaggggccggggtatgactcattctgtgacccccgcactcaggcctccgggcgccaaaggcctcaatcaatatttgcccgtttgaaccgagacacccacttccttctcctagaatgctagaatcacaccaaacccctatgtaaaaaaaagaaaagaaagaaaaaaaatcacaaaggcaccactggggagcccttggggtagtgctggcgaagaggcgaacctggaggagggtagtccccgaacagctgggactgccgcagggcgatagcttaaaagacggtcagaactcgggttggggtgagaacaataaccgctattattttttataatttggggacagaatgacctgaggaagaacgggatttgtagagaggggtggtgggaactaggctgtacccttaagttgtctctctcttccaagaccctccagtttaaaagggaagaaggaagccccaggattcatcccggctgtccagaccctctccccaccctcacccagcccaaaccaaggtgcacgggaggggtgagtcggaggatggaagggagagtgtcgccagggcgggtgaggcccagcaggacgccagctgggggctggagatgtgcatagggaccgggactaccaggagaaaggggctgcgggcacagtcagccacgcaggggggaccctcaccttgtctatgaaggaggcaaacttgttgttgagggtcttgatctgctccttctcctgggtgcgcacggcctggatgttggggtccacctccaggacaagggggctcagcaggctctggttgaccgtaactgcggtgatgcctcccatgccgctggccccaccatagccgccgcccaggccaccgcgaaagttgctgctgcccactcgggagaagctcgaggagctgatgcgggaaccgggcccactcgtgtaggagcggctgctgaaggcccgggggccagaggtggacaccttgtaggacttctgggtcaccctgatggacatggtagaggcaggagtggaggcaggcgggccgaaccaggcggagatcctagaaggagcggagaagctgcttcttggtgaggagagctctcaggaatggccttttataaaagagatcccagccccgggggatgggggggaaaggcctcgtacctgagtggctaggcccagagggggctgggcctaacccgtcacctgccacctccgggcaggactcaggtgggggcagcagagagctgccgccacccaagggcccgttccaaccctggagcccactccagcaccacccccagaaacccaggaaaaggcagttcagtgaatatgaaactggaagaaatcctgtcctggcacaagtgcctgtaacaagcagacttgcctgggccgcccagccactacaaccctgactcctgggtcttgtctccctccctcctgggggaaataaactggaggactgggaagcatgggaaaaaggggtctcctagtatttgggtctcctctgagctgccgacaccccagagaaactctcctgtgttctccctgattgaagcgattatgagggcctgcctgagctggatgacagaacagctggagtccaaagccttgaatctgaaatcaaccatttgcctcatctttccaggttactgttctacccctagcacctggtgcagtgccaagagggtctgggtagatatttgtggaatgaatgaatgaataaataaatgagtgaataaacatcacacgcgcacacacacacacacacacacacatacacatacacacacagtggctgtcgtccctctacatctgaaggtgcaagataaaaagagatccaaggccaggcacggtggctcacgcctgtaatcccagcactttgggaggctgaggtaggcggatcacgaggtcaggagttcaag

SEQ ID NO: 58072 - DNA, 1776 bp, Homo sapiens
acagtgagtggctccttcacctcccctcccctccccaggccctgcctcctgctatgctgaatggagcaagggaaattcagttagcacctatttacaccaggccttctcccagctcctttaaacaatgcctaattttcccaagagtgattggaaggcatgctaccccctccccaacaaacacccgcacccaccagggctgagaagcttttaacagaagaccaaagggagaaggactgggcccagtgccaaacctgggacagggaaggcggaaggagggagggaggggctggtcagacgggtatggcagccctggaaagggaggacaggcgctctccctatcttccctcccccacgctgctgttagagggagcagggggcactcaggtcctgatctaggcagcacaaggagcaaaaaaacagcaccccaaagcctttcctgaaattccagtcccctccaccccacctttctggttccctggttctaggagtgtcccttgtttaaggtgaggacagagggggttgccagggaccctgcagtatgcaggctggagggctgacccagaccttacccagccaggggaagccctttttttctggggcagcccagaaccgtctagggccagaagtgtttgtgtctcatttgtcatctctctattgcccagagaccccagccaaaccttcccccagatgccccaagcacagcctcggtgcaggagaagaggccagagttggcctctctgatggcccctgcctgggacttcagggttaaaggcagaaggagaaggcccctgggactagggccaagtggtgagggaagagagaaccagactggagcaggcccacaggtacaactccttgtaaggcattgtggtctacacacagctgcctgccggacaaaagggaacaacgtgtttgcggtgcctgccctacccagacaactctgcctcaaaccgcctttcctggagagtgaaccagggaaggaggagacactcactccctgtgggccaagagtgagggccaggccccctacttctgatggtgcaggataattcagagaaggccctgagaccctgagcagtggcattaagtcttggggccagtggggtggggaggtagctgttatcatcactcatgatcatgggaagagatggtctgaacaagtttttttttttcttttttgagacggagtctcgctctgtcacccagactggagtgcagtggcgcaatctcggctcactgcaagctccgcctcccgggatctgaacaagttttgcttagagatcaggactgatgatctcattcgctgcaaccttgttcataatagccaaagagtgggaacaaaacaaatgtccaccaaatgacgaatggatttctttaatgtggcatatccatacgatctaatgttacaattaaaaggaatgaactactgatgcatgttggatgcagatgagccttgaaacccgtatgctcagtgaaaggagacagtcatagaagatcaggtaccctatgattccatttatatgacatgtgcacaacaggcaaagcatagagacaggaagtagattagtggttgcctagggaggggaggaatggagatgaatgctaaagagcacagggtttctttctggggtgatgagaatgttctaaatttgatggtggtgggcaggcacaatggctctacctataatcccagcactttgggaggtcgaggcaggaggattactttagcccaggagtttgagaccagctgagcaacataatgagacccccgtctct

SEQ ID NO: 58073 - DNA, 3742 bp, Homo sapiens
ctcagcttttgttctctcatatgtaaaataaattagattgaggctgcagtgaactatgacaggccactgcattccagcttgggcgacagagccagaccctgtctcaaaaaaataaataaaaatttaaaaataaaataaattatatgatgataatgtttgtaaagataattgtaaagataattgtaatttgtaaagataattgcttgtataggacactactgtataggacactactgtgatgggaaaagaccatgcactcttctctaagaattcaccgttccttctgtcttttgccttcctcccctcagctaaagggctcctggagtgaagtggaccctcagctgtactctgtggtctgcggcaacagccaacgcacagaggagcatcctctccttaactaagcaccgaaagggagtgaaagggtagactgaaggaaggacttactaattcaaggagtcattggagcagaaatgagtgaccaggaatggggaggatgcgtctgtggaaaaggaacagggctgggcccccttctcactggtcctagatgggatcaggcctgcccagaagccaagaaaaagatgttgtatagacctcaatggggcaaggccgggatgattgaggggataccttcaggggaggaggtgctaggcagttttctgaaaatggtgcgttcagacagctcactatttcctgtagtaattccaggaaaagactgagtaagacaaggtcaggaccgggaggaatgcagctggaggaggtgtgtatgcacagtctccccagggtgagcctgtccagagccataaaccttatctccttcctctgaatagctgggatagctatctctggctcccaggggctcaggctgagtcagggctggaggctgggagagactgtgggccccgaagcatacctaaaactgtgagaccactcagcacttaggtatgaatggcgccatttagggtctgaaatggtcaccattttcagaaacctgctcaacacctcttcccctgcaggtatccccctccgtcatcctggccttgccccattgatacctgaagtgtggcacattcaggaatgagattggagcaaaagggatctctttggcggaggtggggtcaaagagatagattaggatgattcatctccacaaaggctaaggctttagattcctaccagccagccccaggccagaaatttccccttcaaggaaagttgggctccagggctgggcaatactatcacctcaattatccctctgttcctgagttctagggtttatgcacagttcttaatggggcctaatagtttctttgtctcttccagccctctatcttagaggacaggaggtggagcctaccaacaaagggacccaggttccagttccagggctgcgtttctctccccctcagggcccattactctgagctgggccccaggtaggggaggaaggaggagaaaggaggcagtgttctcatgttctctgtgtccctgagaaattccccacctccctttcaagctccctcctagcaggctggtgagacctgccctggagacaggctggtgcgagaggccccctctgcagagtggaagggggtgacataattgcctgtcctgagacttctagacatgtacacactgtccctctgcctggtgtgtccctgccccccgccccccaccacctctcctgctcgctcaggtatcctctccagtgcccagccagactgatcttctacaaacactgctttgatcctgtcactccctagcccagagcttcccgttgccttcagaataaaggtcaaattcctcatctggtggctgaggcttagccttccccacctggcactagctgccctccccaccccacccccaggactgtgccctcctctcctgaagcacctccttgtcacctgcacctgttgaaaccttacccttcctgcaggtcctggctccagctcaccccattcattccgcaaacatttgctgaatgaaaatcatgcatcaggcacctccccacaaagcctgccccagtcacctctgccggaagtggccactcctatagagaccccaagaatagggctttgttacacccctgggctgggttacacttgctgtgggcatgtctgagctcccctccctgattgtaaacctgatccacagtcatttagcatgcactgaacatccactattaatgaggcattttccatatttgtctcatttgaccctcacaaggaccttgggagttcagtcttcttatccttatttacagatgaggaatccaaggctctaagaagtaatgtgcccagcaagtagtagtcagagctcaaaccggagtcctgtaccctaagtccagggcccgcacatcagcgccaaggcatcttcctcaaaagtaggggcgtgtcttatacatgtttctgcttccctccacacccagcacaggaacttgtttgattcactgaatgaatgaatgaatgaatgaatgaatgaatgaatgattcaattctatcccatgagtcctcttctctactctgaccctatctcctctctcccacattgcttttttcctatcttctgtcccttaccctggaccccaaggattccccccaagggaggaaagaagctgtgattgtttcatggataccagagatgggagctaagcctcagaagggtgtccacagcctggacacaccccagggaggagattcaggacaggaagaccccttcaccttcaccaccactcagtttgatagacccaggagagttccagtccttctctccacccctccccaactccagcaggaaataggtgggcccaagggagcagcaggacaagccagagaacagtgagagggtgaagaggggcccagattcagtgactcaccacccttgggcctcccctggggaaagggtggggagcctggacacttggaattcctgcctgtccctagggagacacttgggtgttaggaggctgaacaggaggaggaagagctctgtttgtcccaaactaaggggtggccatggcaacaaggccagagccatcagggctgggagcaaaggtcctggccaggggtggagtcgcgagggccctgctgcctgcctgccaactgggccactgtccacaccatgccagccaggccttctctgactgagcacccccttgtgggcagagccgagcctgaaatctggggatgggcagtcctgagggggaagccacctgctttacagacacacatgttcttgtcctctcccagtccctccatgtgtcttctcaactgcaaccagagacagacagcctctagaacagggagtgctcagccaggcgcgatggctcactcccgtaatcccagcactttgggaggccaaaacaggtgtatcacctgaggtcaggagttcgaaatcagcctggccaacatggtgaaaccctgtctctactaaaaatacaaaaattagccaggcttggtggcaggcacctgtaatcaaggagaatcgcttgagaggcgggaggcgcaggttgcagtgagccaagattgcaccattgcactccaggctgggcaacaaaagcaagactctgtctcaaaaacaaaaacaaaaacagggagcgctcttggcctttgtgctggggaaaagaaggcatggagaactgagtctgctgctgggaagtgagtagattggaggtgtcagtctgggaaggcttcctgaaggaggatgtctcaggctaaggaaaagacagcaaaggcttcag

SEQ ID NO: 58074 - DNA, 5826 bp, Homo sapiens
acctctcctagcaccccatgtttattaattacttaaacctaaagtatttacggagctccacctatgtgccagatgcagggctgggcaggaggattcccattccaccccagattccttttcctttgggttctaccccagatctccctctgtctcaacagctctacccttaactcagcagccctgggatttctcctgtgggagggccccctgcatgggtataccctccactgagagtagctgaaaggagcccaggggagcctcccaggcgatcccttcctccctccagcccaccccaccacagggccttctcactgtctccaacacactggagtcaccctcagtctttaaagaagaggatgggaatcagtctctccctgttttgtgtatagaccccatccttacacctcagttgctgttccgaacacctccctcctccaggctgagcaaggaatttccagcctaaatgttaaagcaaaggcggaaggactgcaggccttccaatcctccctaatcctctcatctctccaccacctagtttccccagagccatcagctcaagccctttgtgggagaatgtggagtgggcagtaagagctgacccacccctatcgggtcatctctgagtctactctgaagttaaacctgcctcacaggttcccactccccttctgctggacgctggaatgcaggactgatggtgggtggagaaccatttcccctctttccggattcccccctgccgaggctcattactctttgtgtctgttctgggagcttctcaccagggcccctcctgctccaccctttcccgggactgtcctcacaatcacgccatccccctttccaccttgcttcccacccccaccccagaaccctagtgctgggaatctggaggccgagaccttcaccccagctctccaagaggctctctgacaaagtgaaaaagccctgagccacagaggaatctggaagtggtggaaaggggcaggctggtgctggaagcccgaggtcggtatttgccccatgctgcaagaagtcaggaatgtggccatcgacatcagtaggagagataaagtctagctggcagctctccctctccagcccccacgctgcacctccacaggtcccagaagtttcctagcagttggggtggggcaggaatcagacaaggacctgggaattagcttggagaaaaattctagaatctgttttgattgctggtagatttcaaagtgccccagggtttttaaatgactcagagagacagacttcaaaccccttgagcccgtctttcgaattaaattgaccccctttatctgccctcctgtatatattgaagccttccttactttgaaggaaggctccagtacaaataattagtatttgtttgatgaatgagtgagtgacaatttacactcacattcactgccacctgaggaaatagactggacaggtcttactgttttccctgtacaagtgaagaaattgaagttcagagttaggtgacttccccaaggttacacagctagcaaagtatccaggctggctgacttaaagcttagcaataacagtaaaaggcagtacgtagcttgttgactccacatactttattataaaatactgcccaacttgacagttctggaatccagtgggggaatataaaggtgaaagcaggagagacccctctgactggaacctcttacctcccagaagccttgtatgcaaaaccagtgggcattcatttgtatgttattttgcatcccgtttgcctcccagccttcagcaggccccgaccctcccctggccagcttccaccctgactgccccctggctggctcccattgagcactgtggggctctccccaccattaggtgacagatcaggaacaatccaggctcaggctctttatctgtgctctgcctcccacctggcaggtccactggccaggcttttccagggtcccttctctcccaggtctgccctactatttgtcctccccttccccctcagctggtagctcgataagaatcaataggtccactccagagcaaagaacacagccaaatgtgtcataccaggccctgccagaaaaacgagctgctggagctgacaaacttgaaggccaaacacctaagggttccccccaacacttcattcagcagggatggtcattcagcttcagggggcaggcagcatgaaagcctccctacctccatccttctcacacagaggctggggagagcatcttggaggatgcagtcccctggggccaggcttctaatccagacagcccttacaaggggggacaggggaaggactggcttggagaaaagtcctagaaaagaggggaggggcactggccaccagggctgggtcgctgctatgatggtcctaggagtgcctgcctgtcctctcaggccccatgcgatgtaggacacattacttttatttatttatttatttatttattttgagtcagagtttcgctctggttgcccaggctggagcgcgacggcacgatcttggctcactgcaacctctgcctcctgggttcaagcgattctcctgcctcagcctcctgagtagctgggattacaggcacacactgtgcctggttaatttttgtatttttagtagagaaggggtgtcaccatgttggtcaggctggtctcaaattttttttttttttttttttttttgagacagagtcttgctctgttgtctaggctggagtgcagtggcatcgaactcttgacctcaagtgatccacccgcctcggcctcccaaagtgcttggattacaggcatgagccactgtgcccggcgatgtgggacacattatcatctctgtgagagatttttggtctcttttgtcaccgcccttctctcccagctcctagaactgggcctggctcacagtaggtgctgaatgcatactggttgaattgtaaatgctcaggatttgtttaattaaggatgcaggaaaggtgatataccggtgtgcagaagtcaggatgcattccctgtccaaatcacagtgttccactgaggcaaggcccttgggagtgaggtcgggagaggggagggtggtggagggggctcagagactgggtttgttttggggagtctgcacctatttgctgagtgaatgtatgtgtgtgtgcatttgagagcacacctctgtatgattcgggtgtgagtgtgtgtgaggaaacgtgggcaggcgaggagtgtttgggagccaggtgcagctggggtgtgagtgtgtaagcaagcagctatgaggctgggcattgcttctcctcctcttctccagctcccagcctttcttccccgggactcctggggctccaggatgcccccaagatcccctccacaagtggataatttgggctgcaggttaaggacagctagagggactcacaggccattccacccgcacaccaccagacccccaaatttcttttttctttttttttttttttttttttgagacagagtctcactctgtcgccaggctgcagtggcgcgatctcggctcactgcaacctccgcctcccaggttcaagcgattccccttcctcagcctcccaagtagctgagactacaggcgtgcaccatcacgtccggctaattttttgtattttagtagagagggggtttcaccatgttggctaggatggtctcgatctcctgacctcgtgatccgcccacctaggcctcccaaagtgctgagattacaggcgtgagccactgcgcccggtcaagactcccaaatttcaaactcgccagcacctcctccacctgggggagaagagcataataacgtcatttcctgccctgaaagcagcctcgagggccaacaacacctgctgtccgtgtccatgcccggttggccaccccgtttctggggggtgagcggggcttggcagggctgcgcggagggcgcgggggtggggcccggggcggagcggcccggggcggagggcgcgggctccgagccgtccacctgtggctccggcttccgaagcggctccggggcgggggcggggcctcactctgcgatataactcgggtcgcgcggctcgcgcaggccgccaccgtcgtccgcaaagcctgagtcctgtcctttctctctccccggacagcatgagcttcaccactcgctccaccttctccaccaactaccggtccctgggctctgtccaggcgcccagctacggcgcccggccggtcagcagcgcggccagcgtctatgcaggcgctgggggctctggttcccggatctccgtgtcccgctccaccagcttcaggggcggcatggggtccgggggcctggccaccgggatagccgggggtctggcaggaatgggaggcatccagaacgagaaggagaccatgcaaagcctgaacgaccgcctggcctcttacctggacagagtgaggagcctggagaccgagaaccggaggctggagagcaaaatccgggagcacttggagaagaagggaccccaggtcagagactggagccattacttcaagatcatcgaggacctgagggctcaggtaaggggtaggagggacctcaactcccagccttgtctgaccctccaattatacactcctttgcctctttccgtcattccataaccacccaacccctactccaccgggagggggttgggcatacctggatttccatccgcgcacctagccacagggtccctaagagcagcagctaggcatgggagggctctttcccaggagagagggggaaggggacagggttgagagctttacagaggaagtggacagcatggagggaggtaaggaaaggcctgtaaagaggaggagacactggctctggcggaatggggactattggagggttaagcggatgtggctaaggctgagtcatctaggagtaaacaagaggccttcctttgggaggagccaatccagggtgtagggggcccagagtgaccaggtgcactagggaaaaaatgccaggagagggccaggaagaggacttgttagtagcgactcacttctgggcaggcaggccagccagctagccagcctgctgaggcttcccaagaggggcagagtgctgggatctgggaatccaggaaaggagggaatggggtggggctagatgaaaagggataggtgtccagggagagcctctggctattcctgggaccaggaagttttcactaggatacataacactttttacacactcaccccacccatccctggctttctattcatggaacaacctctctctacaatccctccagatcttcgcaaatactgtggacaatgcccgcatcgttctgcagattgacaatgcccgtcttgctgctgatgactttagagtcaagtaagtttgggggctagagagctgggggtccaggggtggagctaagaaggatctgctccccaggctgggtcagttaggggctcacagtgggatcctgttaggtgtgggtggatgagagtcagggtccatcagtgtattcatttaactgttcatttgtataaccccgtttaagaatactgtcctccaagtgccaagaatggtgctcaggggattaccacctaattgctgactcaagttgctggtttgcaatgggcacagaacttctcttagtaggtggcatgagttgagaaggttctggatcagagataggggcccctctgatcacctccactcctataggtatgagacagagctggccatgcgccagtctgtggagaacgacatccatgggctccgcaaggtcattgatgacaccaatatcacacgactgcagctggaga

SEQ ID NO: 58075 - DNA, 890 bp, Homo sapiens
tggtagaaggagcaggtttgtgaaggggagggtggataaaggaacagggtgaagttacagagaaaccatcagtgagtgggtggcatttctacccactggagtagaaaggccagaactggcattgccctgagtgcaagccaaggggttcctcctgtctcttctccaactgtaggcctcctagaagaggcaatcacagaagaaaggccttgttggagctctgaccctgaaccctcctcacttttgcccctgtcacctttaggaagtaaaaggcctacaagcccagattgccagctctgggttgaccgtggaggtagatgcccccaaatctcaggacctcgccaagatcatggcagacatccgggcccaatatgacgagctggctcggaagaaccgagaggagctagacaagtactggtctcagcaggtgcgtgaggggaggggatggctgccaaggtgtgggagggaggcagacggaatgaggggcctgatggactgtccccatcctgcagattgaggagagcaccacagtggtcaccacacagtctgctgaggttggagctgctgagacgacgctcacagagctgagacgtacagtccagtccttggagatcgacctggactccatgagaaatctggtgagtgccttcacatcacctgcccagctcctccttcacttggcctcagacccaaccctgtctcaacccaaatcctatccctcatatcatgagttcctttagctcagaaagagtcagtttcctctttgcatttccctccactcctatcccttatcccagtacttggcacatagcaggtgcccaaaaaagtttccaaaagtgaagggatgagcagtcctgggactctgggctcaccctgcccctcctctctgtgcc

SEQ ID NO: 58076 - DNA, 1463 bp, Homo sapiens
ggtgggcacatgtaatgccagctgcttgggggaagctgaggtttgagaatcacttgaacccaggaggtggaggttgcagtgggccgagatcacgccactgcactccagcgtgagggatagagtgagactctgtctcaaaaaaaaaaaaaaaaaagaacatgctggggctacactccagcatttaagctaaagctagaaatacatggttgaaaggttgaaggcattcactgagctcaccaggagctttgacacaaagatagggtctttgcccccatctgaacaggagtgacaacagaagctttgggaattgataagtcactaaggaaaacagggcagggcacaagttgcaactggtggcccatgggctaaattggccccaggtgtgctttatttgggctacacagggttgtgattttttgaattaactatccacttttaaatgttggactatttcaccaaaaaaaaatccatatatctagtttatcttgaaaaactggaagatctggtaacgttgggccctatttcagttgacaatgagagtcagggttgagttgtgactgtcacctttaaagaaagtacatagagtaggctaggcgacaatgacaaaatatcagcaacttaacacaatgaagatttgtttcttgttcgagcaaagtccagggtgaatcaggcaactctccagggtagctttcttccttgcaatgactcagggatccaggctgcacatatctcatgactctgctattccaatttacgctctggatgatcccttcagggagccggagctgaagggctgctttgtggcacttacatgcttccaacacaaagtgaaatggtacttgaactaaccgtccatttgctgaaactagtcccaggaccctcatcaggggcctgagaaacgtggggcagctcatggatattgggtgagcagtaaatgtttctgccacatggaacatgtgctctgcagtttgccacatgcttgccaggctgcttaaatcattcacatcatctacctggctcctggagacactggcatttgcagcctttggtacaaaaagagaggagtgctgaggagagaaccttgtggaatgccaccagggagcagccatcacaacagaaccctacactagcccagtgtttcatgccaaggttctgtctgtaagtgacagaacctacccctgggaggtgacctggctatatctttcatatctcctggtcacactgctgagggggtgcctgctgcttctccacagatgaagattcaaaatgttcttgtgttacaacctttgcatatttcaaattccttagagtcaaaaaggctattctgaattctacctactttccttccccctatattgcatttcttctctttactcttgctctgcatagctcctaaagactgaactggagcaaaaacctgcacagtaggctctggatagtaccagttcccatgtaaaatgttc

SEQ ID NO: 58077 - DNA, 2801 bp, Homo sapiens
taaacctagtcagcaaattggaccattaaatgaggtaaaagcccatgacaattaagtgttcagcatttgttaccttcttattccgtctaaatatgcctcattaaaaccattcttacacaagacgttcgatttgttttgcctttacaaaaagtaatttgaaaacaaacagtggttgatgcctgtaatcccggcactgtgggaggcctcggagggaggaatgcttgagtccaggagttcgagaccagcccaggcgacacagggagacacaccgccccccccaagcccgccactctgtctccacacaaagacttttttttaattagctggtcctggaggcactcgcctgtggtcccagctactcaggaggctgaggtggaagaactgcttgagccccggaggttgaggctgcagtgagccgagatcgcgccactgcactccagcttgggagacagggcgagaccccgtctcaaaaaataaaaataaataaaaataaaatcagtgatttctgatgtggcttttaaaaactaggccgggcgcggtggctcacgcctataatccagcactttgggaggccgaggcgggtggatagcctgagaccaggagttcaagaccagcatggccaatatggtgaaatatcccgtttctactaaaaatacaaaaaactagcagcgaatggtggtgggcgcctgtaatcccagctactccagaggctgaggcaggtgaatcgcctgaacccgagaggcgggggttgcaatgagccgaggtcgcgcacgccattgcactccagcccggacaacaggagcgaaactccgtctcaaaaaagtacattaaactcagaatcttccctttcagcacatccatttcgccacacccatcaccggctccgtgcagagtaagcagaagcagcagcgaagccccgcccttcccgccactcttccggcaggaagtctgtgcgtcaggaggccggccaggactcagctccagccccgcgctcgcgtgtagccctacgtaaagcgtgaggggtttcgcgacaacccaggccccgcccctttggccacatgtcgcgcatgtcttcccgtcggacggcgtgccacctcgccgcgcagctttacgaacctagagcagcgccgccccgcctcctgtctccgtcctcacctccccgccccctcccagcttcgcgtctcctagctcgacgcgcccgctataatcacgtgattgcctcatccgggtcttttgcgttctctttccctctcccaacatggcggcctcaggtgagcgagcagccgagcgcggccaaggactgggctctgaaacccccctccgagcgtgatccactgatttcctgaagtcggggaattgctggcactggttcctttctgaattgagggctgcggcaggctggcggcgtggccctgttaggttactgcctctggatgtttgggggggaggggaaggacaccttcccctccccctcacactcttttcaccctttctgcgcgagattggaataggcagtaatggtagactctggcttgaattggggaaggaggcgcagaaaggtgtgcgggtggtgcgaggccttttcgtagacgtgaatcaccgtgcccgcgtgaaggcgtggaggaaggaaggaggcggttgctgcgcggacgagtgcacattagactacgtctccaaggcgcgaggctgtagcggaccggagtggggggtaggggagtaagtgtggtgggggggagcagttggaacgcgagcgcgagttggtggaggggcgggggaaggcagcggtgcgcgtgcgcggtaggagacacgagggtagtagagacgggcgcgccttcaatgcgtgcgctagaacccagatgggaagctttttaacgcgcctgtgttgcgcacttatgtccttttaggttgtctcttccctttctagagtgtgggccctgtgcctgtattcttctaagggtgtgtgtgttagccttggaggttggtgctattggcgttagatgggggtggggaatccagttaggtgcgcccacgtgttggagaagcaccggtgtgcacctagatttccttctaggcttttttctcatactcaattggaggcattttttactcagcgcagctatatgccaggatcaggtttcgcttccggcgcttccatgttggttgaatttggatagctccaatggtagatttcagccttttttttttttttttttttttttttttaaggtaactgtgcaactaccagcaggtacttttaaaatagtgcttactaatggctggagttgcttacttctttagacaaccttggaggggagtatcagtgccttgcaagtctaattacatttctaatgggcttataaaagcagtgatgacccaacatcttgtagcattgattttagtttgaggaatatagtttgttttctctggcatgaccttgcattcttcaaaacattatttgaacttctatctctgggtgctcatttcttacctagtaattcatcgtctctattacaaagaagctaagggttttggttggctttggaaaatgttgagaaatttgaggtgcatttgaacatctttcattggtgtaacgcttgacagttgaccaagcacttttgtgcatgttgtctccttccatcctgaggtactgcagagagctagtggtatttctcagctaaggaatattatttaaggccacactgctctcagctggcagagcaaggtcataatctttgagactccttagcaacttaaaagtatcaaggtgtcatcatcagtttaggacgctgcccgaaagcatc

SEQ ID NO: 58078 - DNA, 6934 bp, Homo sapiens
aacctgccctacggcccattagctccattccatgaagttcctatccagtaccaggcactgcaaaagaagggaatgaggtcagaccatagaaagaacttccatctccatttggaaaggctggactcaagttaaatgtaaggaagaccttctcagaggtctcctgcgaactgggaatgacggtccagctctttaaaatagggcaatgggccgggcacggtggctcacgtctgtaatcccagcactttgggaggccaagaaggggaaatcgcttgagctcaagaattggagaccagcctgggcaacatggcgaaaacccatctctacaaaaaattagctgggcgtggcggcgcccatcttgtagtcccagctactcgggaggctgaggtgggaggatcgcttgagcctgggaggcagaggttgcagtgagccgagatggcgccactgcactccagcctgggcgacagagacagactcccgtctcaatgaataaagcagggcagtggatgggatggctggagctgcttgcgggtggagatgggggcttgagcctgacggaaaggtccccagctgtgaatcctttgagaatactagcccaggagaagtctcctgtggggcagaggaccagggaagggtgtccaatgacttgggccaaaagtaacaccaggtgtcttcacctgattcaggcgcccgcctgggtaggggacgctagcaccaccaggctaagccacgggtggtcctctcaggtcaggcccaagcccaggcacactcctgtggggagggtaagaggctgacgctgcgcggcagttccctgtccccttgttcctagtcccttctagacctacgcccaccgtttcttctgcgtctgtctggctcgcgtgtttctttctgcctgtgtcccgccgggtcaggctctccccgtctctcagactttcccgtccccgtgtcctccgcggccgtctctctccaactctctccccctctcagccacttcctgtctccagtatgtccctggcgcggcccggctggccgtctgcgcaccctctctcccctcggctctttgtgagtgtgggttcgcgggagaaggtggggaggagaggaggccgaggggtggggagctggcggaacgtggggattggagccgggagggaggaggaggaggagcgggctgccacgggcgcgggcgcgggcgcggggcgcggcgggggcgggagggagcccagccgagcccggccgcccgctcccgccactgccaccgcctcctcctccgcgtccgctcggcgcgggcacgggcgggatgggctggcccggcggctccccctgctgctgccccgccccgccgcgcccccgcccggccgggcgccccccgcaggtgagtggccgcgccgcgctgggcgggcggcggtctctgcgtcacggccgcgcgggcagtgccaggggcgggcgccagggggcgcggggccgccggaggtcgagagggcgcggggcgcggggcgcggcccagggctggggccgggggctctggctggccgcggagagctgggagcagcgggaggccgggacagtgactagggggcggggcgcggccgcggccctactcgatcaggccgccacgccttccagcacccggggcgcacggggccgcacgccgtgccacacacgcaggcccgggacccggcagcagctggcagcggcgctcgggccccggcctggcagggtgcgggcgaacgttttcctttcctgcttcacatgtgggacagaggccgtaagcgggcacagatgaggctgattcgactcgccagccccgctctgcggccccctccagtctgcccccatcctccagacccttctgggaacacccccagagccgccgccctccctcgctccttccctgggccttacccctcctccgcggcggccgggctcccagcctcccttccaaccacagctatttccagaaaggggggtgtgggtggaggggtttctccaaacaaacccaagacttcggagagagagggggcccggctgggggagaggttgacaggctctggaatgttacaggcgggaggagggtgagggtccaagagggtctagtgatgccttcccagccctcctcaagtgagctacttttcccctcgggactggctcatagggatcccatccctgcttcccttccgaggtgcgagtgccacaggatgggagggactcacagccacagtggatcctgaccaccccacccctcaccgagctcactgcttgggcacctccttgctgggtctgggtggggagtgtgagaccagtgaaggtgagaggatgtctggggacctgttccaggtgaggggactttcagcccctatggaggcagcaggagagtgaagcatgtagaggagtcctggtcagggccatgtgccataggagcagaagctgggactggacagaaaaaagccacccccactgcccaccttgtcacactgccccatctcccccaagcagggctgggggctcgacaaggccaggcccggttgcccacactggccgggggcctggaatgtgctgggacacagccaggctggcaggatgggggtgggtcacagagcccgtgctcctctccagttacaggcagggagcccaggcctgccacacagatgccaccttctggccaggatatcctggggacacatttcttggcctggaaaattggagcttccagggagaggtgtcaggctaggcccaatccagtcaggtcctcgcaagggtctcaagtgggcacccacagcaggcctcaccccagagaatgcaggattcttcatcccagggaacccatcctggtggatatgaaggagcaggaagcaagtagaagggactccgtgggagaagccagggctgggggagttgcctgagtactgggacattcaataaataccatgcaaatgagaggggcacatttgcacattctttcaagtgacagctatagcctgtcccaggggctgctgtccacagcttggggctgaagactcccaggccattaaccccttagcttttaggaagattactccccctttttcaaggccccatccacctccctcccttgactcccaggacgggaagttggccatgttcccaggagggaggccggaggcccatggatgggggtggagtatgtgttgggaggggggacctcctgtccagtcctcaggccctgggacagctgctgaggaaggagagcagacccaggagagccatgaaggtagtactcaggcttcggggttgccgcggggggagggtgcagcccttgggtagagagcccaagttgcagggctggaaagagggctagggatctgtgagatcatgtctgaaacaaagccagggaatgggtgagtggggggcactgtgtcaggagcagaaacctgggggctttcaggagaagggcctcatatgccttaggctgtggcaggagaatggattactccccaaacctgagcaaagcagtcttgtggctggaacttggccttgcaaggtgtattgagggtaaaggtgggcggtgcatgctttccttttcctacttcataacgagtgaaactgagacaggaagggggcccccagtcccatttttacctgactctcaggacacactcgggatcctgggcctgcctgctggtagtagttcccagctccactccctccccagcggaagtccctcgagagcttgagagttcaggctggagcctggctgggacacactgttccccacttgccctttagccctgccccgagaccagaattctcacccggccccaccgggggtgggggcagaatctcaagaccatggatccctgcagatccctggagagtgtggtgtcccaggtgtgggacaactccagagttgggggagtagggggagcaaaagatcacaggctgacactcccagcagggtagatcctgggaatctgatctcctggcctcccccacatcctcccccctccacttcctggagcagcgacctgcccccttcccgcctgcacttccctccacttccagggccgggcttctcctcacaccagccagacagcctaccctccgcccaggggaagcggctgcctccgccaggccgcttccaggaagccccgggccaggccccagcattgttcaggccctggggccagcaccccagccagccgaacaccatgaagtccagcggccctgtggagaggctgctcagagccctggggaggagggacagcagccgggccgcaagcagggtaggagtgcccaccagctgggcaaaagaggggcaggggtggaggtgcgggcagtgggggaggggaccaggaatcaggccaggccttcttcccaatttcagcttcctcagccttcttccctggcccagcatcccctccggagtggccagggctgtagtgtgaggggatgtttgggttagagtaggtcctgctgtctgttttggctcctctcaccttccctgctctagcctgggccaaccccaggaggtcctggccccccaacataagccccaggtgcctcactgcaggactttgccatgcgctatccaggtatcctccagcaggctcagagatcatcaggccccttccctggcccagggaagtttgagggaaatggggtggcagggtggaaaaagagagaggagagggagtcaggagtgctttggaactggaggtttgctttccactgacaacatccatatctgctgctaatgccaacatgctcccaagtgtcttagtgggtcccacaaagttgatccagcccagaagagttgcagggacagtcaagaaaccagaggtgctgcccacatccccatcactccctttcccaacttcccagccttgccccaaaagcagcagctcaggacaacctgagatactactgtgatgggtccccgggaggaggacagcaggagtctgaactccagaggagggggaatatgggtaaaacagagagatggcaaggagacaagctgtccccagacagaggatgggaggagagaacccacagtgggaggggaagggactgagataggcctgggccataagggggcatcccaggctcctgcctcactgcatctctgggtcaggaggggctgaacagggaatctggtccactcctttctcattcaatgcgtgaatcccaagtgccagggtgcagggggtcgggggagaactcacagcatccaaagccagctaaacatctctccccagtgacaggcttctatctgtttccctccagcatgaccacccccattacacaattgctgtctgctgcctcagtgcacaatgagtaaacatgttgttctgaccgtgggggaggagggcatgtcagctgcctggagcgtggggacagcaggagctaaaggagcaggactggctgaggccactcctgccggctcagtctggtgctgcaggactgacatacaacacatatgtttggaacctccctgctcactctgcacacaggtctccatgcggggaggacaagatgggaagagtcagggagtacccttaccacaccagggggaaagcctgagcatggaggcttttccacaagggcatcacacaccagggccatgtgaggggcccaagtgatcccctggggaggagctgacccagcaaaggtgacgcaaggggtcagattccatgcacagttgaggacaggccccatgaccgccctgaagcagctgtggccaagtgcgtcctacaagtttgagggcttgatctggacggagaaaaccagtgcagtgctaaggcaaggctcctgcccagtcccggagatggagatgggcccactgggaactcacacctctgtttgtccctccaccttcagcctaggaaagctgagcctcatagcttccgggagaaggttttccggaagaaacctccagtctgtgcagtatgtaaggtgaccatcgatgggacaggcgtttcgtgcagaggtgaggctctctgtcctgtgactctgagaccctccacccagtaccactgtgttgcacaactccagcaggccagctcacacaatctcaaatgtaatatgctgctcctggattaggcacaatggcagctaagaagcagctgcctcccccttcagatggccctggctccccatgacagacacctcccataacccaggagagccagtactctccatcaccttcccatcctgacttgtgacggtagtcttccttccctctcttcctcctcacctccacccaccctggaacgttacccctggcctgggcagtagtaccccactgccacactcttccctcaaaacctagccctgctcctctgccccagccagcccagtccaggtgggatcttggaagtcccagggtctggttccagggtctgggagatgagggaaggccattccttccactgtcccacaggcccctgctaacccctctcctccccttaccttccctagtctgcaaggtggcgacgcacagaaaatgtgaagcaaaggtgggtatctgattctacctgatagggggagagggtctggagtcccttcctcctcccaaacaggcttctgcaaccacactggcatcaaccctccacctccacccctctcaccactggggaacccctcctgggtgggaggggtgctgtactgggccctttaagaaccaccctactccgccttctggagggctggccagcccaggcgggtggacagcaagacagcgtttgtcttggtgctgtgcccagactgcagctggcgagaggatgggggtggggaagaggaggagaatgaggaggaggaagggtggggtgggtggggagtgggggagcaggatttcagagactgggcagccggatgggctgtgccttccctctggggaagggtcctcaaaatgcctgggcgggtcttgtcctgggccctggaaaaactgggcctttccaggtat

SEQ ID NO: 58079 - DNA, 1755 bp, Homo sapiens
tggatagcacccactgtccactggggacctgagacagccctgtctctgaagaggtcccctggtcctcttccttcaggacagggggaggaggatcccagggccctggagctggcttgggggagctgtgtgcccaggggcggggtctcccggtgaaagaagccagtgtccatccctggccatggcctgcctgcttggctctatatataactcctgccctacagctggatgaatgggggtctgtgtgggctgggggctgagcgccaagagcaacaagtggggggcctggggggtgggggaccaagaggccagaggggaggtgcccttaaatagcgcaacctcagctggagcctgtgcccatccactgaaggcccctccaccttcctcctgaagctgaggggctgccccatcctcaagcccacgagagcccttcaccaggagctcagttccttactcggtccccttccaggtgacttcagcctgtcaggccttgcctcccgtggagttggtgagtgcgctctgggatggggtggggagggcaaggaacctggccatggtgtccagaggtctggtggctccagagagggcccccaggagatgaccttgaacggagtgctgtgggtattgctcatcctatgaggaaagaaaaaactgtctgagtcctctgctgatcttgtgcccttgggcctgctgggggtaggactcctctccccttatccagtacagccttcaaaaggacactgacattcccttcccctgtccccaaggcccacattggtccttgcccctgctgtaactaaccactcccttttcctcccccatctccctctagcggcgaaacacggccccagtcaggcgcatagagcacctggtaaggtgatgctggagcaggagggggaagcaggtagctttgggagtaaggatctagatttcctgaagacaaaaagggcatggctctggagtgggcagtctagagtagggggtacccaaagagatgtctagacactgtctgttaaccaccagggatccaccaaatctctgaaccactcaaagcagcgcagcactctgcccaggtaagtgagggtgctggggtggtcccacgtgaccccctttccgccggccccacacctcagcccagggcactgccccgcaacagagctccccgggacagccccccacccccaaagcggtattctccctccagaccgatccacccaccctcaggacccagcaggcttcacctgctgcccaacagacagccttcccgtcacactagccacctccgggtgccccgcccctgcgttcatgcgtaggctcctcctccccaggagcttcagcctggacccgctcatggagcggcgctgggacttagacctcacctacgtgacggagcgcatcttggccgccgccttccccgcgcggcccgatgaacagcggcaccggggccacctgcgcgagctggcccatgtgctgcaatccaagcaccgggacaagtacctggtgaggggcggggccatcaggagtccgccaatgagagggatgtagggtccagatgggcgaggctaatcactgacgtcaccagcggaggcgaggccgccagggggcgggaccagagtggtggggtgggggcggggcccggagcgcggcctggagcggagcggagaatcctggaacgctggcgacttggctgtgactggctaggccgggccttagctacctttttattttctttatttatttaccttttttttgagacgg

SEQ ID NO: 58080 - DNA, 836 bp, Homo sapiens
accctttctcctgggatgtagcatggatggggacccgggtaccctggggtctgaacctactccctccctgtcctagagcctcctacacaagagagccaaagcaatgtcaagtttgtccaggatacatccaagttctggtacaagccacacctgtcccgtgaccaaggtgagaagccagcctgcccccaccccactgcatcccaccttccagggtgtctgtcttggctttaagtcccatcctgttgaagctcttggctcctcctgtctgagctgtgtttactcttggctgagtgtttaccagcaggtgattctgggctttgggccaaggcggtgagatccaacatggtcaaaacccctgtgaactctagagccctggcctcagactcttaccgccaccacagctgtcagggcagagaccatggagcttggcagcagaggaggggggctgcatggggctcagtccacccctgtgaaaactcctccccactgcccgctacccctcaccctgcagccattgccctgctgaaggacaaggaccctggggccttcctgatcagggacagtcattcattccaaggagcttatgggctggccctcaaggtggccacaccgccacccagtgcccagccctggaaaggtacagaacacccaaacctgagtggggtggggatgaagttgggggtggtgccagaggcaaggtaacagggcaggtgggggtgctgtgctggccatgccgctgtagaggggagaggtaggaaaagacctcagctgctcgggaaagaatcccattagggaagaagctggaacctggaatcctaaagccgcaatcttcccct

SEQ ID NO: 58081 - DNA, 1028 bp, Homo sapiens
cttcaggctccggggagatacgaggcctccgggaccccgcccccgatccccgcctaccggggccgccgcgtcctcctcatccataggcctctcagctccgcacacaagctcttcggccgccgccaccacacacatccgggtccccgcctttccttcactcctagaggcccgccccgtcccccatctaagccaatcagcaacggcctctgacgacgggcacctgcaggagccaatcggaaggcgcaggcagggtgtggggcgcggcccggtgccctgggtacccagctcagggccccggtctggtcaacccggctgttgctggggtgagcgaaggcgacgtggcagcgcggacgctgctgggtgcctgggcgccgctgaggcggacagggggcggctcttgagcggcgccggggagacgggacgggcggagaaggtggccacgctcgcacaaacgttgcgagtattacttgagccctccttccgcgctggactgaaataaaagctttaccggaatgtccatttaatccacggtgcagccttatgaaataaatcttatctcctttttacggatgggccgaaggctggcctcgatagcctgcgcgcttaactgttatgctgtgtaccctcccgagctctgtttcatggcaccgctcgctcattattggcaagaacattccattccaggaggagagaactggggatgcagaaggcacagtggcacgaagcggcattctgtggaggaacacagggctttggtaggctgaaggaaagttagactggggttagaatgtgaagggacgaagacacgaatatttattgaacacctactagggagtgcctacctgccattctggggggttggactcctagatgaggacttccttgctcccttcccatcaccatatctctctcttctggacggaaaagattcctctcctctgtagcacctcatttataatacttttttttttgagacggagtctcactctgtcgcccaggctggagtgcagtggcgcgatctcggctca

SEQ ID NO: 58082 - DNA, 618 bp, Homo sapiens
gggaacaaagcaagaaaaatcagagcaatttgggaagtaaacagaaactggaaagggagagggaaagaagagtggggaggacccaggttgggggggccctctccagtcccacccagtttagggaatgcccctgccctctcccccaccccccttcacctggctcttaaagggcccggcccctggccggcggctacttaagacagaggggcggcggcgggcagcagctgcgctgcgactgctctggaaggagaggacggggcacaaaccctgaccatgaccccccacaggctgctgccaccgctgctgctgctgctagctctgctgctcgctgccagcccaggaggcgccttggcgcggtgcccaggctgcgggcaaggggtgcaggcgggttgtccagggggctgcgtggaggaggaggatggggggtcgccagccgagggctgcgcggaagctgagggctgtctcaggagggaggggcaggagtgcggggtctacacccctaactgcgccccaggactgcagtgccatccgcccaaggacgacgaggcgcctttgcgggcgctgctgctcggccgaggccgctgccttccggcccgcgcgcctgctggtgagtccgcg

SEQ ID NO: 58083 - DNA, 698 bp, Homo sapiens
ctgacttatttcctcaccccttcccagtcctgagctctccccggaccctccggaaactttctccagagccaggagcaacctgcaggttggaagcccctcattccttgcaccttcttaatctgccctcagcctatcttggttaagggttgaatccatgtgctcctgggaccactggggttgagctggcctgggtcacagggtaccagaagggagaggttcccactgcagtgccccagaagtaaccacatctcaggcctgggaggggtgggttgagtcatagcaaggtcacagcagggacacacattccttttgggtccctgttggcccccctcctacatccgttgctcttctgccccagctctccggcttcgtgcgcccccttctggcctctggtggaacagccaggtcttttcacccaaagcccaaagccccaaatagtcctttgaatttgttctccattttttcatttattttattatttattgtaattaattgattgatttttaaattagttaattttttaaaattaagtaattagttaattttttaaaattaagtaattaattaattttttaaaattaagtagttaattttttttaattaagtaattaattaattttaaaaagtatttatttattttgagacaaagtctcactctgttgcccaggctggagtacagtggtccagcgtctcactgc

SEQ ID NO: 58084 - DNA, 1024 bp, Homo sapiens
tttaaagaagaagaaaaagcctgaagcagtacttagaaatttatagcactgaatgcctatagtagaaaagaagaaaaatctataaccaatgtcctcagcttccaccttaacaaactagaaaagaggagattatactcaaaataagcagaataaaggaaataatagattaaagcagaaatcaattaagtagataacaataaagacacccagtgaaaccaaggttggttctttgagaagatcagttgcaattgtattagtcaggattctccagggaaacagaaccattaggatatatgtaaatatgtaagagatttatcacgggaattggcttgcacaattatggaggtcaagaattcccatgatatgccatctgtaagctggagaatcaggaaagctaggggtgttactcaatcagagtccaagggcatgagaactagggcagccagtggcagagctcccagtctgaggccaaaggcctgagaaccagggcaggaaatggtgtcatcccagagtccaaaggcctgagaaccaggacctccagtgtcctcaggtgagtgtcaagggcataagattgatgtcccagctcaagaagacagagaatgtgccctttcctcacctttttgttctattgagccctcagtgattggatgatgcctgcacattgatgaggacagatcttctttcctcagtacagcaattcaaatgcaagctcttctagagacagcctcacagacacacccagaaataatgtctaccagctctctaacctaggccagttgacatacaacatcaaccgtcacaggccagacattagggctcatgtccctaatcccagcactttgggaagctgaggcaggaggttcatttgagcccagcctggccaacatagcaaaacaccatcccaggccaggcgaggtggctcacgcctgtaatcccagcactttgggggactggggtgggcagatcacttgaaatcagaagttccagaccaacctggccaatacagtgaaaccccgtctctact

SEQ ID NO: 58085 - DNA, 550 bp, Homo sapiens
ttttaaaattgcctattatcctattccagggaaaactattaacattttgccatatttcattttatcagtcttttcctatgtatttttgaacacagctcaaatattactctatataaagacttgtattcagctttttcaacataaattacattaaagttatttttatgtcaataaaaattatctttgtaaacaaaattttaatggcaaaataacatttcatcatatagacatactgtaatttatttaaacactctcctaaaatcaaatatttagttaggagaaagttagtaggtcaaagcatataaacattgcgcaggtcactgtggcctaaaaaggctgttcttttttattttttttggaacagagtctcgtactgttgcccagcctggagtgcaggggtgcaatctcggctcactgcaacctctgccccctgggttcaagcaattctgccccaacctcctgagtagctgggtttacaggcacaggccaccatgctcggctaatttttgtatttttagtagagacagggtttcaccttattggccaggct

SEQ ID NO: 58086 - DNA, 1502 bp, Homo sapiens
aaaatacaaaattagccaggcctggtggcacacgcctataatcccagctacttgggaggctaaggcagaggaatcacttgaacctgagaggcggaggttgcagtgagtcgagatcacgccattgcactcctgcctgggcaacaggagtgaaactccatctcaaaaaaaaaaaaaaaatttttacatttatatttatttatttattattattatttttgagatcacaccactgcactccagcctgggtgactgagtgagactctgtctcaaaaactattaaaaaataaaaataaataaaattgtatagatggtgccaaaatgccctccaaggtggctgtagcagttacatacccctcgaagtagaggagagtgctaatgtcccctcatccccactactcacagccttcaccagtgcctctcccctcctcagcctctccctgcgcagaccctcacagcccacaggaaccttccacactacagcgcaggcccccagcaccctccctgtggtgctgcctgggactcgctccctcactcagccctgcctctcagaatccaacccggcgtaggtgtctgggcagagccccagaaagcaatgtagtgtcctcacccccaggctctccatggtcacttcagcccacaggggagatgggcatggagacgagagggatgaaggatgccttgagaaaggagagcccaaataaccctccaagacagttggaggctatatcaccccagcgagcctcactgactcacctcagcctcggccataccaatctgcctctccagatcctcggggaccattttccctctgaaaaagaaaatgcagagggtagagcagggacaggttctctgttgaaggcagggtaaggtggggttagcaatgcagagacaacagtgctagtttttccctcagggggtgaaacagatctcagggcagaggtgggagacgctggcaggctctggtagacaggaacagcaattctactgaatagcgaggggagagaggtccaccagcggtaagggtctgatgccagagctttctggcggcaggaagttacgctgtgcaaagctaggtcacagccatgtgggcagaaggaccttcacctctcatcagccttgaccactcggacactgtcggtgccaagtcccagaaacgcagctcccttctggatggagtagtgacactgtgggggaaggcagagggcaagttagcacaacttgatgggggaggggagagaaggtaaaagtcaagtgtgagctccaacaaatgggatcctgtagaccagggcttctcaaatgtcagcgtgcatacgaatcgcctgggtgtctggttaaaatgaaatgcaggttctggtccactaggtctggggtctagggtggggcccaagattctgcatttgtttgttttttttttttttggagacaagagtctccctctgtcacccaggctggagtgcagtggtgtcatctcggctcactgcaacttccgcctcccaggttca

SEQ ID NO: 58087 - DNA, 564 bp, Homo sapiens
ggcggtggcaagaggaaggagcagtgggtcaagactggagcttgcctcccttccctttctaccagaagagctcatcaaagaagcaggtatgactggctcccaggccacaattctcaggatcataccatcccagaatggatccaggatcagcagatcctcttgaccacacctctccacatctggggctgcccccaagagacagcccccgtccggagatagcaggaactagaccactgaccccagggaatggtgacaaacatgagcatgaagggaccaggcagccgcctccctggcctggcctgggtccagctggagaggaatcaaagaggaatcatccctccctgccagacactagagcaagagaacggtgggggaggaggaactcataaaaagggcaaagaaaggtcctcctccttctcacaaaccagggcagaagattccgtccccagagctccagcccaccagggcccgcagtttcctcagcacctcctcttccatgagcacaaacacgggggcgatttcatatgtgtacctgccaggagagagaacgacgagaaaggagag

SEQ ID NO: 58088 - DNA, 1278 bp, Homo sapiens
tagccgggcgtggtggcgggtgcctgtaatcccagctactcaggaggctgaggcaggatccacctgaacctgtgaggcggaggttgcactgagccaagatggtaccactgcactccagcctgggcgacagagtgggactccatttcaaaaatatatatatatatggaggaattaagggggtacaagaattctaaaatatacaaatcatcaggctcaaggaatgtcccttgcacatcatgtggtttcccaactcctcaatccactgttatcaaaggtctaatggaaggcaaagggagccacacactgctcatctctattacgcaacccctcaacccccgctggctctcagggaagggaatgggttcagtttgttcagcaaacattgactgagtgttgtctacttctgagcgcctggctggcattaccctaggtgctgcatctgccctgtgggctccagctaacaggctggcaagagagacctgcatgtaaaataaagggaaattgccacaagagggagttgagaggtcaccatggaaaggcaggaaagttcaactggcccaggacaggcttcaaggacaaaacactaaggctctccttaaggcaatagagagctggtgcaggaaaagactcagcaggagtcattgcaatgctatttgaataagtgatggagtgggcctgagggaagagggagttagggaaggtcacacaggaggaggcctgcctggggacaaagggatctaggcaattgtctcctgaagcgctctcagccaggtttatggttagaaagctaaagtactctgtgctatctcccaatcaacaaaccctagtggctccacacccacattaataaaggcacaaactctcctatgtatacaatcttttctctgcttctagactgtactctcctgggtggagagaactaagtcttttccttcattaagtaaactaatagaaaacagggacccctcaaatgttagtttccatcttcttgattgtcctctcccctcccccagggacttgcacagaggcattacataaacatttgttaaatcaatcaatgatttgcaggtactggaaaaaatgctgcattctacttacatttgatttgcatcaaccaagaatctgtagtaatgataatagatttgcaaagggtgtttttccttctcatttattatcttatttgaccttcacaatagtattagaaattagcctaaataggtatttattcattcttgttttcaagatgaggattcttagctgaaagaaggtgaactaatt

SEQ ID NO: 58089 - DNA, 2168 bp, Homo sapiens
aaagacttattcctggtgatgtttctttatctctctctttctccattttgtctctattttagaatgatcctaaaacacaaaaaacgtactttcaatggcccaaatcatggagtggctcagggaaatgaaatctgtctacaaaaaaaaaaaagttgagaatccttgtctttttttcatcatacagttttttttttcttttggtatcaccattacttctcctaaagtcacgacataatatcacctacagcagaaatgaggacttcagtggaattgacatctccttccatcaagcgcatttgcagtccatctttagcaggacctctctctaatggctaaggctaggcagaagaatttgaagacagtctggtttccattttcctaatgcagcctggcccaagagccaggactcccataagactagtctactgtgggagtcagggtcttttccacgtgtggaggctagtgtttgatgctggacggcctggagtaaagggcgaaggggagaaggtaaccaaccaggctggcctcgggattcgcagaggagggctggggctttgacttctgcagggaggtgagcagtgtggccaagggctactcaaggaacgcctctgcgagaattcagactgtggttgagcgcacaaagcaagagtgtgcgaagaaaagttaacgcctctcccagctgaccccaaaatctgctaatctgggcctgacggaaaaaattcggagaagaaccacctcggccgagttacgtgaaaaggctgggtacgaactactctggctctacttggggcgccggctcagagcgatgggcaggacgtccgcgaggaagaaagagtgacgatgatttttcaaggagtctgaaccagctcacccagcaaaccctcctcccatcgagcacccagcgtacaatcatcgaagggccgagggtcctgccctcagtctcgatggcggccggggcgcgccccggccacggcgcacgcgccggcctcagcgctccctcctccatgccctcggcgcacggcgccgcccactcacccagctgcacctctccgtgcgtccccaagctcacccgctctgaggctgcccccgctagtctagctgccgagcccggaagtggatgcagccgctcggcggagaggacgagggggagggggaagtgcttccggggaaacgggccggggttggtgtttgtaaacttgcctcggtcccggtgggggcagccgcggcggtggggttggcagggtgtgctggggcctggaggaggcgccgcgcggccagggagccagcgggaggccgcgcctggcaggtaggagcaagccccaaagaccgcagcgtcgtccgtacagacggcagcgcttcagtagctcgcaagccgtggggtgccgcgcgggaagggggaggggaggggaggaggggcgcgtggcgaagggagggggatctccgggggagggaggggaaaggccgtgcgcgcacaccgccccctgcccgcgcgtcccgccgcgtccccggcccgggagagggctctcggaggggacgcgggcgcgagcacgcatctcgcgcgcttctcggcactctccggctctgctcccggttggtgcagcgggtgcagaggctggctggccggagcgaggcgggcgacacgccgcgccgggcttcgcctgcctgtcctccacctccgcagcaagtttccctaccttcgggcggacggggagaacgcacacgtgtgggcactgccagtcccgtttctgcccgccaccgaagcacccagcgatggcccttgagctttcctccaccctagtcttgccgcctctgtaaagtgcgagcttttcgggccggcccactgggcacaaaagccccaaagggtctccgcccccttcttccattcctgagatggcaaatccaagcaactttccttttggcagagttcctccataggaggccccaattacttttgctcctgttggcttccactccttgcccaggagaccagttcctcctattgacctagaaagaaaactcttcttgactcatgtcctcgttctgagcttcacagagagcgcccagcaaaaaaaaaattcatatcgcacgttgtaatggcctgaagatgttgcatttagcagcccccctcttcctttctggtttcaggtttctgaaacagatcgtgagct

SEQ ID NO: 58090 - DNA, 918 bp, Homo sapiens
gtgcctgagcacagtctctccagacgctgggtctcaggcctgtaaaacggatagtctcttgagtcctctccagctctgacctagaagatgggtgtctagggagagatgcaggaacgaacctgtggcctggctaggcctgtcaacaactgggagggcaagttggggcccttgtgagtccaggatgttggcagaggctagggcagtggttgaataggcaagggctaacagggcgggaggcagcgctcggctcaccaatgcgcacagaatgggtgacttcctgcagccggaccagcagagcgtgcccgagctggcgcacgcgttccaggtcgtccttcatggagtagctcaggtccataaggtagtacaggtccaccgggtatccctcagcacgaaggaagcggacctggagctgctggggctcccctagggggtgggcggcgggcgggtcagcagagcgcattggaacgccagcctagacctctggcctggccccgcctcccctaactcaccaggccgcagcgtgacccggacccgctgcggcgccagctgggtggcaccctctccgcgggcgccctggctgagcggctggtcctgcagcacctcctgctggccgcggggctcctccagctcctccagcgggcagcctcgagccagcagctcctctcgtcgggcgcagcgccgcgcctccgcctctcccgacgcggtgaagttctgctcagcaagaaaaggcgcgtcgggacccggtcctgcataggccctgggccccgctcccaaaaacaccctgcaaacccggccacctctaatgcccccacctccagtccactccttgagtccctgattccctcccctcttcctcgccacagctacccttgaactccggtcttttttgttgttttgttttgtttttgagacggagtc

SEQ ID NO: 58091 - DNA, 1642 bp, Homo sapiens
cgcgtgcccaggtcggggttggaagaaggagaggaggaaccaagcataagcatttcctttcagagttttccctctccccaaactctccctttttcacactagtcaatacaggggtgttaaggatgactggggagaggggaacgtggaggtccccgcgcgcagctgctctcctgaggctcgggacctgcactacctccacccctctcattcccaggcctggctccgccctcgccctccgcgcgcccgcttcagggccgaaaagtgcattcctgcggctcggcgcgcgctgcctcctccttccttcccgtctccccacccgcggtcctagggccggagcgcgctcccgccgtgaactctctgggaacccccctcggggcgggtggccgagcgcgctcacctcctcctgacccggccccgccccaccccgcccaggccgtcttcagcgctgccgcggagtccccccgccccctccagcgcagccagagtctacccctcctagcccgagcagtccgccctccgccgcggcccgggccgcctccctccgagtccccgaagccttatcccgcaactgacgccccctaagcgcctcgaccgtctctctcgatgctccttcttcgaacataacttcacttttagagcacaaaactaccccataagctgtgcctgccgtgccaactgcgcctcgatgaatctgcccctgatggccaactcccctcctccagtttctcactgccaagggctccctcggcaataggggcgcttctggtcactgactgttctcagggtctttaaataccctctagcctaggcataactgccctcccttcggttagtgcccctcagctctccaaggccgcaacactgttccctgggttgccccttccggcactgagcgccctcgcccggcggagaagggggtgaggtgggcggggggctggccacgtcagaagtttgccctggcccggcagggccgaatggggggaccctggccccggacagcgccagcagcggcgactcccggaaatccccccctcccccgcgccccgccctcagccgccgggccgcccggcctgcctgcccagccggctctgtcagcgccgctcacacgggcagcgccgcggagcgggagcggcgcccggcccggcccttcccccgccaggcggctgtggctgggccagggcggggcgcgcttttctaagaatctgttgtaccgggtggggggcgcactggggtgctgcaggagtggggcgcctgttggaagaataaagggcaggaaggggtgccagagtaggcgagggatggcgggcgcgggggaggggcggggggctgccggggctgggaaaaggcctgacttgtggatggcgaggaaacctcggggtggcaaggctgactagggggcttgaagcagggatggagagggaatgcactgctctttccaacccagtgtaaactcccttctcctcccccaaccccaaatacccatttctgaatccagtcacccgaaccccacaaaaaaaagaaagaaagagagagaaagaaaagaaagagaaagaaagaagaaagaaaaaggaagaaagagaaaggaggagaaagaaagagagagagagagagagaaagaaagaactttctgaatcagaatctg

SEQ ID NO: 58092 - DNA, 1828 bp, Homo sapiens
ggaaccacgtggatatcttggagaagaactgtacagggaacagtgtgcaaaagccctggtggtagccaacatagatgggagggagaggagcaggggatgaagtcagaggagtggcagagggtcagaggacagagggtcttgtaggccattataaatacttcggcttttacccttagtgagatgggaagtcattggaggctcttgaggagatgatacggaagctgtagagaggttaaatagtttttccaaggtaaaacagcttgtaagtggcagaaggtagggaattaagctccaaggctgaagttcttaaccccatgctgccactgaactttagccttctttatttgggcattgctatcctgtgacttcaaagaaactgggacactgggaagttatgcggcttgcccaaggccacacagctggtaagtgacaggggcaggactgcgccttagtctgtctgcagcccgactccaagttctttacaccacaccgcctccctcaggtgtctggaccatactggcttctcttgcatggaggtcactgcagtgggagaggaggcaaaccaaggagaccttctcggcttcgggcagcggtgctgttccttaggaagctccaacccttggctctaccggactgcgggcatctttcccgagcactgcacggaagaaaagaaaattggcacttatttcagggtggcccctcaggcatccaagagccagaggagcaggtgtcacgggatggcagcgagcgaggccaggccaggagaagcaaccgcagcctcctatggtcgccccttcccgacccaccccaggcgtcaggagttccgcgcccgggtaagggaaggagggcgggcgggcggggcggggcggggttttggcgccgcgcccccgtcacgtgatgaagccatcatggcggcggccagaggcctgcccggctcccggaagcaggctgtgaggggcgggagcgctgctggaacccgagccggagccggagccacagcggggagggtggcctggcggcctggagccggacgtgtccggggcgtccccgcagaccggggcagcaggtgaggcggagtctgggcgaggtgcaagtggatgtggcagggctgggcaggggctagggggcgcagtggggtgccagtgacctggaggagtgggcctctgagatgcacacgcatgaccctgaagcaactcgagaggcctgcgcgggtgggagggatgcccgggacagaggatgagacactgagggcaaaaagaggctccgcagcgaggacgggaggtaatagaaggaagtgtacgggagctgctgtgggaaagggcagtagaatttgcgggagcgggattattgaaagggactccctcttcacaggcaaggatgggttgagtgcccagtcctctcccctgtcttcttacccctccctgccccacagtgtcctaggagacagctttggcgtggccactcctcccacccacccaactggtccctccggtctgagatcttggggagtggagttggcagcggggttgggtggagctgccatctgcttaagacagccccttgaccgtgctgcccgaaggatggatatggctctgactcccacctctcttcccaggtcgtccgggggcccaccatgctggtgactgcctaccttgcttttgtaggcctcctggcctcctgcctggggctggaactgtcaagatgccgggctaaaccccctggaagggcctgcagcaatccctccttccttcggtttcaactggacttctatcaggtctacttcctggccctggcagctgattggcttcaggccccctacctctataaa

SEQ ID NO: 58093 - DNA, 1788 bp, Homo sapiens
aaaaaaggttattaacaaactgtagttagtcggtcgcctgtccttaaacttgcctgtcacttctccttaactctaggttctcctttttgcttctaacctttgactcttatttttttccacagccgtcatggaaatgatgagtcagaagattcagcagctcacagccctgggggcagctcaggctactgctaaggcctgagagtttttgcagaaatggggcagagggacaccctttgggcgtggcttcctggtgatgggaagggtcttgtgttttaatgccaataaatgtgccagctgggcagaatgttggtcttttcttggattaagcaagggactggtgatgagatggggggtgtggtcgagagtgtgggccccgtctcagagcctgatgcgcaggggtgatgcgatgcgcctcttggaggctccatcgcagggccctttgaccagctggaagaaatcctaggctgggagtctgctgctgctcactctgcagagctggttgccaagggaacggttggcaagcggaagtggggctgcgctggcgcttcctcttccgggtcggcgctcctgcctccctgcagggagctgcttatgggacaccaattcctgcgcggcctcttaacgctgctgctgccgccgccacccctgtatacccggcaccgcatgctcggtccagagtccgtcccgcccccaaaacgatcccgcagcaaactcatggcaccgccccgaatcgggacgcacaatggcaccttccactgcgacgaggcactggcatgcgcactgcttcgcctcctgccggagtaccgggtacggtccgcgaaaagtgaccctgggactgcgtgcatgcatgcctccggggtggatggcattccgccaacagggtcactccgatagcgcccggcagcccaagcacccttcctacccttcctgcctccctgaagtccagcattaatcccctacccggcgacacccggcagccccttcacccctgtgtacctcgcaggatgcagagattgtgcggacccgggatcccgaaaaactcgcttcctgtgacatcgtggtggacgtggggggcgagtacgaccctcggagacaccgatatgaccatcaccagaggtaggttctcagataccatttatttaacttccttgacctcagctttcctctgtgctccaattcagccatccactgccgtagtccgcgtcagcgaaaagaactgcttcatcactgaaatcaaactcccactaggactacatcatccttccggccctgcctgttcttcacccatctccctggcctgggacctcctttggttcccagggagtccctcaggccccttatctcatctccttccttagccaaggctttttttccatcagcaacttcatcaccccaactaaataaacccatctgtgattaatccattctggtgcccttgctgctgcacctaactgctgggcccacatgattgtggcagttggtgacagttcagatgtgtgaagttttctacttcatttacacccttccaaagggaaatccttcttgctcaagggtagcccattccaatccttttcttctccctcaagcctctaccgcatcaaactgagtgtccctgcctcttttcaaaagaagttgagcatttcctcagtctcccacctcaaacatcctcagctccctcctaccaactaagggaaatttcttcccttctattggaggttaatcctctgtcctgtttccagtctattactttcttctctgggattcttttttcttttctttttttttttt

SEQ ID NO: 58094 - DNA, 974 bp, Homo sapiens
catgttgtatccttctgatcctccccagatactgtccccaacttttagatagttctcccgcatcctcacactccctagattctccctcattctctccattccctctaggcctcctccacagctccttaaccgttcccccgttatactccaatcccagtcctaaaacagattccagcccttctagcctcctgccggggccaagctgtttccactccgccagactctgtgaccctgcccctgtcacactgcctcctttccccagtagtccccgactccgcccccatgcctgtaggtcccctccctcctcgccctggccacctggccccggaagtcggggggcgggctctcatagctactgcccgtcaccagctcgttattgtgctcatatagggtgacttgaccccgaggcggtggaggagggaacaaccccagagagcacatcttgccggttcgcaggacgtctgcagtcggcaaactcctggccggaacggcacagaccgcactcccgcaactcggttcccgggctagattcgtatgcggacgggtaccgcaagggacaaacggcgaggcggaactcaacggaagtgaagaaaagactaacgggaaagaaggacgagtacgcggtcccgggacagacctccaaagcttcttcctgcgccccctggcggccggagggggagcagcgcggacacgtcccccggccaaccgttggttaccaggctggagtggggtttttttctgttgttttccatgagactactgtttttcccagctccgaattcccgaacaccttctcccactcactatcttagcgcttagaaagcccgaaataagccacattcagggaagtaccaaattaatcctcccaggcctgtggatcacccagaggaaaatacaggctatgtcacaggcagctggctggaaagctgagggaaaagcctcagagaggaggaacagtgctgcacccacacggt

SEQ ID NO: 58095 - DNA, 1938 bp, Homo sapiens
taggtccttcacgtgcgcagttcacaacagagttcgcgctactatgagaatctaatgccgctgatctgacaggaggcggagctcagcttgctcagctcgtctccggctgtgcggttcctttacaggccaccgacacgacgggccgtggcgcgacccctgctctaaccttttcccatagccccatttaatttcctatgtgagttcaccgtcacctgggaagtcacagaaagcttgaagaacataaggtatacactggggatggtttggggaacctggctgggaaagcctccctgagaaggggaagtgggcaggtttgagggagaggaagtcggtgactgacagattagtggagagcactgaggacccacgatagtttccgtttgtaccttagtcgtaacaccatccaaacccagatacccctaggaaaaatcactccggcctgcaacttgcatccttcgatgaaacctcgattttcaccatcaggttataatgatcggttaggtgcctgcttcttaccctgtaaggtgaactggagagaaggaacagtgctgttccgcccgctgcccccgccctggcctggcacaagtactgtcccctcctccatactgcttatttaacgtttgtggaacgcttttcaccatttgcgggttctagaaaggcccaagtccaggcccggcgcgctcacccagtaacttcaccagggggcgcggctggccaggcaacgcagcgaccgtgacccacgccctatgggctccgagcgcttagcgggcggtctccgccggcccctccctacgacctgggcgggaaccgagagagcgcgcaggccgcttctaaaaggggccccctactttgggagtcgtcaccggagcctgggtgcccggagctccgcccgctaccccttcccgggcccgctggagcccggcgtcccgacccggggccggtaaccaggcgcacatggcccgcccggccctgtttgtcctggcagcgcgccgccgctatttgaagcggtttttatctcccagaaaccagcaaaaccccaagcggagtctagggaagatgaaaggggccgaagggttggggaggggaggaccgcgaggctgcggcgggcgggagctggcaccggacaggcggagaccgggaggcgagagggccagactctggggggtccggaggagcccgcccggcggggttgaggcgggatcccggggttccactccaggccgccgcctcgctcagaccagctccaaggcgccccccgcctttcctctgccccagccccctctcccgggtctcttccgtcacagcccccagcccactaaagaagtcttcggaactcggatttcttcaaagcgcctttgaagtcgcgcgcccagccggagggcaggagatttcgcacctgggcgggggcgggagtggcgtcagggtggggagggggctcgtaacccgagcccccccaggatcgccggccccctcccacccgtagcagcccctcttgcgacccgtgcggtggacagtccgacgcggggcgcagctgggagtcgggcccaggccggggggagcggcctgtgagccccctcagcccagcggggtaaccttggggggcgggggccgcacaaagccctattgtggctcggggatgctgccacagagtggtttttgttcttcggctaactccgtggcgggcacgactgattgcagacccagggcagggggcgggttacgtgccaggcccagtctgcccgccgggagccgcaccaccgcccgactggggccgcgcaggagtccgcactgcaaccgcggtgcccgcgctcgggtcgcgtcactgccctgaccagggtcagttggtgcagtccagaaagggccagggtagaaaccagtgagtcttcccaactctgcagaaagcactgcacgcccaaaaactgaacaccgctggaggat

SEQ ID NO: 58096 - DNA, 911 bp, Homo sapiens
ctgtgggggagataggcaccctcagaaggacaggacaggtcgtgagctccggggctgctgggaggtctcttgcggcctaggccaggctcagggccgccggggatctcgcctccatcccgtgcctcagtgtcccggcgcggccgaggggcgggcggcagggggcggggcgcgggcggggccggccgggccaggcgcccgggcaggaggcagctgcatatctgcggtcccgaccacaattgctgggagtcgcgtcccggagactggcggcgctgactctgcccgctgcggccgccgcgccgattagagcccgagagggagcgccagcccgggggagggggcggcggcgggggaactccggatgccccttcgcctccgcccagccagcgccccccgctgcccggcccagtcctttctcagccgcccgaacccaggaccggagtcctgcctcttccgccgtagctttctcgaggctgcatccaagcttcttcctccggatcttgcagtgcccgaggtcccgacggtgccaacatcccgttggcccccagcctgccagtctctcatgccctttctcttccccatcaccccacacagagaggagtagggatctcagagctcccccattctcttatcctccgctccccaatgcactctctaagcaaaagccgttccaagcgaagaagagaatcagagactcagaggacgggctttccagggccggagcaccccctgctggctggcccgaagcccctccccctccccctccagctgtgacctccagctgtggtggctgggaagagctggcccctttgatctaggagcgtggcaaccccctccaggcgccccattaacctccattatcccaattaggcagccctcccagtcctggatccaagcttcaaagccccctcagt

SEQ ID NO: 58097 - DNA, 2774 bp, Homo sapiens
tattattattttgagacggagtttcactcttgttgcccaggctggagtgcaatggcgagatctcggcttaccgcaaactccgccttctggactcaagcgattctcctgcctcagagtctccagagtagctgggtctacaggcacgtgccacctcacccggctaatttattttagtagagagggggttttgtcctgtcaagcgtggtggctcactcctgtaatctcagcactttgggagcccaaggtgggcggatcacttgagctcaggagttcaagactagcctggccaacttggtgaaaccctatctctattaaagatacaacaattagcagggcatggtgcctcacgcctgtaatcccagctactccagaggctgagacaggagaattgcttgagcccgggaggcagaggtagcaaggagccaagatcgtgtcactgcactccagcctggtcaacagagcaagactctgtctcaaaataaataaataagtaaataaattccaccagtggtcactgcacacttagggaaatgctaaagaagtagaattgtagtcagggagtcctgcctcacctgccttgagaccttgatcgggcacacttctcaagctctgtttatttcctacctttggaaagggataatatatctacagatgttagttatgagtttgtgagtgactggagaaattcttcctgggacactcccagggacctttgcccaggcacctctgatcgcctacagcggcgggggaggggagcgcagagcgctggcaggaggcggtgaagtttagtgcttctaagcagggcatctgggtcgcaggcagtggtgcggaaaacccctcttggagacagaagtctgtggcgctcctgtcctctccctccttctctccactattttcctggtcataccaagaaggaactaacatggtgttccagggcctttcccctacaggagccacccactcgcccagtttttctccctgggggcagtgaaggcttccggaagaagcgctgagaagtcaggtgtcaggcctccacgaacttcagctagcttcttgggctcgagggagggagggcgcgcaaagccggaaggaggggtttgcggctggggagagccagagggcccacccctacccggaaactgggggtggagaggccccaggccagctcacgccagtcttccagctccgggctgggcctgaggccggcaagccccaccccattcctctgggcacctcgtggcccgggcaggtttgtttacgaatccggctccctcctcctccagcccggccctccgcccgcccccagggtggccccagttccgtgagagggggaaacagagccagcccctggtccgctgccctcctctcgcctccccttcccttccttcctccagcctcttcctagaatgcccacggagggcaggtccttttcccacacctgtctgggccatgctccttttctgggaatggggtggtgtccctttctcctcaactctggactctggagcggactcagggctacttgtctcaggagacgaaggagaaaaggaaactgcttcacttctggttaaaagaggaactttttttttttttaaatgctgagctgggccgggccgggccgggcgtggtggtccacgcctgtaatcccagcactttgagaggccaaggcgcgcggaccacttgaggtcaggagttcgagaccagcctggccaacatgttgaaaccctgtctctactaaaaacacaaacatcagcgggacgtggtggcacacacctgtaatcccagctactggggagtctgaggcaggagaatcgcttgaaccctggaggcagaggttgcagtaaatggagatcgtgccactgtagtccagcctgtgcaacagattgagactccatctcaaaaaaaaaacaaaactaaatgcttagctgccaggcaggacttcatcccacttggggtgcaggggtctgggtttgtgtgggtaccacaggggttagttgacattaagcacaccttcctcaggggtgtggcaagcctaggctccctgagaagccttaggggtttgggtatttggggaagggaagggaaatgttttaattatgtgtttgttccaaactggaatccctaggggtcagatttaaatgttcaggaaagctctatgtttgatctatttggggtataagccagtctctgaccctcctcagttccctgagcctcccttctccagttctcaagaaagtagatggattgtgaaacttccagtctctcagcaatctctcttcctcttcctcaccatgcctccaactgctgttggttttgtttggtaaaggatcttccagctccagagaccatcagctgggcttacggtcagggaatattaaaaaaggttgagccagagttcagctccaacaataactaaattgtgttcctgaccatgcctcccaaccctcaaacaaaaattctcattttacaaccagcctttctccttcagggccttcaagaccaccagagccacagactgcagagtcgaatgaatgccttcctagtattactaggtgcagcctaggcagggatgaatcacaatgcttctcagataaggaaagaaagacacagcaaaggtacagaatgagtcattttattttatttatttatttatttatgagatagagtctcgctctgtcgcccaggctggagtgcagtggcgccatctcggctcactgcaagctctgcctcccgggttcacgccattctcctgcctcagcctccccagcagttgg

SEQ ID NO: 58098 - DNA, 3859 bp, Homo sapiens
ccgcccgcctcggcctcccatagtgctgggattacaggtctgagccattgcgcccggcggcagtttaattccctcaagaatttatagaaaacttttggtggaactattctgggttggaatctaacactacaactcatttgctttgtgaccttgggtaagtcacttctcagcctaaatgtcttcacttataaaatacataatatagctgatacttaataaaatcttccttttaaggatgacatggaatactaactgcctccctgacttaggcacctaacacggtaggcagtcagcaatcacttcacctttttacctgtttaaagcagcagaggcctcagttcttaccttcaaagggcttaaaatagtttaggagaattcacattttaaaacataagaacatataagcaggtgacaacatataagatacaaatactgaaggacatgacctcatcgtgtcattgacaagctattaaggccggctccaccaaaacacggataaagaggaggccagaaatccaggtgcctgcagtaaagtttcttaaccttcgtgattgcaaaaagctggagctcagctatcttgctttatgcataggcggtatttactattaagggggaaaaaatggaagtgacttatccgcactttagcctcaaggcttgaaaagttaaccagtcgtttaagtggttagcgcctttgtctgggggaacttaataaaatcgcgttttctggagtctcacggagactctgcatattggtcagctcagtattaacttattcggtgagtgctgtcaccagatctcgtcccgcctgcattcccagggcttgcagcgacattgaggcatctgcccgcctgtccgaccacccgggaggggggtaagatttgagaggtactttataggggcagttaaatgaagacgcaaacaagtcctagtgttgatgcggaactgcgcgccgaatgccttggctctgacacctgttgagctgcaggactccgctaaagcgtcccacctaatgactgtaacaacgtcccctgaggagggccaatatggcgacggtctcctcttggcatagccctcttccctccctcatgatgggcagctccagtaacgcccattggctaactaggaggcggtgccaggcctacttcgtcccctcattggattgaataactgagggagccgccaattctcctctgccactccaagtttccgccctcagttaattcggcgtttaattggcttttagttcacgtcaatatgcgtcctttcctgtctcttttcagtctaactccaatcataacgttcctggctgcccgcctgatttctgattggttttaatcagcttcatcctctcctattcctgcctacttcttacctctccgcccactaggattttgcccaagcatatcccggattctggttggccgttgttctgtcattcctatcaaagctttgcctatccctacgtctcagggagcccgcctgccggttgactggtttccttccaagccaatcatctccagctcccgcccatcttcacttcctgcatccttcattggcttttaacactgagagggcggtctttttaggcggacaccaggcacgcaacttagtctcacacgccttggagagcaagcgagtcttgccattggataattccaccgtctttcttctgcaagtccctcctttccccctccctcattgggcggggcagcagagaaggggcggggcctaggttgggcttgtggcgcgctgctccctcctccttacccccccctccctgtccggtccgggttcgcttgcctcgtcagcgtccgcgtttttcccggccccccccaacccccccggacaggacccccttgagcttgtccctcagctgccaccatgagcggtaaggatgagtccactccaagcttaggggtgggaggcgagtgagggggcgcgcgcgagggccgaccgggcgatccccgccgtgaagcgggggcgggcgggaggcggcggcggcggcggcctaggtcccgcccggggcggagggaagggagggagacggggcagtggcggggcctccgaggaggagggggatgggccgcccgccccgggggagggggcagcgtggcctcgcccgccccctgcccgccccggccacgggggacgggccttaccccccactactcggccgcccgcctgaggctcctcccgccgggggctggagccgcgggggcggcccgagcagcgaaggccccgcccgggccaaccgcctgcctggtccgccctctggtcgccgcctgctccaaggccctcctccccccactttccgtagatttcccttcccccccgccccccaccgtcccgccctttccacgcccctcaccccgaaaccgccctttccctcagggcccgccctccgccccgaaaccttctgactactaacctgtagatccctttagttccttagcagtattcacaaatgtttttctactcacactttttacttctttttcccctctcgttacttttcacacttggatttttgtttgtctttttttttttttttttttttgagacggagttttcgctcttgttacccagactggaatgcaatggtgcgatctcggctcactgcaacctctgcctcccggattcaggcgattctcctgcctcagcctccgggagtagctggaattacaggcatgcgccaccacacccggctaattttgtatttttagtagagacagggtttctccatgttggtcaggctggtctcaaaactcccgaccccaggtgatctgcctgcctccgcctcccaaagtaatgggattacaggcgtgaccaccgcgcctggcctctccatctcttttaaacttaattttagcaagctttccatgcacccacatgttgttttatgccttacctgtccttttcctttttttcccttaggatactttttcttatttagaaactctcaccatgcctaccgtccttcacatttcctatccccaaagcactttttgaatgttttcttagtttaattttgtacaagggagaattaaggcccacttttggcacattgaacctagttcatgtcctgcatgccctgcagctcccctctgccctccaatccattttctttatactggtggctttcgccttcctgttagtcattgctatttcatcatagcctccttttatccttcctacttcatttcttttcttccctcaagtttacgttgtttgttttttaattattttagaccaagatcactccatggatgaaatgacagctgtggtgaaaattgaaaaaggagttggtggcaataatgggggcaatggtaatggtggtggtgccttttcacaggctcgaagtagcagcacaggcagtagcagcagcactggaggaggagggcaggtaagtgataatcatagagtggggaaggtgttgagaagatgtaaatattcttagataattgccttactcttcacagaaagcgttttagggagagactaaaccattttatagataaggaagtaagagaatggagatccccaaagacaaaggagtttcagcaatacagataggtcagctttttgtttctgttttttgctccttgtctgcactacgttgctgtttatttgttgtatactgccccctaggctggcagctgggtgtcactaactcctttcctctcccttattttcggccaggagtcccagccatcccctttggctctgctggcagcaacttgcagcagaattgagtcacccaatgagaacagcaacaactcccagggcccgagtcagtcagggggaacaggtgagcttgacctcacagccacacaactttcacagggtgccaatggctggc

SEQ ID NO: 58099 - DNA, 719 bp, Homo sapiens
gtcggtactcagactgtcctccctggtctaagccagatcattccaagaaagggtttccaggaagccactagggggacagaaagctagggaaacagagaacaagtcccctctgactcttaattctcaaggagccagtggctcacaggtgtggaagtgattacctatttctgttgtttcttactctgggaaagagtctggtggagttggactcctctgtctctactgcagaacaagccatagccctctcctcccaactccatgctgaaactctccacatcctgtgcccgcccttcacattttatagtccctgaagcttagtaaatgtaggaggtatactatatgtattagtcatcagaggaggtactttctgccctctcaccgcagcagggaatttctcctctgctgacctctggtggtgatagtttgaactgtaccctccctttttagttagtggcctgttggcaggtaatgatgcatattttctcaacaatttaaattcaaatgtccaagtatagtattaagtggtaattttttttcattgttgaattttgtacgtctttcaggcagtatagtgtaatacaaagaatagagccggccgggtgcggtggctcacgcctgcaatcccagcactttgggcggccgaggcggagggatcacgaggttaagagatcgaccccttcggccgggcgcagtggctcacgcctgtaatctcagcactt

SEQ ID NO: 58100 - DNA, 2611 bp, Homo sapiens
gctgggattacaggcgcttgccaccacgcctggctaatttttgcatttttagtagagacggggtttcaccatgttggccaggctggtttcaaaatcctgacctcaagtgatccacccatcttagccccccaaagtgctgggattacaggtgtgagacaccgtgcccagccaaaaaaaaaaaaaaaaaaattgttaaagaaatatcttcaggcacagccctccaaactcattcgtattcattcaacaaataagtatgaactatatgtcaggcactatgctagaggccacaaaaaacacacagtccctcttttacagattttatagactagcaggggagacagaaatggatcaagtaaacacgagtgtcaaatgtcaagtgtgctaagtgctaggagagagggccaatgaactataagaataataagatgtgacttgaaggggagagcaatgagcaacaagaagaggaaaaggtaggcagaggccagccacaccaggccctgtgggcctgttaaatatttggggctttttaagttttcataccatttcccatctgcttcctgctaggcattacgctacccgctttttattttattttattttattttattttttagacagagtctcattctgttgactaggctagagtgcagtggcacaatcttggctcactgcagcctctacctcctggtttcaagcaattctgcctcagccacctgagtagctgggattaaggcgtgccgccactactcctggctaatttttgtatttttagtagagacgggatttcaccctgttggccaggctggtctcaaattcctgacctcaagtgatctgcctgcctcggcctcccaaagtgctggaattacaggcgtgagccaccccgcccggccatgctacacgctttaaacacatttccaaacttacccttcacaaacacattatgagataggaatgattatccacatggggctcagaaaaggaaagtcatttgcccagaatctatgtgactctagagctggctcctcatcatcgtgtctattgcctcctgtttacccctccatcaggactgtgtgtgtctctgtccacgtggaagagctccccacaactcactttgccctattgtaagtagttcaacctccaccacctgtttcagagcccaaatgcagtggctcttccctgaactttttcagcacctacagcttctgtacttctgaaatcttgaatgatggaaagtcccttctttgaccatatacctcctggcccagctcaaaaatcactgtttttttgtttgtttaatttctctgacttctccaggcagggttagtcattcttgctttatgccccttggcactcggttaattttcctatcttggggtttactgcattctttatctcttaccttccctgagccatcttggtgcctgaacacagttcgtggccaccgaaggtgctcgatgacacttgttgaatgaggggttctattgctcccttccctccaattcccacttgccctccacctgctactctgttatctactggctctgcccgtctatgtgtacacatgcctgacacctcagacaaggtgactcatgaaggatgcccctgactagcttgccctgcctcctctgttactgtctttgccgcatgtcttctgagtcagtataaggtggtggttattagtaagtgatcctgagtcagactgcttggattcaagctccactcctgcctcaccgactgacttcaagagagtttccttagttctgtaaggaaaagctcttcatctgttaaatgggggtgtgacaggagcacctaccttctagggttttcacaaggattacaggaggccacatccactgggtctggaccacagtaagtgcccagtacccttgatctagagttactatttttcatgtcaattgatgcacagtcttactcctctacctattgtcttggccagcatccatcagtgtgtctgtctgctggggagatgcagggagaagactgtcaattgatctctgctccctgggatggatcagccgtctccagctttgtgtaccatccttttctctctgcgtttccccagggctccctgtgccactacttgacccagtacaccagtgactggggaagttccctgcggatggcactgtccctggcccagggcctggcatttctccatgaggagcgctggcagaatggtgggtgagctgggcataggaagtcaagggagccacagtgctatgtttgtgattctgccttagtttggaggggaaagattgggtcaaaagagggaggaagagccgggcacggtggctcacgcctataatcccagcactttgggaggccgaggtgggcggatcacaaggtcaggagatcgaggccatcctggctaacatggtgaaaccctgtctctattaaaaatacaaaatattagccgggcgtggtggcatgtgcctgtagtcccagctactcgggaggctgaggcaggagaatcacttgaacccgggaggcggaggttgcagtgagccgagatcgcgacactgcactccagcctgggcgacagagcgagacgccgactcaaaaaaaaaaaaagagggaggaagaaaatcca

SEQ ID NO: 58101 - DNA, 1816 bp, Homo sapiens
actgcgcccggccacttgtattttttttttttttttaaaggctgggtacggtggctcacgcctataatcccagcactttgggaggccgaggcgggcagatcacgaagtcaagagagcgagaccatcctggccaacatggtgaaatcccatctctactaaaaaatagaaaaattagccgcgtctgtagtcccagctacttcggaggctgaggcaggattatcgcttgaacccgggaagcggaggttgcagtgagccgaggtcgcaccactgcactccagcctcgtgacagagcgagactccgtctcaaaaaaaaaaaaaaaaaaaaaaagggaggccattgtagggaggccattgtagcaattcaggggagagatgaatccaggcgacagatgatgggaggtttggagcagggaagacagagagaagtggagagattccagatatatttgagagacaaaactgataatttggggtaagggaggtgaaggaggcagagggatcacggacgccctccttggtttctggtttaggctacttgacagatggcggagctatgcaattgagagagggaatcctgggagagattatgaaatctctgtatcttccgcaagaatgtttgtttgcttcccttgcgagtgtaagacggagccgggaacattgaggcttggggctgggactcagcagctcttctgcccttgccgagaactctgtctatatctgtattacaacacttaccatagtgtattcattttacaaggtattgcacccagtgaaccatgaggtaagagagcaagggaagagtttcttctcggtgtctctaggactttgcccagcagctggccccgccccctccagcgctctccgcctagccccgcccccaggagatttccggcttctcggtactggcctagccgtaaagggctccgctccgcccctagagcaaccgtttcctcctcagtcggaccagagtgattgattagtttgttgtctaatcatcagtcgagcggccacataattaccaattaggcagtagcagaggcgggtgccgaagcacggggtctgggtgactaggaagagccgagactgcgaaggagaacgcagcaagcccaggcggcggtggaaaggtgatggggtatctggattccataggtttttccttttccccttgctaggtcaagagtctcttcgcagcttggggctaggatcttcatttgccttttttcttttttggaggaagggggctgtgtccacatatttaagtatttgaggttcttgggcaacttccttcttacttcgcctcgaggcgtatcctttttttagcctgaggtggggtcctccccagggagagagaaagttgtttgagatcctttcttactctgtgcgtggttaaaggcctccgtactcagttccagggaaagggagatgagtgatggtggggccgagactcgcgggtactgcctacttccgaagagttagacgcttccacctgggtggaggggccctgggaactagattcctgtgttaggaaccaagtaggtattgagggcgaagaaacaagtggaaagagacatttcttttcttttcttttctttttgagacggtgtcttgctccgtcgcccaggctagagtgcagtggcgcggtctcggctcactgcaacctctgcctcccgggttcaagcaattttcctgactcagcctcccgaataactgggattacaggtgcccgccaccgcgcccggctaatttttagatttttagtagagacggggtttcacgatgttggccaggctggtctcgaactcttgacctcgtgatc

SEQ ID NO: 58102 - DNA, 2038 bp, Homo sapiens
tcattctgggttgcaaaatggtgacttttcaactctcattccttttatttctttcattccttctagatttattacatggaactctttaaaaaagagctttcccttatcaattacagatgaactatatacagttcttcctaaaaggaaagttaaatgcttaattctttccttttaagagtaaggagtttatacaatggtcacctctaacgtggcaagttagtttttttccttttcttttttgagtatccctgtagattactatcttcatcctttctctttccacccatccctttttcctcctctccacttcttgatgcatggcgactgctccctctccgcactaacatctgaactttccagccagtccactaggggccactggtttcctttctgcccccacgctccctctctatcgcaattcgtcgcttgctagcagccgttgtctcgctggtgcctacgctgtcaaaggagccgctctaggcttttgggaggccgtctgcattgcgtggggaaggcttggacgacgcaatcgcctcgccggcccccggggtggttagcgcttccggggtcgaagggtgcgcggggttgaaagcaggccgctccgccccgtccccctcccagaccagcagaggcagcagccggagcagccgcagcctgcgccctctcccgcccgcccgccctccgcccgcccgcccgccctccgccgccctccacccgccccggggtctctttcccccttcctcctcctcctcctccacccccccttcctcctccgcccgcccgcggggcccccctcgccttcccgcccgcccctattgttccgcccccggcctcccgcccttccccttcccgcccgctccccttttcccctcagtcgcctcgcgcctgcaggtaagcctaaaaatttcccttgcgcccccggctatggctacaatttccacttttgtcttcttcttagccggctcgggtcctagtcacgagccgcggtctcgcgtagtcccgcgtgagcgcctaccacctcactgtgccaggccggtcattcacgcgaggccctggctctggcgcggcctagtaggcctcgcgcaaggcctattcccccctccccccgccttttcccggtggcggctgcgcaggagtcagggagggcgcgcgcgcggtagggggggcggcggtggatttgttggttgtggggggttgggggaggcgatggccggcttgctggccgggcgggtgagcgcggctccccgcgggggtcaggcgctggcgcagccacacggggaggcgctattagtccggcccctccccctgtatcgcagcgcccccccccgaccgaaccgtttattttttcccccctctttctagtcgagggaagggggggctttttttcttaagtggaaaatgcttggataaccgaggggagagggggctgcggagttaaagaaagggtagacgggctcccagttgccgagttaatcaggacgtttctcggggtaacgaatttttaaattacaaaatgcctgccgatgtaatcccagaccgagctatttatggaaggggtattggacagcagtgttagcagctggattgctggaatggggtacctttatcttgacctagtcaggagggaaattcgacaaatttcttggattacttggtttggagttagaaatgcatctttgtactttacctcaagaaatggcttcaaataggtttcctgttttgttttttttttttttgccttttcgaagttgcgttattgtgatatttgtaaagggcttcctattacatctgcaagagggtaaggaattaaactaccaggtctttaccacatcttattaaaaaaagaaagtcattcttacagacctaacgcttcttcccccaccaagcactatttttccatgagtgaaaagtgttgaattctgggattttgccagcaattaattgtattctgaaaatggggaaatgatgtgctttggggatgcacttatataatcacttacattcttggagtagccagaggacagtttgccatatacag

SEQ ID NO: 58103 - DNA, 964 bp, Homo sapiens
caagaggtaaggtgtaggttgcaatgcaaattacagacaaacacagaccaagcaaagtgccaacatatgggagaatttcgtctggaggacccaagggattttgcctgccccccaacctccctccccgcccccaccacctcccactccgccgcaaccccgggcttcgcttctggaccacccagaaacaaggcccaagactctgggacgctctcgcctggcaggccaggagggagggatggcgggattggagccctcggggaggagccggggccgtgccctggacagcttggtcaccagcaatggaaggacgaagcccaagtcaggaccgctgaaagtggggaggaaggggttacggccacagcgccccctcccccttcccgacctccttcccggccgtcacgtggcgcgtggctggggcgggggccgcggcggcggaagggggtggtccgggtggggaaagggaagggacacggccggctgggggaagcgctgggcgctgcggcgtaaccatgacgactgggcctgaggcggcgcgtgaagtcaccaggacaagattagccccggatcacgtgagcgcgacgtgggggcggggctgtgcctgggccccgcccctgacctgggccggcccaggtggctggttgccgggatggctgcgaggatcttaggtgcggacccccacccagcggtctgccccatctgtgttcccttccttcccctgcccccgcatgcagagagatcttcggctgaggcgtctggtgttggcaggaggggacttgtggggttggcattgggggtgcagtaccacagggaaggaaagcaggaaatgagagaaagggagacagggcacagaaaaggcgaaaggtacagctaggaaggaggaaggagctgagacatatacagacaccggagcagcgtcaagcggagtcaaccccgagaaggatggcttgaaaagctgtttggaaaa

SEQ ID NO: 58104 - DNA, 2082 bp, Homo sapiens
gattccacaggaaccccctatgacccgtcttatagactcctttctacatcggagagagcagcccctcagttgggatccctagcgctctggcattgctccccctatcataccgatcttgccagctctccttcccttgattgtcaccactcactccaatttcacccacttggaattcactcggctctaggccccatcctcctccagtgttcctggatgacccctcattatcatttcaagattcctctggacctccaaccccggctcagagtaagacatctttcttgaccccttctcagaacactcattagaaccttttttttttttaatgtggtctctccctttctctctccaaggtcacaagatttccctcagcccagtggttgtgcaactttgggggaggaggcaatggggctctaggactaaacaatgcgcgtctgctcaacacccagatcagttgattaatcttaggcggccaaaattcacttttgctctcttcagctgagagacccaagactcatggaagagggaacaagaccaccaaggtgcctagtccttctaatcctgtcgtcccacattacagcctgattatcaggccccagaggtttcctcgccagttaaagagaggttcactagagcggttctaaaaaggtttcacaaaagaagcaacacctgaagggaggtgaaggacgacctaggaaaaggaagcaagttctgtgtcacggaggcccaagggcaaggggcttaggctgtgggttgaggggactgtctgagacggacttaaacctgcaccagctccagagccctgcggaaacagagatcggtcccctccggcgtctaggtaaggcccaccctcccagaccgcaaagagccaggatccgacggcagcctctccggaccaatcacaaccttccttcatcaaggaggcggggtcggggggggctgacttttccttgtctccgcccctttagtcgaagtaaccaatctcagtgcacctaggggaagtaatcgcaatgggagtaaccaatgacgccatgaagcttctcgtgcgtgcttgaccctgcctctccagctgcgacacagatggcgcgcgggctcttgggttctgtagttttctcgcgatccaaaaggctccgtgcccaagtgagtccttaccgcctccctacccagcggcttcccctccgctagtacgcatgtccacagcttcacggaccgggagagagggggcgcggaaggaaggaggcgggacggtattacaaacaaaaaaatacggccttctcgagaagcgacggcggagggcccgctcctcccagaaggcggtgcagcctgcccgggcgagccacgcacgcagagggttgtggggcggatagctcccctccagatggaggctcacgaagtagggtgggcgggggactccatatcccagcgtgccccgcggcgggccctaccggccgcgactccgggcttggccccggccctagctcgtcggctgtgtattggggcgcgtggaggctgcagtcacggtggcgcccgcggggacggaggagggaatgagtgaagaggagcaaggctccggcactaccacgggctgcgggctgcctaggtgagccgtctcgtaccgattccttcagggcgaaaagcgtggggccgtgcggagggagtagcggcgcggccccagcatgcacctggcctgagggttgttcccggcaagcactggggcagtgggcagtggttcccggcgtgcaccggggcagtggctgctgcctccagctctaaatagtttggggttggcccggttcccagactgcactggaacactgggctttatgcccccacattcagtgcatttggtgggtactgggttcctggcttgcactgtgtcagggggtatgcactttcaacctgcattggggcacaggatcgtgcccaccttaactgaggcaggagcaatgcattcttccccccttgctttggggtagtgggccctacttttccagcctgcacctccacttggaacccagccaatggatgctagactgtctggggttccttggaccctatgtcccccataatgtgcctaggtct

SEQ ID NO: 58105 - DNA, 758 bp, Homo sapiens
tgggattacaggaatgagccactgcatccggccaagaaatatgggccccttatgttttatgtacaattctggccaaatcattttgtcggtaattctcagggcttctgtttccccaactataagatgaagataatacctgcttcaccaatggtaaacaaatatttataaagacctgaaaaaaaagatgccatttaaatccatgcaaatattatgataatatttttcaggaaatcaaaataattcctgaatctgctggccactggagagctgtgaacactttctctgccaacaaggattacccaattaccaaaagcaaacaaagacaaactggctattcaagtactgcaaaccagataggaaaggtattttctggggaactcaccatgcttgatggtgatctcaccccaaaatatggtgctggatgtatcaggtagacaaggggtttggggtaacagaaaagaaaggctgatcatctgattggtgaaataaatgacaacttggtcttaggagcaagactggagaaaaccagaaaggaaagagagcactttcctggcagtgatgcaatcacctcacagaactgtggagctgtaaacggccttgcagggaacaataaaccatctgagataatggccttgacactgaaccaggataggagggttggcattgcagttcagtttcataacaaagtggatcctttgttctatctatcctgtatcccaggcttcttggtgaagcaactgcttgtttcaagatcttcc

SEQ ID NO: 58106 - DNA, 1054 bp, Homo sapiens
ttgacaaggcttcttgccctcactgcagtgcttctgttcccaatgtcagacatcatttaagtttgggaaagcagggaaagggagaagaaggaagggattaaatacacacatacttcaaaccaaacataactttcatttctaccttggtcaatcctaggctcctgctctctacttcaagatgtttagccaatgatgggaaataaataaataaaaggaaaaaaaagatgctactgtttgctatgtgagtcacacatcctgctttgaatgtttcatggctcttaaatgaatcatttcaaagtacaggattgttcaacaaataaaatacaaccacagcaacagtagctcatatgctgcatgtgtgagcgacataatttatagaggaaaaacaagaacagaaaactttcccccaaaatactcaaagataaaatgttgtcaggggaatgaaggaggacaaactaaacagaggagcggggacaacccaccaaactgtacctaaggtaaattcatttgtctatggattgaggaattttctgttttgggaaggctgttggaatatcttaaagattctggcagcttaacaaataagtccactgtataaagaaaaggaattttgaaagcagagatattatttgatagttggtctagctgccatgctgctgctacaatgtaagctcctcaagaacaaggatctctccatttgcttgttcatggacaaatcccaagcacctagaacggtatctgtacacagtaggtgcttaatatttgttgaataaatgccaactagcacgtctcactaaagtgctacaaagcaaccccaacctacaaaacttttgcccatgtaggccgggcacggtggctcacgcctgtaatcccagcactttgagaggccgaggcgggcagatcacctgaggtcaggaattcaagaccagcctggccaacatggtgaaaccccgtctctacttaaaaaatacaaaaaattagctgggtgtggtggtacgcacctgtaatcccagctactcgggaggctgaggcaggagaatcacttgaacccaga

SEQ ID NO: 58107 - DNA, 1672 bp, Homo sapiens
ggggctccaacttggactgcttaagtcccaagaccacatcctggtgtctgggaagagtttgggtaatagaagagagggagaaggaaaatcagagaagcgatgaaagcgttctatttttctccttctcaacccccatcccagcatcttggaggctggtcaccagtctgggtgccatatccaccagaagccctaaatcaatatcccaaccacctgatacctaggctaaagacatgtgtatatcagccatctccttcccaaacacctcttatcgctctcaaggctcatatccttccagaagccatgccttatggcgactcagctcacccatactgtcctcttaaattaattcacttaattttctccaaatccatactttctctctgatatcatgtccctgatgttcttttaattaattcaatcaaaatgccatgaccctcatttccaataatccaccccatctatcttttctgccaaacccaacggggtgttgtgtcaccagatcaagatctttgttctcatctactcattcctacctccttcctattacccttttccaattccaagctcctaatcccactctttgggaagccctgggtttctaacttagtttagtatccctcctctttctcccattccaccccatcccatgatccttccattaggctccactagactacccttccctcaggattcaattcccctctccttgccacgccctgtgccccccggggctacttacaccaagttctccccacacttcaagcctctggccccgccttccccccaaaggaaggaggcgggagtagggagagaagggcggcgctcggcaacgtaaaagcgatctcccattagcgctcatcgccgccaatcgaggcttccttctctcccattggtcggctttggcctatgccccaccctcttcctcagacagggcccggccaccgcctcagcgcccccgtccaacacagactgggaggggagaccccagcctggaacgctgggactggccagagttgaaagggagactcccgtcagatcatggactagctaatgttaaaaggacttaccggctggtagctccgttgcctcccgcctgcccgcgctcggtcctacaatctgtctccagctcctcctttccccccttggcggaacggatactttcctcccgtccggccaggcgcgctcaactctcgcgagaagtcatgggtccgcgggggaagggcgagatccgtgggggctgagttggaaagcggccgagaggcgggggctccgggaaaagaaggggccgggcttactgtgggcagggctggggagggagactgagcgagtactgtccacacaggtcacacgtgttcggctgcagaatctagcgggagaaagaaaggaaaaaggagagaggatctttacaggtgcctgtagtggtggttactactatctttcagagtcatcgcttccttaacggcaaagtaatttaaaatacccttagcgctagaaatgaagtccatgtacggacaaagcaatccacccgcacagcaattctaacactaccattttactagccctattgccttgggtgaaaaccttctctgagtctctgtacaatgggactaacaatctcattttattcaaatagttgtaatgatcaaatgagatacatgaaactgcttgggga

SEQ ID NO: 58108 - DNA, 1584 bp, Homo sapiens
aaactagtatatcatctatgtgaccttggccaaattatttcatcttgctaatccctagtgtcctaatctgtaaagcaggggtcattatatctacctcatagggtggctttgaggattaaataaaatggcatttgtaaagcacctggcataagcggcactacataaatattatcttgcatttgtgagacactaatgttatccaagaaaagaaatacatctctggagatttttgaaaagattgactgcaattgtcagggtcgtgtgcaataccacctaaagtcacaggctggataagatgatctcagaatccccttttcctgttgggttccttagacaggagctctggcattgtcttgctgtctgtgaaaatggtttttttttttttttgatagaaaactggtacaagaaccaaaagcacccttaaaggcaggaggactgaggccaattaaactaacaactgtaatgaggtggatgtaggaagagaaggaggcaaaagagggtcgagaagtataacccagatgcctcaggcctcctgagtccccagctcacttccttaggtaaaagatttaggctgagagttgtcctctcttcagctctgtaagggaaaaccaacagaggcctcaccagtctctggaacgcctagctctttcaggcagggagtcttttgccaaagcaaacaatcccagctctacgattgtgctctggctggggtaggagagaacaaagatccctttctttgcttccccaaccctatggctccagccaaaggcactgtttacacaatcttccctggtgaagaatttgttccttttctctctaggttgcagctggaaaagattgattctctccttgcctattcgtttttcccatgtccctgggcaggaaaagtgtccaatacccaaacctcccacctccagagatgtgggcatacttaacagtaacttcaggcccttttgtgatgtgacagagaaccttgattttagtggcagaaagcctatctggccaggaaagggaggctggaaacatcaggagcttggtttctctacattccaattccatttattccactctctcattccctaggctttctcaggcacatttccaaaagtgaatcaaataatcaaaatccatggcagatttgggctccttcttttaaagcctgatcaggtgggtaggatgaaaatagtattttctagtgggagaagttattctttagtctttagtttattattaactccagcagcacagatgtctcctccacgccccgaaaacaaaagcaagagggagaaaaggaaagcccagagtggtagagtctaattttagtactggcagagaatcctagtgttaagttacttctggtaaactggtaactaagaaacaacagagataaagataattttcacaatttaggtttccaagtagttttaagacctaattttgcttatttccatgacatctcagggaggcagataaggtgttacccatttcacacaagagaaggaattgaagcacaggaagaattaaccaaaagccattcatgagtgactggaacccaggattctgggactttcaatctggtcaact

SEQ ID NO: 58109 - DNA, 2505 bp, Homo sapiens
ggggattaagtatgttcatttacaaattaacatacataaagagtttaatgtggtgctggcatataataaacccacaacaaggggtggcaattaagtgatcccaccattggctatctaaccatggcaactctgcaattgttagcctacaacttgggcaaaggcactatccagaatcaggactccaaaatcatcacgggctttttcctcagtgtagatgagtcacaggggtagtaacttaactattcctttccttaaaccttcttttccttgtaacagcagaatctggggaggttaattaatccttcacaggaaagctggcaggcagggtctcatgctggccccactagcttggccttaccccacctttctgggcctgctgcctcaacagaaaccctcatctctagcccaccatttgtgacttttacaacttcaccagcgtgccgggatgcgagaaaggtactggtaaataactagtgattccaaagcaaccagcctctctcttctgccttagctatcccaagccacaacctaacgggaggcgatgttttggctttttttcccacttctaccatgttcaaggtttactttttaaattgaggggtgctgactagagggattggtgactttagacgatccactatctccattgctcggagcacctgaggttctggggcctaaagtctggagatttcagaataaagaaggcacaagtcaggatgagaagagaaagcagagataggaggggagagcctgggggttgtcacaatctgaaagggccagagggcgagaaaagagtgtttgcagggactgggtggaacaggtgaaaagcagcactccaggatctaactttggccagctccaaggtatcctccccctgcgagacatccaagatggcgccaggcccgcgcggttggaggtcaccggcacgcggaagagccaactctaaggctaagggatagcggaagcaagaaagggcgagaggaccagggtgggagcacgcaaggtaagcgcctcaaagcatccgcgcaaggtgaggtgtcccgcgcgcgtgcgcagcgcacagagggctctaggtcccaaggccttacctgctcccactgcagagaagacagagaggggcggagcagcgggaagagcgaaaggaaggctcagcgcatgcgtgacccgggccaacgagtcgctcagccacggatagagtgattgcaacatacaggatcagctcaggcatcacagcgccgcctgccagggctgtggcggtatccggccggttgctccacctggcgttcgagaggagaaactacagggagcgccgactgcagaaatgaggccaactccgcggagtaagccgatccgtaacgtggactgcggtttggtctgtaccgcgtttgggatctcggacttgcgtcccctttccgagcatgcgcagtcgtcacactgccaaaacaaaactcctactcagaattcagtgttaacatacggtcgggattggggttcagtgcctaaaatgcagcaggaggaagatcttgggagtcctgctttctgtcgcgccgggactctggcatcactggatggcaaaccggctccatgggcgaatagtcagcaaaatgccgcagctgcttctggtggcttcgccctttcccccactccccgtttcctcctttccattccggtgataaaccatgagagaagcagcatcagcgagccagaagatagggttaaatatgatccgaatccctctttcctggctcctgggacagtctaggaataacgggcacctgcgacccgctgtaaggttgcgaggtcactccaggcttgcccgagcctctgctcaggtttcaactacgcgagttgggataagcagcgccctcccctcccgcccccatgctctcctgaacgtgggttttctctcccctttcgctcgcccttcccctgatggaaggaggtgggggaggcttcctggccctcatctttcctaggcctccttgtctcccagacaggacctgccctgccctttggaacagggcgacaaggcctatccagttccaaacccctgccgtccctgcatcgtgcttgaacgcagcacgagaaagacgggaaaagctcaccaaaccccataaaaaataaaaaataaaaagaaagccgcggctgtaaataaaggcaaatccgccactctctgaggggccgtttgtcctcccctccttggccccgtccttcccgccgccccctcccggctcccgggccccgcggcgccccggccccgagctcctccatttaatcggatttgggagaaggggaggataaatcacggcagcagctttacggtcccggaggagaggcgagccgcagacaggcacaccccggccggcgataaaaaccgccgctgaaagcccacggagcaatttcccgggaccccgagcgacgccattacaggaatgtaattttgcccggatgaggccccgagtttaattatcctcgcggaggaatttcaatgcggccaatccatct

SEQ ID NO: 58110 - DNA, 2728 bp, Homo sapiens
gaaagcagcaactaatctctgaaaggaatggttgagttttcagagctagaatatggctgggggtcgaggggaactgagcccaaatccttaggctcctgagctctcagctcttttcatctctctgagctgcctacccccatgaattctagggaagcagaaagcttctgctggcatccaagagacaaagggaaggggaggatataaggaaagacaggttctgtcccttgacttattattccaggaagtcaagaattctggaggcggcaacttcaagggtggagtgaggcgcttagcaggaacgtggtgggggtggggagatggaatgtgggggcctggagccaggaaagccccaccccagggcagggaacagactagaaagtgggaagtaaggggccccaagaagtggaaatgtatatttaacgttgaggaaaggggagatagttcaaaaagaacctaacattcttctctccagactgtgcctgcagcaggactagaaacctactggtttcactttagtatttctctcctcattttctctctgctcccctcagcctccatccttccatctgtttgtattggtagctggagacacactacaggatggggttgagaggaaggggtgttccaagttagctggggagagttaattggaaaatatgagggtggggtgaggacagataacaataataacgatcaaaagaactcctcagtccagggctgtgagatggccctcttattcatcactcctttccagcccactaatctatttcctgtgtcactcacagctgacatgtccaaccagccattgtcactagtcatatgcacgcccccaaacatcacaaacccacaccaggctgaagtccaggggacaggaactttaaaagaaaacagaaactcagtggataaaggtgagccagcaacacaaaaaggagcaacttctgtcccccaaataggtagaacaaaaagttttttttaatgttcatctccctgaaaaattcctggttgaaactaatccatgttttctccaaatgcaattcttccagctttctaagggtgggggtaaattgtccccaaagatatacctggagaaccctaaaatacaccccacaaagaaaatccgtaacagctgtaaacgttcttcatgtccgaaagaaagttttgggcacctaagatgtaggtgtgtagcctgattcagatgttcacatgatggggcggagagcgggtgtcccatcccctactctgtagggctctagagttccttgacattctacaccttggaaggtcccccttcctccccagggattcagcgtcgtaaaggcctttggatttgcgtaggggagagagggaagacgtgtaggggacacgtcttgcctgggagcgaataagcagatttcagctcccttgaagggatcagctttatagagacgcattgagaagaaggagaggacgacgagggggcgccccccacccccaatcagagtccccttgaaaccaagaactccccaaacagcgggggtggcttctccagtacggaaagggttacaacccaaacgctcctgtattccccttcgacagttcccttacgttatccttccccaaactggaaagtggggtgaccctcccctcccataagatcgcccccaattaggccaagtttcttacccaacagacggatcagctgttcccctcacctttcaccaacaacaaaaacagcactccgacttctggaggggagggagaagagtgggcgcgagggcttctggggtttgtggttcttctgcgcccttttgccgctgcgtgctcggatctaggactatacatcccagaaggctgcgcgcaaggagggcggggaagagggcgtccgtgacggcggcctcaccgcggcatcctgggaggcgtagttctcactcctatgacagaaaacgagggtgtggccagcaaaggacttcaaggcccatgatcccttaggagggggccggctgcattaggggtggctgctggtttgtaacgtgcgttgttgggggctggggaggatttacggctctaaagccttccatataacgctttaacggtgggcagagcggtttctgttgcgtcccgtcctgtacttttcgcacccacctgtgagataggcgttaagcgttatgcacgctttatagatgtagaaagtgaagtacggttaaggaggcggtgtgaagtgtcaaagctatgaaatgtagaactgcattagccttggctaattccacgtcatatattcttgccactacaccacagctacccaccattttggggatgggaaactgatagctggggtatagcagtttcttctttacttcaatctcagggacagaccttgtaagaatgatgtcttctgcacagctgaccatttttttccaacttgaggatttcagtgctaaggggcctgaccatatccacatctggactgggctcccccagagtggcttctgggtctaggaagaggatacaattgactgaggtggtggtaggagcggtggaatgagaagaatgaaattgaaaagggagcttggcataattcaggacctgtcacaattcacaaacaagccacttatggggcctgtttgcccaagccttttaagtggcttaaattaattaggataacaatacatgttgacgttccggtttttatttaggagaggtgaaagattgacacgtctcccacaccccaagtcacgttatagacttgggc

SEQ ID NO: 58111 - DNA, 822 bp, Homo sapiens
aatctgcattttaacgagatctctagattattggcatgcacattaaagtttgagaagccctgctgaaggatgggtgataaataatttatattgtaggtgtgcataactaaaattatctaagtaacacctctagactacattcaaactgtatggatatttttgaggagaggaagaaagatattttgtgtccttcaaacttatgagtctctaacagaattgcctagaaagccaggaactgacgcttcaaaggtgagagggtacaggagtcagtgtccccaatgggaaggcatgaggcttacataatgagaaactccctggctggctgtctcatagttaggcagacaggggcaaagttccctgaagttcactttgaggctggctgatagtgtttccccagaattaaacacttgtccccaaacagacatttgtcaccaaagtcctagggggaagcagggctccaggtctcaaaataacctggtttctgtccccatggctggggctgattcatattttgtaggaggtttgattgtagctgggaatggctgaggagctggtgtaattctcccctccttcctcatcccactgagagggagtgaggaggggcatgaagagcggagatagggtgtgggagtcaaacctgttcttcacatagcaattgtctcgtctcactccttgctctcactccgacaagttgagtccacagctgggaaaacttggagccggtctctgagtctgcttggctcatatccagcctccctcttttttttgttccttctccccttgggaacatctttccctattctcccactttcaggtacaaga

SEQ ID NO: 58112 - DNA, 715 bp, Homo sapiens
cctatgaaccaacttggttatgcccttgcctgatcttgatgctattaccaattttgtggcctgtattaaataataagacatcccataactagtaggtggcagattggtgtgtccactgcaggttataaaataaaaaactagcttggtggagggaccttcctatgtgtaatgcattgttaggtagagcacctggctgcccaatggataacctcagttgctgcctggaggcctctacctcggggaagggaggccttgagagccattttgacccaagttcaaattctctagaacaaacaagccgatctcttgctccaagctccagtcaaagaggctccagtgtgtttattgactcttgcatgaccctgccctggagaacaaacaaacagctcaacctgactcattccctccaccaactatactcaggtccattgctggggtttgccagaaaaatccctcaggccctgtggaaaattagagagccaaaggttagggctctctggtcatatattcctactctttcttcccatagaacgttaaccctccctggaggtgcagaagactagcagtgacttccaattcatttgacttgggccctctccattgcttgaggcaaatcagcttgcttcactgattcattcatttgacaaatatttattgaacacctgctatatgtgaggctctcctctcttaggatgggagcttactgatttttgct

SEQ ID NO: 58113 - DNA, 465 bp, Homo sapiens
atccactgactcagataatgagaagtgtctcctcctcaggggccagggggatgctctgctatggcaagtggaggaatcagagatgatccatggagcctgtgatatgacctccccagtgaggctgtcagccctagggtagattccttgttgactatcctcttcttatcactggtagcatcttatcacaatacttggggcacgggccagggagttacccagggctgaggatgggaggaggtaagtcctggctatcaggatagacatcttattccagcagcagttgtcctagatgtggcctgtttcccagcccactgacctttagggcacagtggggggttgggagcatgagtcagagaggaatgtgggactggttgcttgggagtttcactctctggggagaagctggttccccatgcctatcagttttctaatggcatctctagaggcagagcctagaaacaatta

SEQ ID NO: 58114 - DNA, 1017 bp, Homo sapiens
ctgaccaacatggtgaaacccagtctctactaaatacaaaaattagctgggcatggtggcgcgcgcctgtaatcccacctactcgggaggctgaggcagaagaatcgcttgaacccgggaggcggaggctgcagtgagctgagatcgcgccattgcactccagcctggaattcagagcaaaattccgtctcagaaaaataaataaataaacaataataataataaagcataaactcaaaaagaccatttcatctggttccaaaggggccgactactaaggcaccatacaaaacctccgggggcgcccgctggctccggccgactggaaagccttgatcctgcagacctcccaggcggtttcataggctgggctctccctgcactgagtcttaccccatacggagggagggaccccaaaatatagaaattctaaccaccctctcggctcagccccgacgaccctgggagccgtcaacttgcccccacagtcccggattcccagccccctacttcctcacctggtccagctccccatcccgtttccggttcctttcccccaccccaaacccaacccccggcgctaaggacagtgggagtcgtagtctacattgtttagggaaggagattggcgtacccgcagccacttccgccggaaatgctccaatcccggaaggcgcactaaattagccctaaagatcgctgggaattgtagtttaatctttccatcagcgttaaatcaggaagtcttgagaagtgaaaagccacagcctgtaagtacctaggaaatcctgggttctatccctaaagggcatcgcccttccaaaagttcattcactattttcccaaagggattgcaaatcaggaagcttcaaccatccccaatccctcacccacctgaaggtattaacaatagctaaagaccattgctaggccccctgccaccgtgggtataagagacttctcctttgcagcctgccattacttatacagaacatccacgaagacatttctggtagc

SEQ ID NO: 58115 - DNA, 1681 bp, Homo sapiens
gaagcaaggaaacacaaatggaaattgagttaagctcagaaatatgcacaccagggggtactcaacagagaatctagttttaaaaattcccatgttgttgttccataatcatttttaagaattcttccttaaccatgctaaatggtgcctacagtctggattacagagtagcagaaattgttttcttagctgaactccattattattttcctgtaatctttaaagatgtttatcagcaccctctaaatatttccaccctgaccagaaaaccactgggtcagggagggcccactactaacctcagaatgatgttcaagtcacataaaaagtggcaattatcaattcacttcaaattagcaaaattttaaaaattattacaagaatatatagttggagaccatatctccagaacttattagctataggtctgcccacctaaaaaactgcctatacccattactgccctataagactaagtttttattaaaatactctatttggaagaggaagtagtagcaaaatgtaggtgcgggggggttaaaataatttttccatgaatttagaagagtcctaagcttcaagaaaatatcttatgtgctttatttaaaataaaacagcctccaacctcaccagagacaggaaatgtcatattccagggagagtaccccacccccaccaccactcaccttggaatttccgggagctgagcagtttaggtcagagcgctggggttaaaaccagccccatgttagatgcatgcagttaagcattgtggctatggcctcccctgcctcaccaggaaaaacaaggatttacatgtgttcttcattttgagggagagacaaggaaaatctccctttataccttcatgcagaagaggagccccaaaggtagaaaatgaatgggggttccctcctttacctaccggatcgccccagttctttctttccctctgggctaacaggaggggcctcccctcccaggtctgggtcttggcgggctggcagctcccctgcccccacccagctgcctgggcgccactgcgcagctgtcccagtccgttgccatagcaactggcagcagtactacactaagggggagaagcaaatggaaaagttaaaaggcttaactttccttttcagtgaagactgggtggagaaattggaaggtacctctcttggcctcaaggctaaggcattcagagcttaagggaattacttcttaggttttaaatccagtatttatgcttattcctctaacagcactgtgaattaatcaataacattttaagatcatctaacaagattacagctcaactgaagggggaggggaaaggctcgatccttctacaacacgatcagtacaaaccacccatcacttaatccagcccaccagagcactttgggcaatcccattttaccgtctgtcacagaacagttaattaaaattgcttgaggggaaaaataacaggaaacaggggaggggaagtattttaaagacactatataactttccttctttggggggattactagagacaaaatccaaagacatgaagcactaccaaaacaacaaccaaaaaaaaaaaaaaaaaaaaccccttttaactaaaattagaggtggagggccaggtgcagtggctcatgcctgtaatcccagaactttgggaggccgggacggg

SEQ ID NO: 58116 - DNA, 3257 bp, Homo sapiens
aaaagagggactttaggatatcttcaatggtgtaaagaaaagaaatatatgaaagttcccgggagaaagagactaaaataaaagcactgggcacatggattacataaaacagaaaaggggttgtaagtatgtgattatgactagaaacacaaaacaatcgacttcattttttatttaattttaatcacaaattattaaccttgcaaagttttaaacattaaagatctaatctgcctcgatcctactgtgtccctaggattgacactttggtgtgtagctttccaaaacttttctgtggacctacaaacatatttgtcagtagaaatatgcactatcaggaaggagatatttcttgaacgcctttccatgacagtacatagagatttctcccattcgttctaacattttaacagtcttcctaaagaagcgacttctgaaagtattatttaaaaacaaacaaacaaaaaaaaacaactcctgttccccaaacctcaagtggtgagggggcgggggaaaaatgctcaagtcgaggaatacaggagcaaacttacgctttcaaggaggtgtatgggactgaggcctaaaggcttcgttagagaagtcatcgtggataaaacatccaccctcacacgccattacaggcaccgactccccttcctcacaaccccaaatcgaagacctccctcttttggagagccgattggacgactggtcccagcgctttccttaggctgtccgtctactggttccagattcgttccatccgtttaaccgcccgatcccgcattccccattggagtcaaaccgctgcctcctggagaagcccaacctaccgcgcgcttcctgctcactggctcagtgagacgctgctcagaaggggaaaacccgtctcccacattccgatggcccaagggccgatcagtcggcagctcaaggcagacccaattggcctatacacaagccagtcaaagtcttcggctgcacagctccaaagaacctacggggattaaaacatcccgccccctgttcttctattggttggcccgacccaccgctgccccttcactatccccccaccccgccgtccattcatttcacacaataacgggcccaaatggagtcagttcaagacctactatgggtagataagactgtctgccacttacccgggattgagagtgatcactcacgctaacgtctgccctgttcctgtatggtgaggccgcaccacaagccaccaccgccgccgccttctgcgcaacgccaaccgcccgccaaaacggatccttccctgcgcctgcgcaaccaatcctgggaccggaccttttttctccgcccactacgcatgcgcaaagctaggacaaactcccgccaacacgcaggcgccgtaggttcactgcctactcctgcccgccatttcacgtgttctcagaggcaggtggaacttcttaatgcgcctgcgcaaaactcgccattttactacacgtgcggtcaacaagagttcattgcaaaaaaattgttacctcctggctgcttgtctaatacatagtgttaatcatgctttgccaagcgacttgactgtaatatttgcgcgtggaagattaaaaagatgttaaacacccaaggtagattcaaatgtgaatgattggtcggttggccaatcagactggttaacaataacattactcgggaaccaatggactccaaggggtggagacggcgtagaacgaccgaaggaatgacgttacacagcaatgtggcaccacaggccaatagcagggggaagcgatttcaagtatccaatcagagctgttccagggcggagtctaccaatgccgaaagcgaggaggcggggtaaaaaagagagggcgaaggtaggctggcagatacgttcgtcagcttgctcctttctgcccgtggacgccgccgaagaagcatcgttaaagtctctcttcaccctgccgtcatgtctaagtcagaggtgagttaggcgcgctttcccacttgaattttttcctctccctttcctgaatcggtaagatgctgctgggtttcgttccttgcaccagcccattctacagttccttcggtcgctgccacggcctacccctcccaaagttcaagtcgccattttgtcctcttgatcgccatgaggccgctctccgccaaccatgagttatcatgcgggactcgttactcgtagcaaaattcttaggcacacaggatctttgtctttttttaaaccttgccttggtgagcgagttttctaaagagcgattagtcccattgtggagatgcacccctaccgcccaagcctttgttgcgcgtgcgtcggaaggcgactagggacgcatgcgcttgcgatttcctagcactcccaactccagcatacggcctcccttgataggcagaagcacgtgtcttgttgcgacctgaacgaacaataagtgctaggtacacagttggtgtctagtttttcttttcctcgatggaaattgtttcgtgttgtagcccatttaacacttccccctccccccactctagtctcctaaagagcccgaacagctgaggaagctcttcattggagggttgagctttgaaacaactgatgagagcctgaggagccattttgagcaatggggaacgctcacggactgtgtggtaagatttggaagggacaaagcagtaaaacagccgatttccttggcttatcttggtgcagtcttctccgaatgcttatgaaagtagttaatagcattatagttagagctttgttggcaaaggaacgtcctgctttgattttaaaagctacctcttaaatctagggtagtgggaaactggacgactttttataaaaggctggtgtaaagtttcctattgccctattcaaagttaaaatgacaaaagcttttgcggtcagactttgtgttacataaattaacactgttctcaggtaatgagagatccaaacaccaagcgctccaggggctttgggtttgtcacatatgccactgtggaggaggtggatgcagctatgaatgcaaggccacacaaggtggatggaagagttgtggaaccaaagagagctgtctccagagaagtgagtgggttttttttcttcttcttcttaaacttacttggatatgtgctgctatggacttaagattcgggagttttctaaacttaccaaaattttttattcgagtataggctttgctaatctaaacctatggtttttctcctattaggattctcaa

SEQ ID NO: 58117 - DNA, 1951 bp, Homo sapiens
cacgctcggcctgtattttttttttttagtagagacggggtttctccatgttggtcaggttggtttcaaactcccgacctcagatgatccgctcgcctcggcctcccaaagtgctgggattacaggcttgagccaccgcgcccaggcacaacggcttgtttctattggaaaaccccagaatttactccctataacccctctcttattctaatcccatccctttccccgtttgtcccgcaaaccccatctccaaagccgatttcacgttgagctcaagttggcctttacaaactgacttctcatgttcctcaggcccagcaaagcctggaactccaccttagggagattgttattgcgactatcaactcctggcagccttggtttatgtagttaacatgttgggcctttcttggctctactctatggttgtgcagactttctgtgaggatgctgaagtgacctgagcgagcatgagggaagggctagccacagagatcatggacctaatgcgggcgctgaaaatagggattagggcaggattccggttagaaagcgccagtgttaaaggctaaggagacacagcgccccctaaagagggtgcggtttaaaaatcgctaaatcagtccgacaatatcacgtgtcctcggccctaccaattgaaaattaacaatcgcttcttctgttccccatggaaacaaccccgccccactaaccctcccgccccaatgagtcgtgaggttttggcgttttattgagtattcaagctgacaatcaaacacctgagccttctggttggacactttgcttccggtaagcaagctagtacaataattggccaataaagcaagccttacccaatgatccttatcctaggcggggcctaatgggaacgtatggccaatcagcggcggcgtttcttttgcggctccacgtcggcaccagctgcggggcaagatggaggcgctgattttggtaggagctggaggggcagcagagatgctgtggtgtccacaggggccgggagtcagggttcagcccgagtgggagacggggaaagagagttccgggtaattcttggggactgagcgttctgctgacctttggaataagtgtgtggcctagtgtaggagctaaagccttggtttagagtaggaagccctgccggggagagggcatagagtcggtggaaagttgaaggcagcacatggactccttaggatacacagacctgtaggcgtactggattaggacccttcaggttgccccttatttttagcattgtggatgataccctgattttaatttaccaaaccaccaaactcgccccatattgtaagaaaagaatacagatgttttgtcgttacagactcctcctgatggtttcccaagtttgactctccattgccgattccctgccacattccttcaggaaactgttttgtcttcggtttcctgttaatccctattatataggtttgtcaaataatcagtattccatcaaagttctgggatacctgataaagttagcatggattgtggaatattttttctagactccttattctgttctccttttctctacccatttagaccttaggaattctttttttttttttttttttttgagaccgagccttgctctgtcacccaggctggagtgcgcacgtggcgcgatcttggctcactgcaatctccacctcccgggttcaagctattctcttgcctcagcctcccgcgtagttgggactataggcgcgtgccaccacgcccggctattttttttgtatttttagtagagacgtggtttcaccatgttggccaggctggtttcgaactcctgacctcaagtgatccgcccgcctcggcctcccaaagtgctaggattacaggcttgaaccaccgcgcctggccaggaattattattattattattattattattatttttgag

SEQ ID NO: 58118 - DNA, 1256 bp, Homo sapiens
gcaagagtttggataaagactaggtacttcttttgtctttgcctgtctgagctggggaaaagcaatactcagccttaacatcctaatcttcctactcaccacacagcattgacctgggggaggggcagtgtcagtgccagagctgggtggtggtgatctgtgatggtgtggagttctatccagttctcaaacttggaattctctgagcttcagtttccccagcctggtctgggttaaactcctgccttctgttttccagcatgaatggaactttggtgccctggcctacccagtcttttggccagcaattttttttcagggctatgagtaaacacatccccaagcactgactgaagcagagcctgggagcagggtctgattatttcttttccttggtttctttctgtctgtaagcctctgtctttctgtttgtgagcctttccctctttcccagggaatgctgggaggcccctcctcccctctcccccttcctcccctttggctgggaaagtggctacagcctgaacagtgccagacacctgcctgccagatgtggcgattccccattcttccccccacccccctatgtctattctttccctaccccactgagctcaggcagagggagccccccaacagggtgatttactgctgctgcctctgttcctcaagtgccctcctccactcctctccctctccctccccctgatgcccatgccccctcttttcccacaatgttctgcagctaccttcttggtacagcctcctcccactcctactccagagtgctaggctatgtaaactccagctcctggactagagagtgaatgcatggggcaaaggtgattagccttctgtttcacccatgggagagtacatcagcaacagggctgaggacaggggcagccagagctgatgtcattctcactgggggaggaagagaggtgacagagtggaggaggtgaatggggaaggaaccaacactccaagactgtctggagaggagaaaaaggtctctgagaacttcctaggtaggtgacagagagtccagaattgtggatgcctggtggacatcacatctttctggctgagcctccagaccttgtctttgaacctgtatctcaatatgacttaagagatgcccctcagctcctccccttcacactgacccaaaacacacagagagaactttaagtccgcacccttctctctttagtgtttgtcattctgtgtcttttcttttctcttttcttttt

SEQ ID NO: 58119 - DNA, 2985 bp, Homo sapiens
agcagaatatctcctgggggaggcgcctgactcgtctgtccccttgcagacgccaatgggtcttcataggggaggaggaggagcctttctgtcaatatttccgttggggagtagtcttctctcacggcacctttcctccctcccctaaaaacaaacaaaaaaccaaaaacctaccttcctcctggtctttcccattagttctctgtcgctctccctctctcttttctttgctattaccttccagttgtcctttcctgcttctccctctctctcacctccctattgcgcctttctctgtctttgcttctctaatgcttttccttttcagagccattgtgtgaaaaggaaatttccgtctcttattcagtctggatagtgagatttgaaaagtccctctctcgatgcccgatttccctgcttcagcccgtgtggcccctcaaatgtgtcctttctcttcatctctccttctttcttctcggatcttggacaaattacccaaccccccatttagctccttaaccctctctctcttcccctgccttccttctctcctcaaccttcctttctttctgtcatccttttgccctctcagtttccccttcgttcctcagctcggaatcctctctccctgttcagtctcctctgctctccctgtcggcccccatccacacccctcaaactcgactcctcggcccatgtgtaccctcagaccccatcatcccttcagttcccgttaccaccacaccccagtttcccctcccagtggacgaaagagaagggaggagggggcctgaggaacaggtagagggagcgccattccttgaggggagggaaagaggggaaaaaagcgggggagaggaggagggacgcggcgggaaggggaggggaggggcatcctcactcctcactccctagcagctgcacccccctccccgcggctgctgagccataaatcagggccaaggtggtttggccaatggtagagtgactcgtaaatcggcctgtcaagctcagccaatgagaggcggcgttaaatcaagttctgtcagcgcttggccaatgaaaggccctgggctgaccataaatctgcctgtaagagacagcgaaagagagagagcgtgcgaacgagcaagaacagcccgggcgggcgactggggagggggcggggggagcgcggcagcggggattggagagacgagcttaggagaaaaaaaaaggcgataacagaggtacaggagatgaagacagcctacaggagagacggacagatggaaagagacaaagagaggcagtgagagatagcgtcagaaagtcagggatagagctcggactcgggcgagagactgacagagataaagagacaaagagagacagacagtgactcacactcgtgagcataaagggcctccaaacacacacacatcccgagacacgcatgagcaacgcaccacgagggacccagtgcatggcctcactcgccaagcacaaccgcaagagagagaaggcctcaagaaagcctggcttttcttcagtttcattcccctcattcagcccttattgaaattaggggctggggtggatgtgtgggccgtggcgggtggctgcttttttgctaagatctgtcctctatggtcttagaccccaggatttccttctgtgtctcctgagttttttttttttccccccagcgactgataattgggaagtcctttctgaggtctaacctcaatccctattgcttcacctttctacttgacaccgttgtgatttgccttctaaggacatgtaaagtgaatccttttacaactcttcagagttgtcaactttcagaatcttagaaggtctgaataggaaggacagttagggatcatctggacacttgatcctagttttagaaaggcggatttgagactctgccctcaaatcacggtcttacaacgtactaggcattcggccttggacaaattacttaacctatttgtgcttcagttttcacatttgtaagaaagaaattataatagatacttcatggtaattttgtgaggattacatgaaataatatatgtacagggaactgcactgggcacgtgttaagagtgtaccccgcaccccgctttgtacagatgataaaatctgagccccagagtggtccagagatctgctcaagttccgagagctaactatgagagagccttgactgaaacctttgtctctacacccataaactgttgttcttcattggtccaacagtttacctggacccctgccttagtagccccagcttgatttggtttaggctcctgtgactttcgtggaaggaggacaaccaaaagtgcatgttccatattaggagtcaggattcctggaccctagaagtgtgttgcatgtgagggtatcaatctgtccaccccaactgtggttctttctgcccttaatatcttcagattttactttgttctctcaaaccatggacttgggggagggaggggacaacatgcagccagagcattaaggtcagcatgactcacattccatccccagtgccaccccagtgcccacaccgctacttcccccagccccacctcaagtagacaggaatatctcatgaataataaatgtctcattcttcacttttcttcctaagctttgggggaaagggagggtgaagatccctgggtctctactccctggtcaggggtctctggattcccagtcctgccttgtgtcctcaactgggaagccagaaaggaaacgcagagaaccagcgtcacctggtggccacaggtgctttaaggatgtgtgtaagcacgcacattgtgacaggatttggtcattctggagggaaggaatggtatggtttcctagcctggcccctgagcccttttaactagagtctttgttttcctgctttctttttcttttcttttttttttgtttgagacagagtctcgctcagccacccaggccggagtgcagtggcgcgat

SEQ ID NO: 58120 - DNA, 407 bp, Homo sapiens
agtgtggtggcagtagtctgggggcatgagctgggatcccgagattggttagggccgcgccgatgtgggggatgggccggacagcccgaggactaggcagagggagcggtagccagccccgcaggggcgggcggggacggggtgggggtgcgctgcggcagccgcgggagtcagggagagaggaggggccgggtggcttaccctgcgagaccctgggggccgcggctccatggcccggggtggcggacccgggctggggggccgcgcctggccgggccgggcaggccagggacgcggcgctcgttgcccgggcggctcggggctgtgcggcccggccggcggggagaaggggaggcggcgctggcccgggccggagcccgccccggaggcggggccgaggacggggg

SEQ ID NO: 58121 - DNA, 567 bp, Homo sapiens
cttccccagcttcctctgcaaacggcggcccctatgctgctacctttttacaagtcacttccctccctagggatgggaaactgaacccgggtacccaggtgtcaggcactgctctctcagagactcctccaaatcatggagctgagggcacccagggcaaaagcgacctcagactggggatgtcgttcctaacttcttcccacctcctacccgcgcccgccacctgccggagaaccaggctccctgaaagcccacgcttcgtgcacctgctgccctctggcggttcagtgggggcagcactgggggaccagaggctgtagggcctagcagcccactcccccagacacctcgttctgtctagacaggtcctgggattcccagtatttcatctctaggtctcatcttctcccatcccacctaaggcagagacattagtgaagcaggggactggatctagagagagggtggctttgggaaacagtgagggacgtccaagggcagagggaagcagtggagtgagtgggaggagaacgaggggagacagtaattctagaagaggtctaagga

SEQ ID NO: 58122 - DNA, 5450 bp, Homo sapiens
gagtctttctctgtagcccacgctggagtgcagtgacatgatttcagctcactgcaatctctgcctcctgagttcaagcaattcttgtgcctcagcttcccaagtagctgggattacaggcaagtgccaccatgcccggctaatttttgtattttcagtagagacggggttttgccatgatggccagtctggtctcaaactcctggcctcaggtgatccacctgccttggcctcccaaagtgctgggattacaagcatgagccaccacacccagctctgtctaatgtttttggtagagacagggtctcactatgttggccaggatggtcttgaactcctgggaccaagtgatcctcctgcctcggcctcccaaagtgctgggattacaggcacatgccaccgtgcccagcctgtccagtttttatttctggagacagatggccctagttcatatcctctctccaatgtttgctagctgtataaccttggataagctacttaccctctgtctcctcacttagaaaatggggataataataccttatacagttgttgaaaagattaagtgaactaatatatgtaaagtgttcacaactgggcctggcacagagcaactgatagctgttagtctccatcttcctcccatccatctgtgtctactcagaccttgagctccttgagggcagtggcttagtcatctttcagtccctgcagcaccagcacagtgcctgtcatgcactgtcacttagtcagtacttagttaaaggaactgaatagtttgtgcaacattccctgtctttgtctgtgttacggccctggcctcccagaattgtgggtgattcaggggaaatgagagccacatgtttctgaatcatgcccgtcctccttgggctgggctggatgggagagtggagtgagtgccatggggatccactgtaagcagttggagcaccagagctggtgctgagaggtcacgtggccggggttccagcaggctccacccctcgccccaggccccacccaggccttgcccccaggctgcagtcccaccccccagtccctccctgaatttcactggcctacctttgctgtcaaattcaatgggggtgcactgtgtggggctggcaccccaaggacagaggtagacagcaccaccctgcagcactcctggctggctggtattagccttgggtgctcccaccagcacactgaccctgtgggggggaaaagcgaggcagttgaggatggctcctagcttttcattggtgtctggaggcaggaaggacccaggcctctaggctggggctggctgggggtggagtagatgccccctgcgttgtatttatatctcagaagatgccacagatgccagaggcacaggctggagtcaggcggtccccatgtgccgctgtcactaacacaaccctcccctcctcccgccattctctgtcctctcctaccttatcctgttcataaagagaggaggaaccacagtcaatttctagaaggggaagaggggccagagcctgtacccctggcttctccctctcctctacgtacctgctgagattagatgtatagcttctggagcgccaaggtcctgtggagcctcagggtctctcatctagcctatatactctcctcccaagccaaatcccctccctgggccaagacccaggcatccggctgcccagccacccagccttggggcgtgtaggaggaaaatgtgagtcttggaaatcaggcagcaggagtggagagaggagctggaggacagtgaaaacagattgttccactgggcctgggcctgccctcaccccggccctggtgtgggcctccccttcctggctgggtctgtgtttcagcccttgaacccctttcccatagaccacccccagctgactgaattcagagtctgctctaccggggtcccagttctggacacagtgcttctgttccccctgatatgaggggaagtttgccctgtgtaatggggtggtcatagctaagggcctgggcagtcctcctgccgtcagctctgcctcattcatccctaggtctcttgcctccaagacctccacaccgctcttggctctcttggtttcccctaagggtctcctgccaggacttgtatctggcagcctgggcaactcgacccagcctctggaccagtgctcctgccagccttggcctctgctctgctctgtgtctgcctctggcactgcttctcaatccctctgtccctctgcccctatgactgcttgctctcttggttttggtttttgaatcctatctctctatctcagattttacatttctccatctctattggtttctgttcactttcagctttcaacccgtccaatacctaccctttccctgatatttgaataccttcctcagctttctcactaggcaagaaggcccaaagtgaaggattatggtagaggtcacaagagctgggggtattttccaagaagaccaggtatactgaggcggggaggagtggcccaggaggtataggggatggaagcagcagagaggacaggtccgaggggacggaagaggagagtgaggaggggtctgtgagggccagtggtgagaatggaggggagagaaggcagggtccagaggaataggagatgggtaggctgaagagggagagctcctgaagttaggaggggtggggaggggaggtgccagtctccgttactctggggacaggaaatgtttactgcctgtggcttcctgtctgtttccaacctctcacttctccgtttgtctcccacacccccacctccgtgccaggccccacccttctcacttaggcatgacatccacttgtggggtctggctgcaccgccctagggctgggtgatgtgagagaaggagacccctctctcagcaggggcagcccccagagaacttggttgctgccttcaggctctagaaagcagaaagggccaccaacctgaactagaccagaacagcagaggtacaggaagcagtgaaaggagcactggaccaggagccaagagttctggttcaggcactaactgtggacttgggcaataccctctccctcttcctctgggtgaagaagaggttctctcaaagtttcctggagcacagggctaaggccaagggaccctattcctgctgccaatttctccaacacccactgctcttggagaggagctgagcctgacactcctggggtggcctgaggaagtagcctggagtttagcagggttgcaagacagagagtttacaaagcttgtaaagcccacaagccaggggcatatccattccggctgtgcgatggttcaggatacctggcatgcaggcaagggacacagacctaggcctcctttcctcccggcacactacccatggcttattcctggacaggcagtggcccttccatcccagcaacctaaagtcaatccaataaatagtgcctcccctgccaacacgccaagtgaggtgactggtgccatggatggcatgcaagctagtttgtccttattttcccacatctttttcctgcttcctaaatcctgcagcagttgggcacttttaggggtctaagaaggtaacaatggagggtccgtgtgctattttcaatatttcagaaagcctaacggaaatcatgcatttaccagataaggtggcctaggctaattaaaacctcaagtgtatttgcttttggctggaattatatcaacttatgtgggaacctggttatctcatgctggtcagaaactctgattggcagctatagatgtttttggttaataaaaaatgagaaaagcgccaggtgcggtggctcacgcctgtaatcccagcactttgggaggccgagacgggcagatcacgaggtcaggagatcgagaccatcctggctaacatggtgaaactccgtctctactaaaaatacaaaaaaattatccgggcgtggtggcgggcgcttgtagtcccacctactagggaggctgaggcaggagaatggcatgaacctgggaggcggagcttgcagggagccgagatcacgccactacactccagtccagagacagagcgagactccttctcaacaacaacaacaacaacaacggccaggcgtggtggctcacgcttgtaatcccagcactttgggaggctgagacaggcagatcacctgaggtcgggagtttgagaccagcttgaccaacatggcgaaaccccgtctctactaaaaatacaaaattagctgggcgtggtggcacatgcctgtaattccagctactcaggaggctgaggcaggagaatcgcttgaaccagggaggtgggggttgcggtgagccgagattgcgccattgcatcccagactgggcaacaagagcgaaactccgtctcaaaaaaataaaaaataaaaataaaaagaatgagaaaaggaattcattatttcttactaaatgcaggttggcaggtacacttttctgaaatagagtctgagagaagaaataactgccagaatttattctgaagcctcagaaatggaagggttggtccttggagacacagactaccacagctagaaggcactgtagagagcatccactggttttaagacttcactgtaggtgcctgaggccacatggcataaaggcagactggcctcgttctgacactccctaagaaaaagttcaaagctgctcacctcgtcccatgttctcattctgcagatgggaaaactatctcagaggagttaagtaatgggcttaggtcactcataatccctcccagaatatgaagcagaaatcaggaatcctgatttctacgacagcattctagtctaccccattgccaacttattccctcctctcatatctgctatctccccagcttttgattaaccaagtcccagttcaatactgggttactgtttgactctgttggcctgacaaggtcaggggtggagagcagcaagtggaccagcgcccagctcctacaggtcctacagcagcatgggccaggccagaggaggacacctggtttggggtcccctagtgcattcacaagggatatgtatgattggctggggaagaacagctgtctccacttgtggcagttgcagaagggaacaaggagctgagctgagactggcctgcctctcaagctttcaagtgtcctgggccaagtcactgcctctcttcaagctttggattctctggcataaaatgatggatttcccttgaatgtttcctaaactaacttctggttcaaaatttctatgactcctgaagcctcagttgtttttattttttgtttgtttgttgttgtttttttgagatggagtctcactctgtcgcccagtctggggtcgctcagtacagatgtgatctcagctcactgcaatctctgcctcccaggttcaagggattctcctgcctcagtttcccgagtag

SEQ ID NO: 58123 - DNA, 3876 bp, Homo sapiens
aaagcaagtaagaaatgagggaactaggcggtagccaggaaggagagaaccagaaacagaaacagctaccccataaaaaccatgccgcccatgtattgatcactctctgtggaccaggttccttttgtatatgttttctcatttagtcctcagaactccgttagtcaggtgtctgattttcacgggaagaccaggctccaagagcttaaatacctctccctaggtactagggtaccacgcaaaaaactagtaagtagtggggactcacacctacctctgtctgactgaaagctttgccctttcctaccatctaactgctttggtgctcgccctgtcctttaatactattttggtgttcaccacaagaggtgatgcaggaagaacaagaacactgaggctctccctctttggcaatggctgtaggtgaggggctgtgtttgtcttgtgttgtgggaaagggggtgaaggcctagctgtggtgggaggaggtcactggggaggtagaatgttccactgtaagagggtattgtaaataggaaatgagagggaaggagtgcaagctggacacctgggttctcttgggaggggagatgagcagaaggggagggggaagggatgagagagctaggtcctgttttagaagaggactttagggactacaggatcaggccaggggccagacagacacctaggggaccaggaatgtgtgaagtccagatgttttagaggagtgttttaaagggaaatttaggggaggggggagtaaagagaaggttaaatgccagacaactagatactctgatctgcgggaggagacctcatccccttcctccttccctcttttctactccattagggctgtgataagaagtttgagggaacctgggggagaccaggcctggcagaggctccaggccagggtgatgatgcaatggggtttgggcaaaaggccaggggggtggggtgggggttgggtggggaccttgaatagcccagaacaacagtcggggcctaatcatttttcttttctcccatccccaagtcctccagacaaaggagaatttgcctttctccccagttgtattagctagattaaccccttttctccaaaaactatagggactgagtagagatcagttaactgtctcatgtgtaaaaacaggtcgcttctgacagaattcccctcaaaccctgagatcctggggttggggtgggggtgagcagtaggaagctcccagctcagagatgtagaagaaaaaggattacaccagtcattgtggaggaccaggaatctggcatctatggcctagcccaggagcaaccacctacctctcttgcttcccaatctccccgccatcccacatttaaacagacacccttggttctaatgttgcttccactctaactcctgtttcccaagcctgtcagtaccccattttctaggcactcggggtccgggtctgcttatcactgtgctgagttgggaataaggatcctcctttgagatttccagggtcctgagtccttcattctgacgttcttggccccacggagcccccgtctccccagcttccgaccccagccccagaagtcccggtctcagcacagctccagccgaccagctacaggaaaccagcttttctcttcctcccaagagccagaggaagagggaaaccgcccaccccccttcacgcgcgcacacacccctcccgacacatcccagcacccgcccttggctgagttcgcccccagccccagggccccagtgccagggtccccgcactcgcccccagttctcggatcccctcgcctgaacagagattgggggcggagggaggagtaggagacagaggagaaaggagagggagccgccgtcctctctcgggtctttccccggtctgagttgaggggggaggggaggatgaggctggcccccatttaaccttccgaccccctcagtctttgactttcctcctactacacgtagctcattcggcttctacccgttctctcgccgcacaatggcccctacggatcccgaggtctcctggagcccccaaaagcccttcccggcctctgcgccccctctgcgcccccacccgccccaggtcccagcagcccacagacttcagccagagaccctcagctctccattcacgcgctctcctctcccttggcccggagacccctgcccagacttctccagctccgtgtcctctccccaccggacacatgtctccccactgatctcaaacgccagggcccctcctcacccgccacggtgccctccctactccagcgcgggcccccaactctagccagggcccccaactgcagctctattccttacaaactccaccctcaaacttaagccctggtcccctccagaccccagccgcgcccccagtctccaggcggctcccccacccccatcccgtctccagccctcctcactcacccgtctgttcccggccggtaaaactccactgagaatccgaagaaggagcccgggggccccgagagtactgctggggcctccgcgtctaagttgaagcccccgaccctgggtggcggcggcagcagcagcaacagcagcggcagcagcgggggtcggcgccgggggccccagcgcagctgcacggcgtggagaggggactctggcgtccggctccccatagcgcccgctcttccctgtcctggggccaccgacccggagccgcttcctaaacctcccagaggcgaatgactcaacgcggggaggagtttgccaaactcccggctgagccctccccccgcctgccgagggggctggcgggggggcattcctgggtccctggaactctgagcccgcgtcccccacccctaaggggcgtggggggggggcgcacccctccaaccccctttccccagccccagctggaagccggttgtctggactgggttagactgggcgggtttgggttcttccccctcctctctgcttccccctccttcctccccattcctttccagatgtacaacgtaaacgctcggaaaacgagtcggaaaagggagcggagaatttcctaatgaggaaaggaatcacctctggtgggcggaggaagcctgtatatgtgtgtggggtctccctcagtgctttagggaggagactttggggtctaaagagacaggagactcctctggcgtccggccaactgggattcccccttgccttccggggccgccgggtgcctgggttctggccagctggatttgggacacaacagttgaggtacagagacagcgttcgcagtcagcttgctagaggacctacacgggctcctcaagttccgctgcttcctcctccaagcttgctagtattgaaaacccaggagtttggggtcattcatcaggaggattctgctccagtttgcccccttcttggtcctagggtatgtaaacctctgctgagccccttccttggatctgacagttgaccaaaagcctgcgagtggctggcccctcagtacctgcttgattaaactggccgggttcctacaaacctggagaattgtgagaggtggtggtggtggtggaaagtcttgcaaagggacccaaccttcagctcctaatggctgtaaacgctgggagctctggccaggcacggtggctcacacctgtaatcccagcactttgggatgccgaggtgagcagatcacctgaggccaggagttcaagaccagcctggccaacatggcaaaacccatctccactaaaaatacaaaaattatccagatgtggtggtccgcacctgtaatcccagctactcgggaagctgaggcaggataattacttgaacccaggaggcagagactgcaatgagccgcgattgcacca

SEQ ID NO: 58124 - DNA, 599 bp, Homo sapiens
gtgtgtacccctgcccgcttcccttcacatcagaccttattctaccaaacagctggagcaacaaaaatgacaaaaaacactctctccacctcatcccaagaggtcacaaagtttttttcaggttgggggtggccagccagagcctggcagcttgttgagagaaacagagaactgaccttgtgggaaattgatattctttaggaatgggaatgtctaggcaaatggacagagattacaaagagatggagcaataggcaaataagcaaatatttggcaaacaaggagtagtaaggaccacgggtggccaccctctccacacatacgctcactctcaccgaggcatacacttgctcacacactctcatacactgccccctctgccaggctgctctgagctaaaaatagaccaggctaggaggctgggccagggccctggactcccaccccttgagccaaggctgtcacagtgcttctcccttgcatattgttcagcttggaccccagcccctggaaagactccacctctggcctcccagtgctgctggctcagtcccacctggactccccactccaaagggcaggagttgggaataagggcc

SEQ ID NO: 58125 - DNA, 941 bp, Homo sapiens
gggggttgactgggtgggggatgcagggttgtttaaggagggaggggtcgtgtcctcaagcaggccccctcccccaggactggggaggaagagagcgactctcgcggggccaggcatcgagtggaggcgctcttccttcggtcagtctcaaagaagcacagattcgagatgtggctccgacggtgggggaggggacagaagacccccccccgccccccgcaaactgagcgttcgtcctcaaaagggcgcactgctaagggaggactaggcagggatcctgggtcccaccagtccaggggtccctcgtccttggctgggcgagtgccctgccgccccgccctgctccgcacctgctccgccgcctcggggtcaaggtgcggctccagcagcgggaccgtgaactggatctttcgggggctgttgtcttgctccatggctggggcggcggccggtgggcccgcgctgcggcgggagggaaggcggcgggactcggggctggggcgggcgcgctccctctccgctccgctccggccccggccccagcccggcgcgctcggctcccggctcccggcacagcgctcccagctcgcggctccggggactctgccgccgccgattggctccgcacccgcccctcccggccccctccccctcccccagcccggaaccttaaccccgtcgtggctgcaccggcggctgcgggggtcaccgccccgcgggccgccgagtccgggcgtggcccgggagccgtcgtagtggacagctcaggcagatacctcagtgtcctcggagttttgggcagggcgttggggtggggagtggctaggaagaacttctcctagccggagcaggttgttggggctaggaaagtagaggggcgctgcaggagaggagactaaacgcgagaggaagattgcatttatgattttaaagggggttgt

SEQ ID NO: 58126 - DNA, 973 bp, Homo sapiens
taagggtctgatattgttcagggacaatgggtatggagaggaggggaggcattagatgtaaacactgcagtgtcagccaggacaggatgtggcatctgcctgggaggcagggagagggagaggggctggcagcctgagggtttcagtgtaagagtgtatgaggggtgtgaggtgtgtgcatgtgctgtgtccgaggatgtgtacacatgtgtgtatgtgttgggtctgtgtgtttggtatatgtatgttgtgtatctattttgcctgtgtgtgcacatgttgtatgtatgattcactttaattttaattttccagggctagctttgggagaagtgtcccaagcagcaggaatgtgaacaggtgaggcttccagcccacaggagcctgcagagagtgtgcgagactgaattggaaggatgcccacagtgtggttttctgtgcctctgttgccttctcaagtctcctgagtgacattctgggcttagggcttggagccatgtgggtcatctatccaggagaggtaggcactcgggtgacttgaaaaagaatcttcccttgcaaggtccatgtccctgcaaccactgccccctcaccttccccagcccactttttctatgaccttgggagagtgtacttccgggcgacagtgatgccaaaataaataccacgccggtgctggcactgaaccctggaaaaacacttgccaaagagcaaagtataataatgcccccaggcagggaaaggtggatcaatggatttggggacagatgaaggatagagggagaatgggagctgaaggacgattcttttggcaaggtagcctgagccttgtgtgggctactgaggatggttccctctggggtttaaggatgagcgtacaactctcagatttctgggggaacatttggaaacttccactacatgttcctgctgtggccctatttctctatctgcaggagggaatggcttggtt

SEQ ID NO: 58127 - DNA, 719 bp, Homo sapiens
atgtcttggaagcctgtaggatatagtgggtcaaggaggccaagattaactatgtcatatgctgctgaaggtcaaggaagacaaagtggggtttaatcaatcaaaaggtgattgataatcttgagactctactcatggggaactgaaacctgcttggagtgagttcaagaaagactggggtcaatatgatgaactagatattctgaaatttttcttccactacaaagcaactggaacctgcatagaacatatctttccttgcattatcgggctggcaagaagtcagggaacttcccaggaagcacaaatcctcaaaccgtgagctgagagagggtgaattccaatttgctgctaaggagtgaattcacagcagtaagctgcttctgctgggcacagagattcaggggcatcagggttcaaagttcttagcctcaaccacatttgatcaaacaccctccttccaaggtcactctcctttcccaccggtgcgcaaactttggcataagagacctggagcagctgaacctttaactggtgttgcaactctgaaactcttccaatcagaccagccatggtcctcagccctatgttccctgtgactacaggaaatgggagaatcctccaaagctgctacgaaggcctcctgttctctacatgttcctgattgtatattaatagttctttctctctctcactcgttctcctaattatacactcta

SEQ ID NO: 58128 - DNA, 719 bp, Homo sapiens
tgattactctggccatttattaacttatttcatctgcaagtatttattacttgcttgctatgtaacaccacttttgctaagttctggttaaaataatgtattctcctcccatattctgactacctttctttaggtaagaaatactttgaataaaaaattacttgtgatgaatgtagcagtgtaaaatggaaggtcaaacagaaggttataaaaatgaatacaatctctcttgagttgggagtcattgagccattcttatttcagtgatgtttgcacaaggccacaaacgcttctggcagttcagtgaaatgaaccaaggggcggatccctgggagaacagcaaatataaaggctgagagaaagcaggcccttttgagttaaatgtaaacaatatattggatctggcatgctgagggtaaatatgttggatcagcacaatgtgagttaatctgaggtcagatcttaaatagcctggtaggcaacataagaaatattctctatattgaaagtcattggggctgggagtggtggctcatgcctgtaatcccagcagcactttgagaggctgaggtaagaggactgcttgaggccaggagttcaaggctgcagtgaactatgattgtgcagagaccccgtgtcttaaaaaaaaaaaaaaaagaaagaaaatccatgagactgtcatagagcaccttaagcagaactggatttctgattcaatt

SEQ ID NO: 58129 - DNA, 3672 bp, Homo sapiens
atggcacgaacttctgtggctccaccccagagtgcactcctcccagtgtgcagaccagctggagttttgccagggagcccttcccacctggctgtctcattattaccagattttagctgaggcaaatagctgatatttctggcttttgagcatctttacaaagggtaatctccccagtgaagccaataagcattaataaggttatgacttaactatggaagcgttcatacaatttatatgattactgagtactctaattgtaaggagaagttaagaatagctggttgtcaatctttatgttagtggaaagagggttctcagatctcatgaaagaaaaattaggggtgagtccacagagtccacagagtagagtgaaagcaagtttatcaagaaagtaaaaaaataaaagggtggttactccatagacagagcagccctaatggctgttgtttggctatttttattgttatttcttgattatatgctaagcaaggggtggattatctatatgttttccagtaaaggggaaggcaattcctggaactgatggttctgccccgttttaggccatacagggcaacttcctggcattgctgtggcatttgtaaactgtcatgatgctgttaggagtatcttttagcatgctaatacattataattagtgtataatgagcaatgagaatgactagaggtcactttcattgctatcttggatttgttgggttttggctggcttctttaccacatcctgttttatcagtgaggtctttgtgacctttatcttgtgccagccttctttctcatcctgtgactaagaatgtagcccagcaggtctaagcctaattttacccatcccctattcaagatggagtcacctggtttgaatacctctggcactaacttagtcattaaagagaatttttaagacaaaatctcaacttagctgttatccaggaatgaggctcaggctaaagactgctctctaccattgtaaaagcaggaaaagtcaccttcctttccagaagcaagcagaactccagaatggaattgtaatagcaaaataaaccttagatctcactccaattttgggagatcaaggcttcactggagaggatgaagctcccagacctcagcaagttgtcctattggtttgagcaataaaaatagcccaagttagtatcaggcaccgttaggagttttgccacaggtcaagggccacctccactcagaatttcatcatggttgccaatttgtaaacctaaaacagtgtctctattaatttaaaggttcattttgtcaaggttgaggttgtccctaggaagaagagacacaagccacggtaggatctgtggcccacaatttttccaaagaggattttgagggcttcaatatttaaagtggaaaaagtgggtgggtggggaaaggaggaaggaaaaaaaagggagaatatggtcacattcttgtgaggcttgggttagctatcactgaatctacctgttacatgtgaaaaggaaaagatagaggaatagccaattatatatttgtcttgcacttcataaatctgtactttgcttaagttaaagtaaacaaagaggagaagtcaaatatgcattcatctcagggtggacagggggacaatttttagtttccttttgttccatacctgtaaagataagctgttaatttacattgtcacggtgagggaggccccttgagtagatatatgtcctcctgtctcataactatctgtttaggaacaaaagtaaagtcagcattttacatgactcagtttcaaagctttatttttccctttggtatagtgagttggagtcctgagattttatttccctttcacaggggtacagacacattgaggatgaagaggtttcaaccatttttcttctaagaagaaagtataatagactcttgggtaggacctcaaaaattgatcatcaggaattaatcatccctttccactcccaataattctacctttctacaagcatagttgatttttaatcacatttttttttgagacagaattttgctcttgttgcccaggctggagtgcaatggcacaatctcagctcactgcaacctccacctcccgggttcaagcaattctcctgcctcagcctcctgagtagctgggattacaggcacccgccaccacacctggctaattttttgtatttttagtagagacgtggtttcaccatgttggccaggctggtctcaaactcctgacctcaggtcatccatccgtctcagcctcccgaaatgctgggattacaggaatgagccaccacgcccggcccacatttcttaattgccatgaattcttaaaggtttttctgaactcacagccctttcaattttatggaaaatttttgtttgcaaggatttccaaagcagaagtttttagcacttgctcagtaatcgtcatgtgcttccttattattactgacagttagttccctcttgggtcctttcttaactttgttatactgaaatcttagctctttctctcctccaattctttggcaggaagaacatccgttctctgttctttgcaggtaacaacgtggcttagacatgtaagcaatgactcagttcctactcagtctgctctttcttcagctgagtcatcctgacacccactggacaaactgaaatagtcttagtcttttttgtgttgctataatagaatacgtgaggctgagtaatttataaagaacagaggtcttttacctcacaattctgatggctagaaagtttgagattgggcagctgtatctggtgagggcctcaggctgcttgcagtcatggtggaaagtagaaaggcaggtcatgcaaacatatcacatggtgagacaggaagcaagagagagaaaccaaggaagtcaggctctttttaacaaaccactctcctacgaactaatctattcctatgagaacaagagagaacaagaacttgcccccacaagagaacattaatctattcaggagggatcttcccttataaccccaaaacctccaactaggccccacctcccaacactaccacactggggatacaattccaacatgagtttcagagggaagaaactcaaatctatggcacagcccaatgcatttttaaggcatttttagtaacaaataaacttagaaaaaaaaaaatctcaaccgtctctttgcaactgggcaggttcacttccttctgaagaactagactcctcaaggacaggaaatgggcccaggcttccctcatactgttccatcgggtagcttctaaggctctactttcaaattgcttaccttgtttctttgggcatacctatgaatagaagggcccagtgcctgcattctagtagtgatatacattgagaaacacattgtattcaaatggataacttgagatctatttctgttgtaggaactaacatagaattcatttcagtgtataagaaagcctttagatctaacttgaatcattctggttgtttttaagctcattgaatgtaaaagtatttcttataattcatttgggggaggataatgcaaggtagaaagaaaccacatggaaaaatacctcatgactaaatcaaagattcaaacaattaatattggtaaatctgaggtaatctagtttaatatccttagtcttcattc

SEQ ID NO: 58130 - DNA, 489 bp, Homo sapiens
agactcaaggtatgtcaattgtctattacatagccttcctgcctttgatctctaactcatcctccacattgctagtaggatactttctaaaatacaaatcagtcatgccaccactctactaatacattattgatggttctccgttgcctgcaaaataatgacaaaattccccaaatatttgcataacctggcctgtccagtttggtttcttatctcttccaactagtacttctatgatgtaaccacactaaacaactaagtatattgcaaaacttgtgtgctgtcacgtatattgaatgcctgcccattgcccaaatctctgttagcttgcaaaacttcaatcagttaaagttaattaacatggagacttctgtggaaggctggtcgacaagtatatgttagtcacttcatactcaaattttgtagtgtttgtagtcaactctagatggtgcttatcatagcacatgtaattaactatatttatttctt

SEQ ID NO: 58131 - DNA, 866 bp, Homo sapiens
gagccaggttaaggtaaacaaatgctgtatctgccaacaatatgcagtctcatattaagcactagcacactgcattagtagcttgcaaatttatcccatcttccatttcaaagttattatgatgtgaaaataattcctgtataaggcatccatgggaactgtggaatgggaggtgggggctgaggacctaggacattgcttttagcatgtctacgtgtagacgggaccaaattctcaggtcatagactcaatattccagagataatctgggtaaatggctccctctagtgggacatattatttttgcaacgtctcacacacaccacgtgttaagaaattcttgaaaggacttaaattctcacgcagtggaatcactgtccaggaatgatctaaacaaacacttccctctagtggagacttttttctttagaaaatgtcaaacactgaaggggagtactcacagattaataaactctgcctaaatacaattgccaaggaggagccttaagggcactcaataaaaattaaaatatcaccaggcatggtggctcacacctgtaatctcagcactttaagacacagaggccggcagctcagtcaagatcaggagtttgagaccagcctgaccaacatggtgaaaacttgtctttattttttttaattttaaggaaaaataaagaaaaatttaaaatataaaaataaaattattaaagaaaattgttataattgaccatacatctgctctttccacatcacacctcaagtaggaaggacaataacttggaattttcttttcctccctttgtaataatgtgtgccaaggtcttctatgaggaggaggaggacaatggagctcagaactgctg

SEQ ID NO: 58132 - DNA, 728 bp, Homo sapiens
cctcccgaagttctttatatatgttggatattagacctttgtcagatgcatagtttgcaaaagttaagaaaatcagtgttattttaaaggtctcagcacaggccgagaatccagccggaagtagcgggtggtgctgcgccgcagaagggcaaggtgaaggcgaagcgggctcggaagactagggctcctcaggtagtagaatgcagcggccggcagatggcgtcacagcggcggaggccatggccctgcgcaagcgcattcggcgatgccagggagggcgaagaaacccagcagcgggaagccgcctaccggtgggctagtgcggcgggggaagggaatcggcctgcatccgagactccgccgctgtggcgtgggacctcccctaaggagaagtggtgcaggaggaagtgcgtgggccagcgcaggcagaggctgccagggcgaggacgacgatcagggagttgtccagcagggtcaccagatgtttgcagagcactgcccaaaacagaaggccccggacggaaccaaaacctgagagcaccaacaaaacaagctcagtcatgctgtgccattgccaccgccatgtccccaaggccagactggaggacggggccagaggagggctcgtgctgccccaggaagcatccaggcaaagacaaaggccgcagcaggaaagctgtgggagaggccacaggaacagcccagctctccttcccgcccagaaaact

SEQ ID NO: 58133 - DNA, 2976 bp, Homo sapiens
caagagtgtgtacaatatactactatttgtaaaagaaaagggaatatgtatatgtatatatgtacatggatctaaacacgtggtgtgtgtgttccctgctcgttcacaggtcatctctggaaggattcacaagaaattggcaatatggcatttagtgcctccagagaggagatctgagtggttgggtcacaggagtagaagagagaattttccctgtaatctctttagtatctttttaattttgtactaagtgaatgtactgcctcttccaaaaaaagttgtttaataatgttttgtaaaaagaattcttctcagccaggcgcagtggctcccaactgtaatcccagcactttgggaagtcgaggtgggtggatcacctgagcccaggagttcaagaccaacctgggcaacagggtgaaaccctgtctctacaaattacagaaaaaaaaaaattgctgggcatggtggtatgcacttgtagtcccagaaaatcaggaggctggtgtaagaggatcacttgagcctagggacattgaggttgcagtgagcccagactgctgccactgcaccccagcctgggcagcagagaccctgtctcaaaaaaaggaaagaaggaaagaagggaggaagggagggagggagggaaggatctctaaaaagtggctattctctgacctcacttccccctatttgtccaacttaccccattccccacagaactaaacttctcaccctttccaggagagggcatgctgtctctgtcctgtacacctactttttcctctgccaagagcacccttcccttcctatggcccctctgaagtgcctgacctgaggacgaaatgaggccaggatatgtcccatgagtcaactctgtccccagcattcaccactaccaacccacccccaacgccctgccagcccccgacactcccccgccatgagtctgtcatctgaaacatatccccttaccccttcccactccctctgagatgactcagcagcccctgccccccttcagctgggcacagtgccccagaactcaggaacatgggtaccacctgtccctccgcccacataaaagtcattgaagagcttgtggggctgtgggacctgcgccctctggaggaattccatacacccactcaactctggcaaataggaaattgtcaagtaggagacaaggagcaaagtcctatcacagcgggaggggacgccagcgcctgcagaggctgagcagggaaaaagccagtgccccagcggaagcacagctcagagctggtctgccatggacatcctggtcccactcctgcagctgctggtgctgcttcttaccctgcccctgcacctcatggctctgctgggctgctggcagcccctgtgcaaaagctacttcccctacctgatggccgtgctgactcccaagagcaaccgcaagatggagagcaagaaacgggagctcttcagccagataaaggggcttacaggagcctccgggaaagtggccctactggagctgggctgcggaaccggagccaactttcagttctacccaccgggctgcagggtcacctgcctagacccaaatccccactttgagaagttcctgacaaagagcatggctgagaacaggcacctccaatatgagcggtttgtggtggctcctggagaggacatgagacagctggctgatggctccatggatgtggtggtctgcactctggtgctgtgctctgtgcagagcccaaggaaggtcctgcaggaggtccggagagtactgagaccggtaagcagggtgggaaggggatgggtgtggggcaggcaaacgcagcatcagccgccccagggttcggcccccagaatggggcgtctgaggtagtaagtagcacattagacaccccatccacctctacctgctggtgaataggagacatgaccagtgccatgacggggcacaattgggtgctgtggaagcaacaggaggatcacctaccaccatgggacagggaggggagtggggaggacacctaaggaactgaggtttaaatcgagatctgtgcttgggaggctgaagcagaaggatgacttgagcccaggagttcaagaccagccaaggcaacatagtgagatgccgtctctacaaaaaaaaaaaaaaaaaaaaatacaaaagctagccaggcgtggtggcacatgcctatagtcctagctactcaggaagctgaggtgggaggatcacttgagcccgagttcaaagttacagtgaactatgatcgcaccactgcactccagcctgggccacagagtgagaccctgtatcaaaaaaaataaataaataaataaaaagagagagagagagagagatctgagggattaagcagagtgtggacggggtggggaaaataaaagagtgttctaggtaaagatagtaggggaagtagagtagaatccatcagactgtggagagaacgttcagaatagtttccaggtttctagcatgagcaactgaggggagagctgatgaaaagtgccatttgctgagatggaagaaagctgttttggacttactaggtttgagatcacctagggagagtatagtgaggcgaggagcttgaggaaccccagcttcagtcaagagttgggcctgaggtttccctgggatgttcacagcgatgtccaggaagcagcttgtgcatgcatctgggttttgtgagagaggttgtgcgtgtatctcagaatacaataagcccagctgggcgaggtggctcacgcctgtaatccagcactttgggaggcaaggcaggtggatctcttgaggccaggagtttgaaaccagactggccaacatggtgaaaccctgtctctactgaaaaatacaaaaagtagccgggcgtggtggctcatgcctgtaatcccagctacttgggaggctgaggcaggagaatcgcttgaacctgagaggtggaggttgcagtgcgc

SEQ ID NO: 58134 - DNA, 742 bp, Homo sapiens
tgccctgggacagtctttgccttggataagttaacagacatttggaagtctggccctctgttttccaatactacacctgtggctatcccctccagagcactaacacatctctaaacaggtactataaggaaatacatatgctgtcagcagggctggcaccaggattctactttcaccatgccctccccatcctttttaatatctcagagccccagacagtagagaagagctgacatgggaatgcagaattgcaaaattaggacagaactgggactactgactccctgcccaggtccccccgcccccgacccagctcaaaatgcctttagagcccaagctgcctcctatctgcacctgcagcttctgcctgtctccattcccactccactggcttctgtgatccagggctgaaatcagatgccaagaatctgcttctgacctcctctctccaaatatttgagaagtcacctcaccaccacaggaggaaagatcaggaaagaagagagagagaggccacccaaaattagcctggctataaatagaggggcaaaggagggaggggaacacacaagagcgtgctagaccagcctagtaaatttagacatgtagatttctctcaaggagaaatgagaccagaatgttggagtggaagataatatcgtaggtgaagagggaaattaagaaactagacggggccgggcgcggtggctcacgcctataatcccagcactttgggaggccg

SEQ ID NO: 58135 - DNA, 2738 bp, Homo sapiens
gattatccactccactccatggaatagattaatacactgtacttcagcctgggcaacagagtgagactctgtctcaaaaaaaaagaaaaagaaaaagaaatgtggctagtatgactgagaaactgaactttttaaataaattaaatgtaaaaatgaaagattaataatctttataaaaatttccaaaattttagacgttgagaaatgtccagatccagccaagattttagccctttagcttttgtatgagtggaagctgaggctttctccagctccttcccttttcaacatcttcttccccactttgagatcagtatttttcagctccctcaaatcacactttttgcaactgttgtctctagcttacaagcaaacacttccagaacacacacttcagggctaacttctccctccacctcatctggcaacagagccttggagcttatgtcccaaggtcaggcttttccgtcccaacatgcacaccatgagaacttttttacttcactcacctctccagcactggaatccttctgcctgcctctgaattctggttgtagtcaaagcttgaaccatgggagtggctgggaggaaaagaacataaatgtgattgagggaattcagtggggaaacagcttgaccgctccggtctttgacgatccaaaagaaacccttaacacttgagaaggactgggaggtcacttaccaaagggagccatttggactgtctcaagggccccctttctttgagcactggcttcaggccaacatttggaacttagccacaccaccaccaaccccctctcttgaagcccagccagatctcccagtatgtgaagccttgtctactcactctgtgtcctccctcagccctcatccaacccctaacaactcagcagcttccagccctgtttggcccagccagtcagtttggagcttgctaattaaagctaactctgaaagagacctcaaaagaagagggaaatgagtgaagaaaggagtgtggagttgcattcattcagtccaagggaaaataatctgagtaggaaatcgtaaggagaggtgagcagaaagagacttcaaatttcaagagtcattctccagatagatatgtatgcgacttgtgtccatctctaccaaggacaagtgaagctgagcttcaactgcagcagaaactaaggttagacagtgaacaataaaggcccagaaaaagaacagatggaggataaccctagagagatcagatggggacactagatacagataccccatgtcctctgctcagctctagggcaaaggaacagccagtgtgtgggagagaagggagaggctaatgtctgcagaatcctggcagtctctacaccgattgtgaaaatgtcaggcagttgtgccaagaagggtgagggtaatacaggatgggcctgacactctccctgagttggcctaatcttaacatttagactcacttttgagacccccccaacactaacccccattagccctcaccctctgtttcacttatcccatgtcaccattatcttgacacttccaacccatgtccttctcttccaggccccacagctctggaggtgaggcaccaggcatttccaatctgcctctattttgcttgctcactgcagttggaagctggagccagagagtggggaggacagagccaggctgctctgtgatgctctcactcttcccacttctattgattagcccttctctggagcagagcctcttctcaaacactcctcccctgccaggattctctacagctcatgcccagcaagctagaggggcataatgattagagacagagagattcccagaaaagtgctctgggtctaccctcctggggtctcaactgtggtttatgcagtatacagcggtaagactcaggctctggagtcagatagcctggatttgtatcctagctctaccactaatgaactctattacttaactgccttgtacctcagattcttcatctgcaaatttgggatactcgtaataatatttcacagaactgttctagggattaaatgaatacatacatgtaaagtgcttgactatgatgagtactaagaaatgtttagaaagaagatacagtacacatataatttagacacatacacacagtatctaacgtttttattagaatttttattttggcacttaaaatgttttgctttatgctgccacttaagcatttcatgtgcttctcctcactaatcctttgacagttgcacatctcccaggatttgggatgctattctgcaaatagttgaatgaatcattgatcagtaattctcaaatcttactcagaaaattcaagaatgttttcttctaatgcaatcagcacccatttctcctccccctgcaagtaaatataatgacgtcaacttcaactatgccaatgaatcacaaaatgagagaatgccaaagctggaaatagttttagatatggtttagcccagtgagtttcaaccctggatacacattagaatcaccagaacagcttttaaaatatactgataaggccaggcacggtggctcacacctgtaatcccagcactttgggaggccgaggcgggcagattacctgaggtcaggagttcaagaccagtctaaccaacacggtgaaatgccatctctactaaaaatacaaaaattaggccgggcgcggtggctcacgcctgtaatcccagcactttgggaggccgaggcgggcggat

SEQ ID NO: 58136 - DNA, 3938 bp, Homo sapiens
ttacgggcgtgagccaccgcacccggctaatcacggcatttttataagccttgtgatttctgtgattctaatgtttagattctaatgcttagccagggttgagaaccaccgatttaatccaatcccttctcctagttttactaaagagaaaactataacctagaatggtgagcaacttgcccaaagtcacccaacatgttagtgcaaggtgcaccgagagagattgtaccagtagcaagaatatgctcatgatgtttataattgttctcgctggagttaatcccggaagcatttctttttagttcacagaggccttatataaattactttttactttggcacagcacttacgcttctgctaacactgaaatgggttcgcattcctgaccacaaaaggacagagatgaaattctacattcacacagcccgccaagttagccaagctccctaggaggctgtctgaagtgcctaaaatgcttctctacaatgatcacccagagctgagagacttcagtggggtagtgagaagaaagagggttgggagagacaggaaagcatcctctccttgagggaaggaactgggaatcaactgagaaccagctagcactgccaggaggtgaggagagggaaggagaataatttaaatgaggccagggagcttctgctccctcaattaaacggtgatagacggcctgacaccaccagccctcgaagcctgagatccacaggaaatgttaaaaactggcttggcaatataagtattagaaaatacttcttccaacactcaccaaaaactaagctcccaataaagaacacttcacctgccctccgcaaccctctacctctcttccccgccaagatcttcacccaaggtctcaagagggcggttcccaacctcacgtgacacagcggtcacgtgacatggccccggggagccgaggtgagcgttccagcttccggagccggagggggcccggcgtacccagcccccagcccgacgtgaccatgctgtcccgcctcctaaaagaacaccaggccaagcagaatgaacgcaaggagctgcagggtgagccaaatatcctgtcggccgttttctcttcggccgcggcctagcttcagcccggagcctggatctcgagtaactaaccatatccagggaaagacgccagctagcgggcaacgggcatgggggagagggaatttcagagaggctttttttgaaactcctttcccttgccaactggctccggtcccttgggcaatactccggtcccctcggcaacgcccccaatccccgacctgccgcaccttagccccgcccctgccccggagcgccctgcctattggccctgggagcctctcgtcctggcggcgggaaggagcgactctggagggaggagggtgtggggaaccccccagagatgggcttcttggaggcctgaaaccaccggaacggaggtggggcacttgtttcctgagtccgggctggaaatctcggagttaccgattctgcggccgagtagtggagaaagagtgcctgggagtcaggagtcctgggcgctgccgctgacttcctggcgtccctgagtgagtccatttccctcccagggtaccagtttcctcatctctaaaatgaaagaggttgcgctatgttttgcaaggtccttttcagctccggcattcagagattagttaagaaatttcggcaactagcagaatagtaatggatgggtagggaacctttaacactacccctcaaaaaaccaagtctcccctccaattccttttccccctctccccagaaaagaggaggcgagaggctatcactgcagcgacctgcctgacagaagctttggtggatcacctcaatgtggggtatggacctcttatcaacatcagtttcctccttccccaccccgcccaagtttaggcactggccagtctggccctcaaatagctgttgaaggggtgggatgttccactaattcccctatcctaccccgcccctcccagctctttgtagagcaacttgagtcaactctgagtcctagcactgggcaagggaggaacagctgccgtggttagagaagcagccagatttccccttccccacgttaacttccctggcatttacaacttgatgccatctgcccacctcccttcacccttccaagtccagctgtcacttcagcaggagggagagcaccctccttcattacagcttaccaccctctcctctgcctcccaccctctggcaagcctggggagcagctggcaggaaagagatggcagagctggtggtggtgagagtagaacctgttccgggagctatggcagagccaggctgtctcttaccttcctattgggtctctagggaccacaccctgccccagccctaaatgagaatgcaagtaacagccaaagacttgggaaaaagcaaagaacattgtctcttgaccctaagtgacccagaagcgtgcagagatgatgatttgctagtctgcctattggaagaaaggcagtatggtaccttccaccccaggtcaagtagaacagctcggtgtgaatccagagactgagtcatccaagtgagccatgcaggggctggggtcatctttgttactcatcttgggggaaggttgagagaaagaaagttgtggctggggcctctgatctcccttctctccaggcagctctctttactcagtgtgaatatagaagcaggtggtcaatggggaaaaccagaagttcaggaattctcaggggagtctgtttcagttcctacccgacccttgacagtgacccagctgtctcccaaaaagaaggaacagggtctgccctcccatttcctccctcccacattggcacctcctgggctctgctgtgcccatcatttgtgagattggcccaggcctttccctcttcttttcctttgctagatgccaccccactttcagcttagagggcagctaagccaaagccagattagaaagggttttgtgttgctgcccacgcctcctctcattccccggaaaggaaaacaaaggctcagtctatcttggcccctgtcaggtgtcctgcccactccctcagcccccaccaaccccttccccgctccagcccccacacattccagtgggtgggggcaccggatgtggaatctcctggctgagtagagctctggggtgggaagtgaaaaattcaacagccaataaaggagaacaattattgcaggggttggggagggcaaaaaacactggcagaaggttggggacaccaaccccatggtagtaatggtaaccacagcccataccttgattgaaaagaaaaactagtgcctaaggcagaagggagggagagcatgtgtgtgtgtgtgtgtgtgtgtgtttgtgtgtgttccttgatctgtgtgggcaaaagcgaaggcttgggagagcaactgagagccgagaagaaacccctgggataccctcttttgacccagggttcctggggagggggtttgtactcccatcctaacccggcttcagggaggggcccaatttccctctccaacttcttgcatagatccctaggcttccaatcactgccagatgtgttcctcctgctggattttcccagtttttccatgcccctttttccctcccagctttttcctcagggatatcaccccaggttttccctcccttcccccactcagctgcaggaactcctttttggggtttggagctggtatgtttctagtcagctccgagcttggctctcctgggaatcctgggagtgaaaggaaggagctgggtttatttgcatgtactggtagtcatttgcatcacatccaaaaatggccaaaattatgagccctgattcttggctgaactcccactgctgcaatggaatattagtcccggagaccacccccaactagctggagctgatct

SEQ ID NO: 58137 - DNA, 2514 bp, Homo sapiens
ggcactcaaggtgggccatactccctacctcaccaccccaatcctgggcccccattggctgcctccagtcaggttacctcaggtttaggttaaggaggaagtagggtggtcccagaaaccccatctatagccccagtgtcagaaaaggtagagaaagaaagaaaagcagttggtgggtccaagtaaagccttttccaggagatgaataaaacgtattccccagactggaagccatactctacccattctgattcctgggctcccacctcctctcccccttcccaggaaattggggatgtggagaactgggctcggagcatcgagctggacatgcgcaccattgccactgcactggaatatgtctacaaagggcagctgcagtctgccccttcctagcccctgttccctcccccaaccctatccctcctacctcacccgcagggggaaggagggaggctgacaagccttgaataaaacacaagcctccgtttctctgtggtgtgtttcagagagctactagctccagtgtcgggggtgggagtggaaggttcaaaggtggtttccctgagggacaggtaccttttggggagagggtggaactagcttcctcttactatcccaactctcttctcctccatggcccttgtgcaggtgtctgttaggcaagcagagggtgggagttcccatccctcctgagagaaggtcctagtagccctgccccaagcttcctaattcaggacttgtttcctacagaagagaaacaaggcaaggtacaggcctggtccccagctctggctttctgcctctccacgtgctcatggcctctcccaggctaactctaagcagtgtcatgagtctgagccaggtgggagattaattcctgggggcacttcagggctgagaagggggaggaatgacaggtccagtaaccgttaccaacagagcagtgcagctgccatccttgacagctccctcctccttggagaccatgacatagatggtcaggaacccaggctgagaaagacagccaaggggtggggggagcctaggcaaatctggcctctgccaagtcctggcttcagccaggcaagctccagcctccctggctcctcctcctcctcagtcctatccccaccctgtcacacatacacttaatacgcctggcatccaagtccacccactccggactttggccttagcagtagttagtgtgggaggctgggaagactgggagcagtctcttaaacaaaagcaaaagaataagcttcgggcgctgtagtacctgccagctttcgccacaggaggtaagtggatactgggagctgggggaactgagaagactagccagatattacatgtattgccaactcaaaactttcagcttttaacatgcttcctcacacattatcccctttgatcctccacaactctgaggtggacctggtgggtcttagccccacttggtagatgagaaaataggttgagagagacagtgagatgctcagtatcacacagcaaacctcttggccctatacatcattccaaacacaagacccaggttgcatatagaaggttcagtgtccctggtttagaaggagaggtggtgtgaggcaagcaagaagatgcctctgctgcactccagcctgggcgacagagtgagactccatctcaaaaaaaaaaaaaaaaaaaaaaagatgcctctgctccatacagcaggtctgtacacaggatctggctcatgtggttttagttaagttagccacaaatacagggtctgcccacatctttgctttgaacagatgagccatggttggccaattatctgccaaccagataatttctcaatatgctcacaccagatgcttccagctagggagggtattaggggaaagggcttgagggccacagtaaactggacaagtttttctgcccagcctaggctgccacctgtaggtcacttgggctccagctatgtggctgcctcttctgctgggtgccttactctgggcagtgctgtggttgctcagggaccggcagagcctgcccgccagcaatgcctttgtcttcatcaccggctgtgactcaggctttgggcgccttctggcactgcagctggaccagagaggcttccgagtcctggccagctgcctgaccccctccggggccgaggacctgcagcgggtggcctcctcccgcctccacaccaccctgttggatatcactgatccccagagcgtccagcaggcagccaagtgggtggagatgcacgttaaggaagcaggtaagtatggtagaccaccaggaatatggtgtggggtgtcctgatccccacagtcaccccaggagtcacctgcaagggctgtggtaagctaaagggacaatttgaggagaagcagttttcagatgctcccaggaagaagagggagctgtgggagtgcctcacctacccccagcatccttttcatctccccacagggctttttggtctggtgaataatgctggtgtggctggta

SEQ ID NO: 58138 - DNA, 3554 bp, Homo sapiens
caggcccttcccattattccctgcttaccttatctctaaacacatagccagcaatggctgcggccacctccaccaacatgataagagacagaaagatggcaaactgcaggagcaaaggacagaagtcaagtttggagtctatgcattacaggggcccgttttggcacagccggtccctggacactcacaaaggtcttcctcacccacccacctcacccaccttcctgagcccgaaccaagctgctctggcagtcccagaccgcccatgttggtcccgcccccaactcaccgtgatcataagacaatagttctccttgcaggccccgcagcagcccacaaaagccaccaggaagaggaagacacccactgcgatgatgaccactggcaacagagagccaggggtagccccctggattatggtctgactcaggacaagctgtgccccgacacccacggcaatcagtcccactgcacaggcctaagagaaaatcaggtgaggattaggccatatccacaacacagtggccctccatggtggagggcagggggtacacctaggacacagacttgaccccatccggaagagagattctcacacctctagggaatttctttggctgtggggtagggggatgacccatccttgcctgcccctacctcccctgatcccctcccggctctttaatcagggacatgaccaaattcaaaaacctcccagaaagccttgacctcaagacacgtatttctgacctagaataatgctttctacaggcctccagggctcccagctcaattctctcccagaactgccccctcactatcctccagtgcacatcccacgcgcgcatcagctgtgactaaggttcctctggccagttaggccaggagaagggaagaggaaaagggagcaagagtgatgtgtccctccctagacaaacagtagcctctcaagccaggagcccagggcaggagcaaattgaagtgggcagagcccttcctcacccccaagcgctgggaggagggaaagggggagaggggctggacagggatgagagggttggggagggagagaggggagaagggagagcgaagggaagccccatggcgatagcatcaggcggttggctggttgccccactgccccatatcacaagtggttgggtcaccagacaggaagggccaggagggatgggggtaggggttgctgcacacccaggatggccattctcggtggaaacaagcctcaggtgtccaggaaaactggaggagggagtggctgcgctgtctttccctggctttctttccacatctggtctccagctgccttaattctcattccctcagccctcaccactgtggagccaggtctccccgcaccctgccggcgcgccccccaggacccctcgccactcacgcaaaaggccagcaggaggacgtagagcaagaacttcacacatttcattcctccttccaccgccatggctgccgggcctggggcagaggggagggcggggggattaaaactggccgaagggggacctcggtttccgggctcccggccggccctcgagggcttcccttcacggccccgattcccggcccctcccacccggaaacccgcggtcggatccacgtctcccagccccctctttacccgcaggagaggggtgggggcgacggccgcgaagcccggaccccgccccgccgcctctggggcccaggacagatccaagggcgccggcaggggcttgagcctgacgccgaccctcggcccgccagtctccgggcgtcaaacaccctttccccacccaacacccagcctggagaaacggtcttcagcccaaccccgacccccgccccagcccctttcccctgggctctgacctccccgcccaccaaaaaaaaaaaaagtgcagccagcacccccgccacaccctgcccgggcccagggaacttcgaagcaaagttgctccagggcggctggagagcgccggacgagtctccgcgggcctggggcgagccctggaggaagggactgcgggtggtctctcccagcccgcgccgaagtccgccgggtccccgcggcctcacctgggcttcccaaggctggctgcgcgttcctctcccgccgcggctccggggctctctagctgcgccccccggctcccgccccgcctgccgcgcggccccgccccgggctccagccacggtcccctcccccgccgagtggccgccggcctccctcatgtgacgcggtaacagctgcggcctgagtcactgggcccggcgcggggtgggccgagccccccgcccggccagggccacgtggcccctacccggaagaaggcgcccacccccgcaaagggaaagccgcaagggcaagacctcggggcgcctggggcccccctctggcgctatacctccgtgccaactcggggtaggagagcggggcggagcgcagcctgggtcactctggttcagagaagcggacgaggtgggtgagagttaccctctgagcgccggggcggagagctgaggccgggtgacaatgtggtctgtgaggtttccccatcctaccgtaggggatgagccagctctctcctctggctccaactctgtgcaagccccctccccatccgactgtgcagacagctggggactgcctggggtcgggtggggccagaacaaacacttccagaaagtccctggctcacatcctgggtgtctcccaacattctacagcattctagagtggggatttctggcccccctctattagcacagcttctccattttccagggatcctagtctgagaaaaggggaggaagcccttccccgaagccacgctacccagtcaatcaagacacgtccgcgtcgggtcccgccctctgggggaggattgacaaggtctgtgcttccagcctcccagacagctcctgcatccgtctgtgatagcgagggcttgggggaagacacgaaggcaggagaggcttacatcctctggatttccccgtcttatcccagaagacaaagccaggtgagggctggaagcgggctagggggatcaagctgcctccctcccttgtgtgccaggggtggtccccagaaggagctgatctgaacaggccggagagtaggaccggccgtcacacccccacacctccagcctcggccccactccttgggctcttaaggtcctgcctcaagaaccacttcctgagtcttagtgtatgtgtgtacacaaagaatgaaagaagtctctagagctaaaggaaggagatccgggctgggctgagaagcatcttccaggatcacggccttcccgcgggacacaccaagcccattccggatcttgctcttcctgaccatggctggcaggctgtggaggaggagcggagagcagaagaaaggagtattcatcaggttccttattgtgctgccactagatgccaggcatgtgctaggcttgggggctgcaaggagaggaagacagcggccctgccctctgctagcaggcagaaccgagttctggccacactgtgaagaaaggcag

SEQ ID NO: 58139 - DNA, 2266 bp, Homo sapiens
aaagaaaatactttttaaaatgttcttctttttaatatatttttttaacttttttatatatctaagtgtgaaaaaactaccaagagtctcataagacaatttaaaatagcttctgtgattcagtgtcagccaatggtaacaccaggagatgcagggcccacccgagatatgaaatggaacagagataatcttaaccttggaattgtttttcccaaatattgcaggtgtgagttctctctggtggttggagatggtgtgtgaggaaggctggcgggccgagagccgcgtgacagaactcgaaaacttttaaatctgaggtgtctgtacttctactattctcaagacctcctcaaccccaggcttctaaggcgagaccgatcttctgagaggcctctccctgtttcaaaattcggcttggggcgtaatcccacctagaaaaggggagtggaagtattttctgagtgtctggtacctatttagacagaaatacacaaaaatgccaccatttgctaacagggaaatctcagcttcggacgacagactggaaacatcatcccagggaagaaaaacggatcctggctccgacatggggcaaaaaggagggaccaactgacgtaatgcagccctgaaaagcaacgaagagtataacaggtagaaggcacttacacaacccagtggggaagggtgacggacgatacaatgatgaaggaagcagaaataacaaataaatatagcagtaaagccgtgaggagaaatgggaaattagggaaggcgtagtgtggaagggtggcacaaaagagctacggcgggagccgagaaacgaagtggaaaaggctgcacggagaagacgtaggagaaggcgcaagctaccctgtagaattcagttcctagaaaagtccaactcagcccttccccgattcacggtacctttagcttatggagctccaccgtctcggtcgccatcttgttacccctcactccactaggcccccacccgcggcctccgcctccaggagctcccgccttaggcgtagagatgcaaggctgaccaatcgttgtcactcttgctcccacgccataccatcagctcttcccattggtcaatagctgacgtcgctctcacttctctaggcagcttgccccacctctttcaaaaggtggaactgggagaggggcgggcactgtatcttgcgaacgacagaaatggcaaccaactgtgcttctgcattacagaccaccaaccaatgggtggtggcagcgctgattctgttcctccaataggaaaggggcagaaggagaggcgttacttcctggagacttcaggtgtggtagccggcgccgcgcccatagccggacggggatctgagctggcaggtaggagctgcaaagactgtaagggttgctgaggaaaaatggtgggaggcgaaaggggcgccgagggagtggtgacctaaatactgagaggggagcgctgaagggagccctgaaaaaaccgatgaacatgaggaggaagctgggaggggcatggggcgggcttaaggaactggcggtggggctggggcgggcaagagccgcttcctaaccagacatcatcagctttagagctaccacaattttaaagatccgagttcagataatcactgctgcccctggagtcagagccaaggctccacctttcgaggtattgagctcaggtcccttcctaacccagtccagaagccgtgggcaagttgttgtcgtgccccacgcttgagagaagtaatggggatgcagactgtttacatgccacggaggtgagagagagggtggacaagccccagagaacaaagtggggaccagagtgagctttactctgtcatcccttcttagtggttctttgatgattccatgactttcgcctggaattctgggtgtacgtgacctcttcatggttattaacttcttcagcaaagtcagatactcctatttcccttgctccctgaagtgagtgccccaagcctacacatacaccttcatgttacagttgacgtgtaaagatcagagcaataatgactatgtctctgaaatgtagtgaggactcttcttgtcttttaaagttttccccaagtcttcagtttttattttctgcgtgatgggtaagttcttcattcccaatagagttcaggggattggggctatctgagagacaactgggagatagctcaagaggggttgagaaaaaactgagctggactcctgcctgatcccccattacggctaggatgaa

SEQ ID NO: 58140 - DNA, 1635 bp, Homo sapiens
gcgtggtggcgcgcacctgtagtcccagctactcgggaggctgaggcagaagaatcgcttgaacccgggaggtggaggttgcagtgaaccgagatcgtgccactgtactccagtctgggtgacagagcgagactccatctcaaaaaaacaaaaaaaaacgaaaaaaaaaaaaaagacggacgtaccgaagaacggcggtaactcctccccctcgagccgcccggcctggggccagggtgagctacgagagccgctctcccggctccgcctcccgctcacgctctgcttccgccttccgtccccgcggccgccggcgacctgggcctacttccacttccggggtcaccagggaagagacgggaaggaaaagaaatagcggttggctgagaggcaagccaatccagctagggctgcgtcgactccaaggaggcggtcctaaggaagtactggccccgccatttaaaggcccctccctccgcgtgtgggaatgggattcccgcaggttgcaccgcaggaagcaaggcaggtggactctgcaccaatgcctgcagactaagggcagactctcaggattgctctgggtgtattcctaggctttgtattcctgggagatggagggcagccaccgagccacatatagtctttttcccttgcagacaaaaccagggagctcagaagagtcactgccctgatcccttccgtgccggcagctgcgaggacacaggcccctttgtatcctgcggtgcggaggtggagcagaggagagggtgccccggctggccccctccctcgccccgcagcactgcccctcctttcacagcaacccacggcctcccccgcgcttgacccagctggcgagctgccccttatacctggatccgcccctcgggtcgcagctccccaggcccgatcaccgagcggtgcctaggaactgggagcgtaacttggctcggctcagaactttgcccgtgagccaaagaacactgaactcatctacctgctgcttgacatctcatctgcataccaagctatttggtggacgtccacaagcgcccccgcccccacgtagacccagttgggtccccgttccgtcggtcccctcctctgcacacgcctctagccttataccccgtcttgatccgaaagtttttccacccatgaacccccagttggcgctccccgaccagcaaaagccccttccctggtccacgatcccgaccacccggttctccaggagacaatactccaattctctggaaagtggaagaaaccaagctgaagctaggggggcgctgggacccctattggggctttgagagcttccggttgtcatctcctaagtattcggagacccttctccaaaactcttggggtgaccctcaagactcttacctgctatatagttgggggtctctggtcctggactagagcagtaggcaacctgggtccccccacacacacgggaaagaattggaggggcctgccttgtgatgtcacccctcctccccccaccgcgcgcacgcgcgcgcgcacacacacaaacacaaacacacaccccaacacacacgccctgtcccctttctccaccctgcaagctagttgcatttagctcacagagcctgggctgcgacttga

SEQ ID NO: 58141 - DNA, 1134 bp, Homo sapiens
tttgctcagcactcttcagtctcccagagttcccacaggcacccaaacaaaagcccctagagtctggagctgcaggctgggcacatgtgcaaggattggatgactaattgttgccagcacagcatcatgaccaccccctccaccagctcctaccccctgagccgggctgacccagctcttttttgtcatctctaaatttgtcatctctcactgggggagatgtggacgtgtgtgcgaagggttaggacatgtggcttgcctgccccaaaaagagaacttgatctgagagaaaaaaatgggttctttgtcttgcttgctcccttcctgcaagttggtttccctctctgtccacaaattgtggcaaaagagttttacagaaatatttttaatgacaatattttaaactatagcaagtgggagtagagtagacctctgagagtattttctaatgatcaggggccatggggttatgggtggaaggcaaaagtttgtagagatttctaagcccagcagaagctaatctcaaagctatcgcccaccccctctgacagccacccttaccctgtggaggcagtgggcagggaagctggggaaagaagaaaggggaatcctggagggcaggtagaagggcaagtctggagcctgaaactggaaactggaggtgagaaaaacatgagctgtaaccaagttagggctggccccgactttgcccttgacctggataaatgtgggagttggtggtgttagcctctgacctgtttccccctcagggagtcaggacatagggagctttctttggcagagtggggttgaatttttaagctgttaccctggaaacctctgtttttaggaggactcccctacatacccacaaacacagacatacacacacacttttttaattactcataagttcctagaagccgtatgggaagtgatggtcaggactgtgcacagctggaattggttagtgaccagggaagtgggaggggcttggggatggctcagggacagggccagcacattctgttcccatgatgctccaaacttcctcaacccccatatgaacacttcctggcattcccacccacccaccactgcagcttgcacacacactgcgtcgggcactggcct

SEQ ID NO: 58142 - DNA, 1170 bp, Homo sapiens
ttttgttcaaaatgcaaatatcattaatacattaaaacaaaaaagtccaggcgcacgggcccactcctgtactcctaccactttgcgaggccgaggcaggcagatcacctgagatcaggagttcgagaccagcctggccaaaattgtgaaaccccatctctactaaaatacaaaaaatagccaggagtggtggctgggcgtctgtaatcccagctactccagaggctgaggcaggagaatcacttgagcccaggaggcggaggctgcagtgagccaagatcataccattgcactccagcctgggtgacagagcaagactctgtctccaaaaaaaaaataaaataaaacaaaaaaagttgttaaaggcaatgggtgattcgacaggtggagggcatggaagaaagaaaaatcatgagcaaaggggctcaaacttgagcaaagaaaggcatggatgtgggaatgggcgtgagtagggaacagaaagttgagaggttcaggtgaatgagacagttcatgttagggaataggaagcctggttggaaatgaaaaatggggtaatcgcagaaagccttaaaaacaaggtcaagaactttggactttactgggtgagtaaaacataactactatggatattttttgcccagctgtgacaagaataaaaaccaaagaaaaaaaactaggaggcttcctggagggaggactgagacaagagctgggctttgaaggaagagtcaaactaaacaaaaagggagacagagtagattagaaacagttcgttctcaaacaaaaactcacgcatgggaatgtagatagcattttcaggcaacgacaaatagaccagtcaggctgagccagagacaagggctggaatgttcagaccttgaataccagttaaagattttaatatctggcacatggcatgcactcaacaaatatttgtcaaatgaattaatcctttatgcgaagtattgtcttagggctttgaataaatgaatgaatcctttatacaaagcagtgtttcagagtatttaatctagcataataaaagggtgacttggaaaaaaaaaaaaaacaccagagacatggaaactagttagggaaaaaatattgtgataatcctggcatgaagggacagaattggctgaaacaggggcactggaacgtaagaga

SEQ ID NO: 58143 - DNA, 650 bp, Homo sapiens
agcgtccatctcaaaaaaacaaaaataaaaaaggtagtcctatcatttaatcacatttcccaaagcttttgttatgtaaaatactactcccataagatattaaacaggggttatccctaaaaattgttaaataagtttgggaaattctgggttaaacaccaaaaaagattttgcgtttgttttttttaacagcaaggcttaaatgagttactatgttcttattcaggtacatatgcaagatgggaatatggtttacagtgtttctcaaaatttgtgcacagaaacattatttgcattttattttatttatctttgagatgaggtcactgtcacccaggctggagtgcaatagctggaccttgactcactgcagtctccacctcccaggctcaagcaattcctcccacctcagcctcccaagtagttgggactacaggagtgtgtgtgtcaccacacccagttaattttttgtatttttagtagagacgaggttttgccatgttgcccaggctggtctcgaattcctgggctcaagcaatccacccgcctcagcctcccaaagtgttgaggttacaggcgtgagccaccactcccggcctctattttagttatttattttgtgtcacatctcagaagattactaggtgttt

SEQ ID NO: 58144 - DNA, 2344 bp, Homo sapiens
cacatacaccttacatacacagcagacacttcagcatctcggccagccaggctgcaaattcttctctagccagaaggaatagtgggttttattcacttgtcaaagggcttcggagaaaagccactagatactttcctgtttgccttttcccaccttagacccctcaatttctatcaccatcacgggagaaggtagcgaagggtggctccatcagggagaaaactcaagctgaaagttgtattagggtcctcttcccttcacacctctaaacctcagtgacccaacaaatgaagatacgggagaggaaaaggtactatgtagaaacgaggaggtcttcagcaaataaagcttcgagaaaaataatgaaaacgggactggggtagggcagaaaccaagtatagctgagatgggggaggggaaaagaaggagggcaggaactggagggaaatgagagtgtagaagcccccaagcctgaagaacctaaaagagatatgagtggtccaactgctggagaaaagctaagggcccgtgagggtcctgaagcagggaccagcactgaaggaccccagggtttgggtgaccggaagcagagaccccaaacacgagaccagaagggggcgcaggagacaccccgtaggagagaatgaatggggaaggcggtccggggggcggggcaaaggaggggccccgggatgggcggggcacagacccctttccaagtccgaacccctgccccgagagcccggagagaagcggctccgcgcctcccgcactcaccgccggtctcgtcagtaacatagggagtcgccatcttgaaaacgcaaaccacttccggcgtgagcgggctggggtcccgcccccctccccaccggaagtggagtcccgatcgtagcaagccaccatcttagtcttaaagggagagtgcaccatttcatgggcggaggtggaggaggaggaagagtggagaagctgaaatagttaataaaataaagccgtgggctttttactgccaccgataccattactgagcgcttgctgcctgtaaaacagtcctcagggagccaagagaagttccgaggcacagtccctctcatccccaggaactcctcgtacgtccaggacctgcgagggaaaagggcgcaaggcccacctgcacccaaaaagggggccttataaatgaagaaaggaagaatatccaggctctggcctgcacccagatctcagagcggcttggtgacgtggagcagacaaactccaggaacgcactggggcgcacaagtgtttctagggacggttggagaccctatctaaccctaagaaggtggggaggtcgaattcgtgtgccgattgctgtcggccaacccactcaaccaccagagacccgcgggaggggcgtgcaaggcggagggcgccgcgggtcggtcacctgtctccgtagccgcagggctgccggcagcttccatggccgaagaggcagcggaccaggttgggcgggcggccctggcctggctctgccccgctgggcggcgccggggattcggcggcgaagtgatgagggccctagttgcttctcgcccagacctcctaaccctgagtgcctcctcgggctgggccctagggtcagagggcagggtgaaagcttctgggcggacctacttagtattctaattaaactcgtccaaccgctgaggatctaaagcggggcaactcgccaataatccggtcccgtagtgtcactccatttgtagtcctgccctgcgccgtacctccctattctgcagacgaacccatatggtctccctccgccgcccatttcagcaactgttgttccttcagggctaagtcctgttaaacttgtttcccctacagcctgagaggagcccggctgcaggttcctctcctcaggtgtcaactctgccctcctccaccctcatatagctttttccttatcaacccttttaccttcctgcttatatccccactttggcttagtttaatgtccagcagtacccctggaaccagggaggaggcaggaggtaagtattggtgactacctccaacactaggcagcatgtcccatttaaaaaacaaaacaaaacccaggcgcggttgctcacgcctgtaatcccagcactttgggaggccaaggcgggtggatcacgaggtccggagttcaagaccaacctggccaagatggcgaaaccccgtctctactaaaaatacaaaaaaattagccgggcgtggtggcgggtgcctgtaatctcagctactcgggaggctgaggcagagaatttcttgaatctgggaggcggaggttgcagtgagccaagatcgctccactgca

SEQ ID NO: 58145 - DNA, 694 bp, Homo sapiens
acatatctgatcctgcctcaccctcaggtaagaaggaaatagggggagaggctcagctaagcctcccaacttcttccttctccctcagtctgtaagtacactgttcacgaccagtgtgccatgaaagccctgccttgtgaagtcagcacctatgccaagtctcggaaggacattggtgtgagtgatctcatgcctccacccccaacatcacctacatcctggccctggccctggcccttggcccattgctgccctcagcccctccctcccctaggtcctgctcagaccctgccagacaaggaactgcctttctccccaaggtccaatcacatgtgtgggtgcgaggaggctgtgagtccgggcgctgcgaccgctgtcagaaaaagatccggatctaccacagtctgaccgggctgcattgtgtatggtgccacctagaggtcagtttgggagccatcccttctgggtgcgtcttaccccgcagagctgccttctccacgggcctccggccacacctcctttacaggcacagttgcccctgctcccaagggctctttccagcccagactgccaggttgagaggagacagggttaccttcgtgatctctctgtgcccacctcgtctttcagatccacgatgactgcctgcaagcggtgggccatgagtgtgactgtgggctgctccgggatcaca

SEQ ID NO: 58146 - DNA, 1326 bp, Homo sapiens
tgttcttccctccagcaaccaaaggcactggggggactgggataggcccctatataagaaaagggtgctcatttgcatagcccttcctcttctccctcagagaaggcctgggaggggccggaggagaggaaaaaggaaaaactgacaaagggatcctggtccctagacattgctttcccatcctgctactcaatgacagtttctggtttcactgggtcactctcatcttgatgcactcccgggcaagagctaactgaaaggcagctgcgtaacacataccagacacaacagtttatcatgggagagtgaattaaaccaggaacttctcaaaaagacagaaacagaaccctgcatcccaaaacagagacagtgtcggggtatgctatgaggcagaggcaacgactcctctgaggcccaggattcctttgcaacgagattcccggcttcctggtttccaaaggaggctcctgggccaggtggaatttaaccttaggtcgatacatattttccccaggattggtgaaaatagtgagttagaaatcaagaaatccctacagactagagacataggtaggaaacttggacccaaagcaggtacttgggaagagtgttcagccgccccaccggggaagaaacttgtctagcccccaagaaccaaacttgcctggggcgggatcatttgcggggaggagcgctgggctcgccccccggctctgacgttgaccaatagaaaggcctgggggcggagccagggaaacgcgggaagcaggggcggggcctctggtggcggtcgggaactcggtgggaggcggcaacattgtttcaagttggccaaattgacaagagcgagaggtatactgcgttccatcccgacccggggccacggtactgggccctgtttccccctcctcggcccccgagagccagggtccgccttctgcagggttcccaggcccccgctccagggccgggctgacccgactcgctggcgcttcatggagaacttccaaaaggtggaaaagatcggagagggcacgtacggagttgtgtacaaagccagaaacaagttgacgggagaggtggtggcgcttaagaaaatccgcctggacacgtgagtggcctctgtacccgggactcctaactggggacctccttgattgtcccccccaaccccccacgggcgggtagccgtccagggaccggaagagagcagggagggacttctttagaagtggagaggtgggttgggggccagtagaaggtgaagagtatacttatactccctggggagagtatagggtggtgtggaatccatggaaaactttc

SEQ ID NO: 58147 - DNA, 417 bp, Homo sapiens
aattcggttgaaaaaatagatccaatcagtttataccctagttagtgttttgcctcacctaataggctgggagactgaagactcagcccgggtggggctgcagaaaaatgattggccccagtccccttgtttgtcccttctacaggcatgaggaatctgggaggccctgagacagggattgtgcttcattccaatctattgcttcaccatggccttatgaggcaggtgagagatgtttgaatttttctcttccttttagtattcttagttgttcagttgccaaggatccctgatcccattttcctctgacgtccacctcctaccccataggagttagaagttagggtttaggcatcattttgagaatgctgacactttttcagggctgtgattgagtgagggcatgggtaaaaatat

SEQ ID NO: 58148 - DNA, 2843 bp, Homo sapiens
ggatgaacaattatatttatatttcaggttatatccaatagtagagttggctttttttttttttttttggtcatagtgggtggatttgttgccatgtgcaccttggggttttgtaatgacagtgctaaaaaaaaaaagcattttttttttatgatttgtctctgtcacccttgtccttgagtgctcttgctattaacgttatttgtaatttagtttgtagctcattaaaaaaatgtgcctagttttatagttcatctctttcctcctcttatttactgaaagaatggtgggagacagaatatgaatgtgtgtatgtgatcattgatttcagaccccttttcctaatctctctgtgcatggctgcccaccccaccccattttggctagtgctgacggtgaacaaagtggttattatcatccctatttatggctggggaaactgaagcctatatacttcctacttcactttctccacacaccagcaaacctcctttcccccagccaacataccacacacacaccacaccacacacacatcacatacacacaccacacacacatcatatacacacatataccacacacaccacgtatacatataccaaatacacacacaccacatacacaccatatatgcacacacaccccatacatacacacacccatgcacatacatagcggcaggaagagggctcccggggaatttgcctttcgacactgcatttcccagtaagcccgccgtttttcctttctgtttcatatcacagacagaaaagttttccaaagattcttttatttacatttacatacgattctgaaaaagcgtctccaagctaccacttcttgtagttgccattgtctcattccaccaaaaaacatctcagaccgcccgcggccaccccaaatacgcctgtccactgaagcctcactaaaaggaggaagcgctgatgtcagggttacttaaattcccaggctccggatccctagaagaggtatttccctttacgcccgcgaatttgtcatagaaggcagggcactagagccagccccagccaagtccagggggaggggcgaaggtcagtagcggccttcctaaggcttccttcaacccctccttgcctgccagtcaagtaccgtattttcgcagtactggttaaagtttcactttgacccgcctccatcactcacctgattagatgtttatgagtcaaaaggcggggtcatggggtgtcgagattttattggtggatacatacgcctgtcggcagtgtaccgccccctgtcttcaggagcttgctctttaatggctccttacctcgtccatcttcgaggtttctccctcgctattggcttgtggccccgcctgtcgcgtcccttgctcgtacttgttggtgacagcgcccaaagagactcgcctttctccagaggattggtggatgagtgcacatatagcccaccctcgaaggtaggcgggtaatcgagctattggctggagccccgccccagggcgaggaggagaaggaggggcaggagggtttggttgagctgcagctgtttgtctgttcgacacaggcttggggccgacgggggagacggagccccaggtaccgagctgatggagcccaaagggcaggggcggaagcgcccgggagatgagagcagcctggcctgagagcggaggcgggtctggtcctaagcgaggggttagagtggcccaccggagaggggagaagggggccgggccccggcaggcctaatgggggtcgctgaggaggggactgggcggcctgggaccccgaagttggtgagtcgggaaggcggctgggctgtggcggcggccaggccgagggccgggggctggaggcctggagcttgagtgagggcaggggcaggcctcattaagcagcgctgaagagggaggagctggggaaaggaacagggcagcgggtgaggtaagcccatttgccgggaggtgaggagggtcagacctgtcgcccgagccccgggggtgactggggctgggtccctgcagagaggttcattggaagggcctgagaagggttcttagttgggtaagaagcgttcttttcagggaaagtgcctattgtaaaaagaactgagggtgctatggtgttgagctgagagagatttgggttcagtgagggagaactggggaaaatgaagaaggctgtattaatctagaagactaaggtagttgaagtaatggaagcagggcctggtatcagttatgggaacttctgggaatgctgaagggtgggctgggggctctgggtcttgggagtacacactcttttgttccctttagtgtttagatgtggtaatttgaagctttttaaaactcccagggtagggatgaagatcaaagtaatttttttttttccatgactgttggctgctccaaactcagcccctacactttctgttggcctcatagctggtctatactgcagtctgtttcttaacttactgtttcatgtcctatgaaagagctaagaagttggattgggggcatgttttgtccacttctttcccacttaataatgtggtctatagcaaataccatgtctcctagaactgagaatctatttcatatctatttcattatctacatgggaaaggggcttagagatcctcagccatcaggagatcttctgatcatagttggtgaaacttttgtgggacttagacttgacttgggtatttcccaggcaggtaatggagttaacaggtccgaaactatgcggtgatatcactgaggaagagatttggggaagagtgagaaattccatttcaaaagcttggcatcaccccttgttctttgt

SEQ ID NO: 58149 - DNA, 1953 bp, Homo sapiens
taggataggttgggcattagccttcttcagtgatttgattgtatacagattgaaatcctttccatttccaaacacttaagagccaaagccaacttgccaacttttcactgtcggttcccttaccttatatctcttggtaataccccccacccccgttccctgattcctggtaaaagctctagttggagagccgaaaggaaaggaaatgatctttcaaaattaaaggtgaacaccttcacttaaactgattaaaattgcagctccaccgtccggcctctagagggcagtgtatggatacatttgtccagattgggggactaggtttgataaattttgtcctgcatcaaatgacaaaagggtaataggaaatgtattatatttatgccccttactttgagataagagactacaaccttcatacttcggggtgttaagctgccattgctcttgttaaggggcagtttgttttttaagagatggggtcttgctctgttgtccaggctggagtgcagtgccgcgatcttggctcagtgcaacctcgaactcctgggcttaagcgatcctcccgcctcagcctcccgagtactgggactacaggcgtgtgccaccaaggggcgattattattttttttttctacgcaaaataaaagacggctattcagtgttgttgtttcatttttgtttggggagaaattcgactagcccaaggaatctcaaattcttggaaccactattttaggcatttctgttatcattcctggaatacgagaactaagcgattgactttgctttccctaaaagataaacagggtagttgtagttgcaacagagtagatagaggtaggtctaccctgggtttaaagtggagatcacagccggggaaaaccggactggatcccgaggcctcctccagggaggggcggcaggggtgtctcaaaatctcccacctgtcagcccaacttttggattccttgtcaccttccacactgcccgagctccggacatacagccctggtgcacaagggtcccattctttgcacaccaggggtataatggactccggactgttggcgagagtgacagcaaaaagagccagcctcttctcccaggcttcttagcaacctgcctgtctcggctccaggaggcgggttccagccaatggttgagccacccgcttccagccaatggctgagggataagctgaggggagtgagaggtcacttactgcagccggacataacggcgctggccccgccccttctcgagaactcgcagagctgggctggtaaaattgcagtgctgaagacactggacccggtaaggagactgggggtggtaaagaagctggggaggaagggctgctgagctgggcagcggagggggccttggtgtccagctgtgctccgaacctcaagggcaacaaaactatcagtacctgcctccactccttctgtctgggtgctcttgagatcgcggggtgttgccgcaagacccttttgtgcctggatgccggacgtatgttcctacctaacgtgcccatggggagtgaggggtcatcacctgcaccaacgggtggcatttctgtattacagcaaaaggctgtccctcccaaacctgggattctgggctcactgagttcacctgcgagtcagccctacctgcactgctctggtctagtacaaacaggctgctggcattgaggtaggtggcagagagagtaatggtcccatggcccaggggcaaggtgaagactgctcctattcccatctctaggtttcctttcctccctacccacgacccacccaccccagcacattggtctccagcatctcatcagcagtttagacatttgtcacccctcctcactttggccctgctgggtcagtgctctctgttcagcaatttgaggaagaaacttgcagggcagagagcagaaaaattaccttccttctc

SEQ ID NO: 58150 - DNA, 1263 bp, Homo sapiens
catgttggccaggctggtcttgaactcctgacctcaggtgatccgcccgcctcggcctcccaaagtgctgggattacaggcgtgagccactgcgccccgctccatttacctcttatctacctatgacctggaagcctcctcccagcttgagttgtcccgcctttacatatattgattgatgtctcttgtctccctaaaatgtataacaccaagctgtgctccagtcacctagggcacatgtcgtcaggacctcctgaggctgcgttacgggcgtgcgtccctaactttggcaaaattaagttttgccaaaaacttcctaaactgagacctgtctcagatttttgggattcacaaggtacagagggaaaacttggctctagggcctgacgtgccaggccacatcgggcgtccagcgtgtgcttagattgcaaactgggtgcagattaaaggctagtttttgggttaccttcggcagacgatggtgcctttcggatttgaatctttcggcgctcggctactctcccctagctcctctcccattttcccccagcagtctcccgggcttggggacgctcggtgttcggccacgccgcctgtcgcctggtagtgggaccggaagttgttagggggagggggacggctgtgatggggggggatatttgggggggcaagtcccttctcaggtgaagctgctgatggagatggagccgccgccaccgccgcctctgagcgcccgggtcctggctccggcccggcgactgccgccgcctcagtgaccccactccccccgcactgggccgcccgggccagagtgggggacccccgccccctcgcctccctctcccccaacactgtcccctctccccaacccctcacagcctgcgcgcgcgcggagacacctcaggtgagtgaggggcggggcttggtgggggtaaagcgggggcggggcctcggtagccgggggcggggcctgaggggctctggcgtgaaggaggggggagacgtgggcgggggaaggggccaggctgagagagggtcgcgggttgggctggggccggagggttggaagatggccgggggagtttggcccgaggccccagtattaagagcgaggtagcagggactcgggggtcctaaaaaggcgggagacagatcaaggcaaggggccgaggacaggcaggagctgccaggcgcggggctcctccgtggggatgtggcttgggtatacagcagaaggacagcgaggagaaaggagcagcaaag

SEQ ID NO: 58151 - DNA, 2133 bp, Homo sapiens
tgtaatcgtgtttgtgtgtgtactgggtaccaatgtaaaatgtattcgtgctatgaatctgggtgaaaaacgtttaagtcattagtccaggctattcctccatccatttgttaggtgacatacagcatagtacagcggagccagaatacctactgcacgtcagttcttcaatctttttttttaattgatttatttatttttgagacagagtttcgatctttttacccaggctagagtgcagtggcgcgatctcggctcactggaaactccgcctcccaggttcaagattctcctgtcttagcctcctgagtacctgggattacaggcgcccaccaccaggccgggctaaattcttcaatctttaaagtgaggataataatagtagctacctataggcttgctcaaagttaaatgagttaatatttataaagacgcttaccacagggccaggcactgtgccagagataaaaagatgaatgagaaatagccccagcctcaatgcacttcattgtgggattttctccatattggaaggagggattcacaaaatgcttgtttcctctcaggccttcctcttcgtaatcctacacctacctagtagaaggactgtcagagaaatgagcccagggcgtcccccggtggcgcagcgccgccttcggtctaagcacttggggcaggggggaagggggggaggggggagcctcttggcttcgcactacaattcccaccaagcatctgtccctctctggcctctaataacgagtgcgccttgtggtccagcgtctggcaactttcacgcctagcgtcgcgtataccggaaaactgcatcgtccagaattgcttccgagtcggcgcggcgcaaggcttgctgggagacacataacctcgattttcttccgccatccggctaaatagtcccatgtgcactttgttccatggataaataaacactaggaacgcatttccaccctagatttcagcagaaatgctgaatgtaaaggaatatttgagtaaagtgagttgccgttcttgaagcccgtctcctaaggattctcccggtgtccgcgtagggatctcatgctatataggagggccctgccaggcaccgtctcctctctccggtccgtgcctccaagatggtgagtcttcttgcgtggtgagggtgggggttcgggtgcagactctgggattgtggggaagtgagagcctggagcacggctgaggggtggaccgagtgtacatttcatttgctctgggggtcggcgggatttgcggagaaacaggagatccgagcggcgccttcctggaggctgccggtgcggcttgtggccggaaagggactgaggctgggtgagttgcgccgttttcctaacagttttcccatcctgtcgcagacaaagaaaagaaggaacaatggtcgtgccaaaaagggccgcggccacgtgcagcctattcgctgcactaactgtgcccgatgcgtgcccaaggacaaggccattaagaaattcgtcattcgaaacatagtggaggccgcagcagtcagggacatttctgaagcgagcgtcttcgatggtaagtgggtcaccggcgcgaactgtgtgaggatcccagtatcttaaagccttcgcccaacttcgcccttttggaggctctgttctttggagcctctcaggcaatttccacgtatttaaggttgttactggtagaagagaattctcttgtttgccgttttgattcttttctgggcagagggtgactttgtgatagagtgcacagcctttactctgaggtaaaggtttgcctgtttcggttatgagattgcaaaaactagaaacttggtaaatttgacaattcttgtgctattgattatttgaatatttgtgaaaatatacaggtgaggaagaatgtcttcaacgtttcgagaatggaggccgtctagtttggtgtgcaaggatgatgtttggagcaataagaacgtcgctttgtttttttccttttatagaaagagcaaggttcagggtaggcattagggcgggtgtaggtgtagaaggaactggattattggtttattgcatttagaatgtcagtctggtccttgcggtgtcaagatgaactcacgtgggatgttaattc

SEQ ID NO: 58152 - DNA, 4226 bp, Homo sapiens
acctccccaaagcggagattctccagtagagaacaggccctctaggttgcatatcaatagggagcatgtttaaggaatgttagccggtagtctttgctaggtgtgaggggtgaaatttttctttatcaaggctcaactgttttcgaagtcttcaggcttgaagttctggagaaaacaactaggctctccgggcgagatcccgaataccagtttaagggatttgaaatgcaaggccgtctgggactccactgccacggatgggcaccaggcggcgccggtcggatccgtcccgggactagcagggctttgggcagcaacccgcagggagcccgaccgcctctggccaggtccgggcagctggtgggggaggttccagaggtccacgccattcgtggacgcagtctctagtgtcctctccgcgtcccacttcactgccccatcccctttcctgcgagagcctggacttggaaggcacctgggagggtgtaagcgccttggtgtgtgcccatctgggtccccagaagagcggcgggaactgcggccgcccggacggtgcggccagactccagtgtggaaggggaggcagctgttctcccaggcggccgtggggggcagcagaggggacggcgacaggtgcgggagcccctcccggggtagaagtggaaaggcgggctccggggtctgttcccaggctggaaaccacccccgccccccatccaaatccccgggagaggcccggccggcgccgggtctggaggaggaagcggccagagacagtgcaatttcacgcggtctctgtggctcgggttcctgggctgggtggatgaattatggggtttcgagtctgggagaaactgaggtggcctggacgtgaggcaaaaaacaccctccccctcaaaaacacacagagagaaatattcacattctgagagaaaatccaccaagtgaaccaaccggctaggggagttgagtgatttggttaatgggcgaggccaactttcagggggcagggctttggagagctttccactccctcattcattacccttccctggatctgggggctttcggaatctcgacctccccttggcctatctcctgcagaaaaattagggtgagccccatcctcgatctgctccgccaagttgcgggaccgcggggcgtggcacgctcggggcaggcggtccgaggctccgcaatccctactccagcctcgcgcgggagggggcgcggccgtgactcacccccttccctctgcgttcctccctccctctctctctctctctcacacacacacacccctcccctgccatccctccccggactccggctccggctccgattgcaatttgcaacctccgctgccgtcgccgcagcagccaccaattcgccagcggttcaggtggctcttgcctcgatgtcctagcctaggggcccccgggccggacttggctgggctcccttcaccctctgcggagtcatgagggcgaacgacgctctgcaggtgctgggcttgcttttcagcctggcccggggctccgaggtgggcaactctcaggcaggtaagtggcgcgagagcaccggcgggctcggcacctgggagccggaacccagtgcgcgcagcctcggagggtatgggcacggtctcaggcggcgcggggttgtgggtgctgcccccggtttgccaggaccacctgggagaggggcggtcaggctcgggttatcggcgtggtccggccgagggcggcattccgggaccctcacgccacccttctccagagcgtcgccgaccctctaattggtctccccagaagaggctgaggccgaaacagtagttcacacttctgaggggccctgcagggaggggagcagggaacttcattctgtaaacaggaggtgcttggaggtgggggccttggcgggaagggtctcggtttgctcgccaaccccctgccccccacccgcgccgatttcagctacccctagtttcgttgttttgccgacagggcggagctacagaaggttggagggggttgttgttctctggtgttggaaaaacaggagcggcacctcctcttccgtgagtgagcctgccctggggaggtctgagattaaccagagggccaagttcaggtgacatcaggcaggaggcccaacagaggctggcgccccctttcctcagtatagcagagcttaagcaacatctctttgtcaagacccaggtcaacacaactcatatttattgagcatctactatacacaaggccctgggccaggagctgtaagggcaaggatgtccagcctctggtcttttctctccccaacctgaggatcaagagggcacctctgctactttctaagcctcctgccttggggagtccttcctgggctcagcttgtgcctcccgcccccattttgcttattgtctgacactgtctctaggaccctagacagagccccggattgctcttctccagtcctcccccgactcccatgctatctgagcccacccctttggggtgtctctgggaccgtggacacctgaggactgaagttctgtggatctcctcccctcccctcagatctcagcttggggtttggcacagccagggccccttccccagtgtgggagtggaagaaaccacctgtgcttccctcacagttgctgggcctaaatttagatcctgggatttttagatgtgaacactcccagctggtggaggggggtggtctggggactggcgtgggagggagcagtggagtgactgtataactgtcccatccagactcctgcaatcttcacccagaaacccaggagtaccagagtctggccaccctccctggggaggcaggaggcaggcatggttgggtctctttaccctttatctgggtcctgcagcctctgggcatccggccctgtctcagtccttctatagcccctttgtcctggctgtgatgggggtgggggatgttggaggggaggcctctggttgaggaggggctggagattctggctctatcccacccctagtgctctctaccaaaggagggcctgtgacactgcccctccctatgctcccggttcctgggtacagcagggatttttatgattcccttcccctgccctgctccccaagctgcctagctcctccccagaggtgttgtttgtgctcccttcctgcccaggccctttgccccctgtttgtgtaatatggactttaccctcagggtagcagggaactgggctacctctaacactgtagccttccaagcacagacacaaagtctgcacaaacacttatgggcacgtgggatagatggggccacctgaaatacttcctgcaaggaaacccaactatagattcctgagccagcaggaccaatgtgtacgtgttcgtgtgtacattgtgtgtgtatgtgtgtgcccacactactacttccctgtgcagaaagcttggctcctcccttatctggggagaagtgttggcactataacttgggaaagggggtatcctgccaggaaggggattggggtggggctgttccagaaatgactaaccttcctagtctctttcatttcaacccaaggaccctggagttcccagctcctctggaactagctctctttgctgggactagccaaccttcatggggagtgataaggagccctccaaggtcaagaagtcagactaggggtgtatgttataggagggattggggcctcaccagtctccctccctccattcccactgttgcctcccactgagctaccaccgcctcagggaagggtggctggaacaggtggtatctaccccctactccccaccccacacatggtctttccctgaaccagaggaaagagactggggtagggcttcagagtccaggacttcccatagcccgttgtccaccacatttgcaaagaagagtgaactcccaaggctgacatgccatgtacctctagtctaggctctcccctagtgtgggtgaggattgccatggtgaaaggctttttcatgaacctcttctaacaatgaaattgtgtggaggctcaatatggggcatctgctactatctctctccaggttcctctgtatttgctgaaaaatactctagggctggaaagtgatgctgaggttgctagagtgtgttgggatgggggagagagtgagaaggaaaccctgagtttaggaaggcggggaggcaactagctccttatctttcag

SEQ ID NO: 58153 - DNA, 2123 bp, Homo sapiens
tttcacggtaagaactctcaacaaacatgtctttctgaacacttcccttaggtgctccatccaggtgcctgttattggaacaataaagtcatgttacttcattaggagtccggcctctagattgcgaggcctttaaatggatgatccctccggtgtctggctgcccagttagcccccgttaccagcacccttggtcttcttccacctgtctgcccctccctgttctcccagcttcggaggacgactggaccggctgggcgggtttcgccagccgacccagggatccgaagaagggcgcacccagcctccccgacctaggtgtagacactgcccacccgctgcggctccactctactccacccctgcccgctcgactttaaacctatttccccgccgtagctccgcccctctcccctcagcccgcccctctctgttactggctctcgctcagcgttctcggtggaagtggtttttccgggagagaccacgcttcccctcaagctccccaacggctccgccttcccgccggagcctgacccttcccagagtgcccggcgattccggcgtgcgaggcccttggagggcaaggccccagggcctggcttaggagcgcgagaggcaggctgggaattgtagttcgaaggccctcgagagcggctagagtctggcggccgagaggactagttgtcccagcgtgccctgcgcctcagcccgcgcgctcgcagcttctcgctctcgcctgcctgcccgctcccttgcttgctcgcgctttcgctcgccctctcctcgaggatcgaggggactctgaccacagcctgtggctgggaagggagacagaggcggcggcggctcaggggaaacgaggctgcagtggtggtagtaggaagatgtcgggcgaggacgagcaacaggagcaaactatcgctgaggacctggtcgtgaccaagtataagatggggggcgacatcgccaacagtgagtgcggcctcgggggtcggggaatcaaggctgatagggaaaggtaacaggctggcccggaaggggctggagcggaggggtcatgcggactgagctactgaggggcccgcaccggtccgctgggcacggcgtggtgggaagacccggtgtcgcgcctgggacctgagcgggcaggcccaggctgaagtctatggaggtgcgggtcggcgaccaggatgagcgcagagaggggaccctggcaggctccgacccgaggccgtttgttaggaggcaagacgtgttttctcttgttcctatccttcattcccgattattgcttcctctgattctggcagcggcgaggccacctcgaaaaggaagcgcccagctattggcgacagaagtgcccctctgtttttgtagcgtctccggggcgtcaggagccaagccggcacgtgttgctgggtcccattgcggatggctggcccccttcttactccgctagtgtccctgacaccagcttccccaccaccagcttccccaccacgtgctttgctggagcctttccttctttacttcagctcttaccctggtgggggcccccttctaccttgggccagctaaggagaccgttggagagcactcctggagcttctaatgcaagtcttggagatatatatggcttttcttgaagttactcattactaccacctttccaatctgtgcagatagtcttagttagcattcacatttgttgttctcagtgacttgacaactcaaatgttttggggtctccgtcttatcccaactaggcaagcttgtgaacattactggaaaagggaggactgattttaggattttcacaagtcatccttactccaggtgtgctctgacgatctcagcagttgcctgtcactctaggcagatgccactttctcttttctctctttccagttagcctttccattttattccagttagggagatacaaactgcttgtcattgtgcttttaaatggttttaacagcaaagatggtggggaacaggtatttaggatgcctcccgtcctgtgggtgaaaatctgagttttaccagctttcaaagaatcaccaaaactgagataccaaaagtcaaacctgtgctttatatcacagtggacatttagt

SEQ ID NO: 58154 - DNA, 2159 bp, Homo sapiens
aggtcactgcagcctcgacttcctgggctcgagattcccccacctcagcctcccaaagcgctgggattacaggcatgagccaccgtgcccagcccgctgacgtattttctgaacaaatgatgcattgtagccaggaatctctagtgatattttgcttcgggcatcgtgggggaagaccataatcagctattttattcttgaaatttaggaaaaataattgctctatcttaaacagtgagaaaatattttttgaagtatggcagctttcccgaatccccactttatatcttcctatgttctgaaatcttaggaccttcgatggttccggaatcgaatcaccctgcagcaatttattttagaaaataaggcaaaccggctgggcgcggtggttcatgcttgtaatcccagcactttgagaggccgaggcgggcggatcgcttgagctcaggagttcgagaccagcctgggcaacacagcgaaacctcgtctctactaaaaatacaaaaattagccaagtggcgcgcgcctgttgtcccagctgctcgggaagctgaggcgggagaatcgcttgtattcaggaggcggaaattgcggtgagccgagatcgcgtcactgcactccagcctgggtgacacagtgagatcctgtctcaaaaaagaaaaaaagaaagaaagaaagaaaagaaagaaagaaagaaagaaagaaagaaagaaagaaagaaagaaagaaagaaagaaagaaaagaaggcaaaccagtaaaacaagaatttctgtacagtccgcgcctatccatagcaaaatggaggacttctccagggaactgcaactcccaagaagcaatgcgagggaaggtggcggtcactattttttccccgtctgcacctctaggtccaatattggaaataggtgctgacgtttaaataacacagcgtcctcatactaaatctgggggggaactggtaactcgaaaaccaaatactcggtcttccgaaagaactaactcaacctacccttctacaagagggtccgaaaaccactgttacgcccattgggtagccccgcccttggggggggcaaagggcgtgaaagcggaagtgacgacacccggcgctccattaaatagccgtagacggaacttcgcctttctctcggccttagcgccatttttttgggtgagtgttttttggttcctgcgttgggattccgtgtacaatccatagacatctgacctcggcacttagcatcatcacagcaaactaactgtagcctttctctctttccctgtagaaacctctgcgccatgagagccaaggtgagcggttcctggtagtaagcttgggaggtaggagttggcgagtagtagcgaggagacgaaggcaagtccgccatacctcctgaactactgggtttcaagggtgcccaagagctggtgggagagagaaggtagtttgtgagagagctagcggttaagtgctatgggtagagagggtgggcttagaaaagggtggaattctgatcttatgttgggagggtgtccaagttactgatgtagttgttacgaccaatctttcatacttcttggttaagaatctgtccggttctaaagagtgcatttcatatccttgctaagcctactaataagcttcatcccttttttttttttttttttttaattatctgctgcttgtgatcggttgctagtggaggaagaagcgaatgcgcaggtacgttgagactttgccagcccaggaggagggaagttccttggacaaaacttaggagaaacatttggtttggaaatcttaaaagatctttaggagaaaaacgtttgagtgttttctccctggagccaggatttaacagaacagagaacgatagaaccgtagtgcttgttcattttaccacctcattctttatgtggacgtttgatttaatgtgggagggaaaggcaactctggtttgaggtgtattccattcctgtgtctgcttttcaggctgaagcgcaaaagaagaaagatgaggcagaggtccaagtaaaccgctagcttgttgcaccgtggaggccacaggagcagaaacatggaatgccagacgctggggatgctggtacaagttgtgggactgcatgctactgtctagagcttgtctcaatggatcta

SEQ ID NO: 58155 - DNA, 2562 bp, Homo sapiens
gttttagctgaagaattaaatcatcttgtctattatgttttttatggttccatcgggtgggggttttctgtcattagagtttgccctgtcactacctgtgctatggagggtatcaaagctataaaggcaacagcccgggttacgtggtgtggtttgcatctcgctggagttggatgggatatggtacgtctctggaggcaggttttaggtttcgcgggttattaggggccaatgctggtaccgcccctttccaggagggctgccttggcgactaccgcttagaccatgtcgtgcctttgggttgggttgccatagtgacacgcaaagcgtgctgggaacgccctgcggcatgtcgcacgcgtacttcatacaccatagagtatggttccgggtctgctggctagagcgtcacttcttccgcaggaagcggaagagcgatcgggtaggcggctctttgtcgaagctagaggaccggcaggcggcagcagcaactacggcggcggcggcaggtgagggaggcgggagacttaggtggaggccgcgcccggaggggaggagtcggggccggcccagcggctgggctcggccaggccacagaaggccccccagaaccgagctggctcgtcctcacaccccagggcagtgccccttttctgagtgaccccgcatcgcgagcaaacgccagcttcgtgacgtcacaaccctgcccatcccctcagcttgatgacacctggagctccagctccccgcttcacttcgcgcgcccttagtgtcccattcacgtagcccacggctgagcgccggcggcactgcacggaacctgccaagctagaagacttgctgcgggaaaactcctaggacttctttcgcaaactctagggtgttgggaagcgtcacaatcactgccttcaagtctaatcggccatcccaatgcactgtcagacgctgcctttttgaggttcctcactagccattactaactccagcccttggcggtgctctgaccctcacatcctctttcatcttgaggcagggcgccccgcactctttgttcactcagggctggttttccaacccctcctcccagtccctccgaattagttttactcttcttactggcaacttctcccttggacaggtgaagttcagtttgaaccctgaggaaatcctcacgttctcgaagctttgccgttttgtcagatttcttgtgacaaccaccccatagtcctccactcttactccttcttccacccaagtctctgtttttttcctgctcagaacccagcagtgatgtggaggtggagacccacaggagccccggacttcacctgagctacctcaggtatcaattctgggagagtggggtggggaggagcatcataactaattatctgctgctggtgcgacttgcaacgtgagccaggcttggatagatggcatttgtacttcacctggtcattcccctttactaaaagtttgtatcttcttttaccacttctttccttgattgcttctattattctgggactacctctctttagaggaggaggaccctcttacagattctcttgtaactctggcctctggtttggttagttcattttagggagatctgaaggcaaagtcacagtagtggggtgggggtaggtcaaggccaaaggaattaggaaagattcccttattctcaaagggaacaatatgaagttttcctatttcagcagcagggggagcctgaacaccgcataggaaaggcttgggaggtcagacacgtggtagcagggactccaggtcttactgggggtggagagaggggagggctagaaccagggcagtggactgacattccaaagctctcttgggaaataggagacttaaaaagcttttatggagtctataaataaagaggatctttctgggttgaggaatggtgtggttggatgtcagtgggatcttcacataggggagtaggaagggggtggggaatggggaaaggtcacttgttcctgtgaaattaactccttcccacttgaccttatcacaaatggtttgtcctaggaaatctagaagtggagactctaacttagaactcctatcctgaaatagaaggggcttacctctctgccgttgacagtgatgatggctgggagggaatactaaaatatgacaggttttgagactcccctcaagctggtgacaccagtctcttcacccaggatttcttggcttctagagatttgatgtgtacagagcccttacctgaggaaaaggaaagggggttaaggaagttttgttaccagtgtcccatcttctacagccctagtagctcagtagcccatcttgggcactattcccagtttccttccagactattcagatactgactgcagttttaatttcacttccacaactttaataaggtcagctcaaaaggaaagatgaattccaacactattttttccctgctccgtcctgggcctatccctcctccgttagccaggcaagtgtgaatcattctgacccagaccaggtgcacaaaaccctgggaggggcttttgatgagtc

SEQ ID NO: 58156 - DNA, 901 bp, Homo sapiens
aggtccctatctgccgtgactttctcaagggtgactgtcagagaggagccaagtgcaagttccgtcacctgcaacgggattttgagtttgatgctcggggtggaggaggcactggtgggggctcaacaggctcagtcctcccaggacgacgtcatgatctctatgatatctatgaccttcctgacaggggctttgaggaccatgagccaggcccaaaacgccggcgaggtggatgctgcccccctgatggccctcattttgagtcatatgaatatagtttggctccaccgcgaggggtggagtgcagactgctagaggaggagaatgccatgctcaggaagcgggtagaggagttaaagaagcaggtcagcaacctgctggccaccaatgaggtactactggaacaaaatgctcagttccgcaatcaggccaaggtcataaccctgagctccactgcaccagcgactgagcagactctggcccccactgtgggcactgttgccacttttaaccatggcattgcccagactcacactactctcagcagccaggctctacagcctcgtccagtgtcccagcaagaactggtggcccctgctggagctccagctgctcccccaactaatgctgcacctcctgctgctccaccacccccacccccacacttgaccccagagatcacgccactgtcagctgccctggctcaaacaattgcccagggaatggcacctccacctgtctccatggctcctgtggctgtatctgtggctcctgtggcccctgtggctgtatcgatggcccaacccttggcaggaatcacaatgagccacaccaccactcccatggtgacttaccctatcgcttcccagagcatgcgcatcacggccatgccacactgatg

SEQ ID NO: 58157 - DNA, 658 bp, Homo sapiens
ggggtttcgccatgttggccaggctggtcttgaactcctgacctcaggtgatccaactgcctcggccttccaaagtgctgggattacaggcatgagccaccgcgactggcttggcagtaacttttgaggaataaagaatacagaaggagtttcctcaaatcttgttgcccttcccatctttgtgagctgagatcagagtaccgtatctcaccctctgcctcttggaggtgattatggtttacatataaatgcagattgcaagtccaggaagtttactctctctcctcctgtaggcctcatcctgtaagacacttcctctaacaaatgggcatcccttcctgttgtccacttactgcttatcaccaccaggtggcacctgggcagcagaattgtcagtgggcggggacccaccctgtttacttgtgttggtaactgcattgcagctgctgatcctgtggctcctgggccccagctgggacaagaacttcctgaggatgaagttttatcccctatataatttctgatgatctggatgaggtgaggaagggagaagtttggaaaagaacctccataggtcaccctctccattcccccattctcaggaacctccttgcctactccagtgcttggcaaatttcagtttatagagaggtttctc

SEQ ID NO: 58158 - DNA, 1955 bp, Homo sapiens
aggcaggaaaaagttgaaggataaggaatgtgcttagagtatgaaaactagagaaagtcggcaaaagaacatatatatatatcccagaccaaatcctgccaaaccgaatgagtagagggaaatcctgaagctccacaacccctcaacttcgcaacttgggctttctccaaaaccaagaaattggcggtgcagctctgcatgacgtcataccacaggcactccaatcccacgtgggggagctcttggtcccgcctctcctgaaatggtgcgccacgcctcctcctctttattaccaatcgaatgccgcccctgagcccctttcttccttttcccgccatctcagacctcccatcttggccttcgggcccaatcagggaggccctacctatccgaaacccggtccgttccccgcggaagaggggtggagtttcaaccttttaactccaccttggtctgtgcagcgcggaccaacccaaatcgccagaaaggaggggcgtggcttgaagtcccctcctccatcccggggatcacgttttgcctgggggagctgatcgcaagactaggcaacctccagccagtccctgggtcgggcggatcctcccagaggtggcacaatggagcgatctccaggagagggccccagccccagccccatggaccagccctctgctccctccgaccccactgaccagccccccgctgctcacgcaaagccagacccaggttctgggggccaacctgctggccctggcgcggcgggtgaggccctggcggtgctgacttcattcgggaggcggttgctggtgctgatacctgtgtatttggccggggcagtgggactcagcgtgggtttcgtgctcttcggcctcgccctctacctgggctggcgccgggtccgcgacgagaaagaacggagccttcgagcagcgaggcagctactggacgacgaggagcagctcactgcgaaaactctctatatgagtcatcgagagctacctgcctgggtgagcgaccaccctcggtcctctgtgcagcatagcccccttccaccccttccatctggggcttttcctccttatgcctagagtcagctccctgccttgggacagtgggccccagactttcccctctctccccgctagccgcctgcctgctggacgcgccactcttggaaccgactgctcactctccccacccaccctttcgcatgcccagactggatccttccacagaatcaggacttcttcctctacttgggcaacagcagtaataacatctggggaccccgtctcagccgaagctctccctcctagccaagccatcttgaacgtccctcttgcttttggtgccactcgcggctttgctgctcctggaaatcctggtcccgttacctctcaaaggtttccctagtctttcccatcctcctcgagactttttacctacttaaagccatacggttctctcttttctcgcttttatccccgggtacccgctaggacccagccccggcccctggacgaccctcgggcagccaccttcaagcctccagccgccagactgcagcgcggcagaggcggctgctggacggagggagggctacgggaggaggtggtgcggctgctgcagtgcccgcggcgcacactcccccgcactcctcggccggccacacccttttccggactgtgggctgcgcttgttccgttggggcagagacccttatttctgcggcggccgcgtctcctgtgctgaggcggatgccttctctctagtcttgcagaggcgaagccggttacccggcccctcccagcagaggtgccagtctagggggagaatggcagcagagaggaatcaaaattgacactagacagacacagccaagcttcccaggccctggactggaaaggggaggagaaagagggccaaatggctctaggggacctgtagcctaggcagca

SEQ ID NO: 58159 - DNA, 527 bp, Homo sapiens
agataattcacatatataatcaccctatgcccagttaagaccatgtttcgtccagttcctgttatttatgatcaagacagggatggcacagaaaatgaaggatagccttcccatctctgcaagggtcttaacgttttttccctgtactacttctctatagaaaatgctagaaagtcagatgatgccataaccactcatacttggcaaaatgccaaaaatgggaaaaggaaagaaaaaaaattacaagagccatattttgaaatcaatgtctgcaaaagtaatgaaagccacacaaaggcatctataatgtggccctttcccagtcttataaccacttaaaaatgtattccttcttcctctccgtctcttcacaacacctattgatccttacttcattgatgtaaaatggggaaaatatcagcgacctcataccttgggaagattaaaggaaagttatttaacaaaaacttatacagcacttatgctgtgccaggcctattctattttacacttttttttttttttga

SEQ ID NO: 58160 - DNA, 1367 bp, Homo sapiens
tccacttgagcaccctctgagataatttagccccttcaccggtacgagatctatggcggcctccagaaatggttgctaacttactattatcgttatttctgtcgtacaattcatttctacctttccaataaactttccccaaccagtgaacctcacttactgcccataaagttcacctgtgcctcaccaccctgccatcgcccgagttttctgctctgatctaatcctcacacgcctgtgcagcaccagcttccaacaccaggtgcaccgccagggtatttactgatccagtgagtgaaggtgggcccggccgggctggttcccatcctctgatcaacgcctaggggaaccagtgaactccaatgctgaccataagagtttcagaaagtagggctggaaagcccagccctccgctcagagacctgtgaagatcgaggaggatggcgcatatgctgccgcaggatggaaacctcgatcagagaaggctggggcaggtgactgggcttaattgcaaattttaacatttacttcagcaaccagctcattaaaaacaaactactctgaggcctcttttttttctaccaaaccgcgagaggaagcaaaagagagtgcagcggttctccccggggccgttaagtgcttccagctatctgacctccacgctgcctgctgcagcctcaatctttccccaggttctgagttctttcagcagtaggtccaggaaaacagccgccccgccccctccacctcccgagactaggagcccgccagggttaagtaggagggataccctaggggccccgcagggtttttagggttggggtggattggaaattgttcattgcctttcagttccgggacataaagcgcgctggaaggacactgagtcaccaaccaccgccatgggccggaagccaccgccctcgcgtcaactgcaatctagagcgcggcgcatcccgtgagcccgcggggaactacgactcccggcatgctccgcggccaccggaattaacccttcagggctgggggccgcgctatgccccgccccctccccagccccagacacggaccccgcagggtgagtttttgggggctgaggagggccattttctttaagatttagtgggggtgcgtgagtgtgtgtgtgtgtgtgtgtgtcgtgtgtgtgtgatgtattttgtaaaaatgggacaatttgcagtcatgagattcagacgctgttttgcgaatgggagacccagcatcaaccccggggcctaagtggaatcactgctatcttcctcagaatgctacctaaatcctttcctaatttaccccagaacaaaagtagcctgcaatccctccccactcccaaacgccccccaact

SEQ ID NO: 58161 - DNA, 2853 bp, Homo sapiens
agcagcctgcccaacatggcgaaacctcgtctctaccaaaaatacaaaaaattagccgggcgcctgtaatcccagctactcgggagggtgaggcaggagaatcgcgtgaacacgggaggcggaggttgcagtgagccgagatcgctccgctccactgcactccagcctgagcgacaggagcgaaactccgtctcaaaaaaaaaaaggaaaagcgtggcctgggtgagtgaaggagggaaaggagggcctcagacgttgtgtctgggattcaggagagaagatgactgaggaggaggtggagaccgttctggcaggacacgaggacagcaacggctgcatcaactacgagggtgaggggacaaaaaagcgggagcggggccgagggaggagggcagcctggcgtcttgccgcgtgtgggcgggggcacccctggattacctagagtcagatgtattatccaaaggcctgcttctgaagcccctcttgcctcctctctctgcagccttcttgaaacacatcctaagcgtctgagtgctgcaggtagggccctcccaccccttcgccgcgccttacgaggcaagtctcccgcccttctctcagccaacatagaaaagcagcggagttcattctgctgtccggttgctgcacgggctccagcgcttcgcaactttggtttttttccacagatccagtggggtccggacactgggccccgcaggcgaaagcacgttccagccaccaggaggccacctattgtttcaaaataaagactgggttcctctcttggtttcagactgctatttttttcatggttgggggagcagcgggagacggggagggtgctaggaggagagggcgggaaaagagggctctctcctcttccaatcctctgatcttcctgctgttgggaggtgcagattcattgtgccccagcccacgtccccccacgacccccgcccccccacctccccccacgaccccccccacctccgagcgggttctgtgcccaggtggcgctggagaaaggaacagcggaccccgcccaagtcattactaatgtagcaatcgtctgcataaacccaggccacggttcctattggctgagtcctctgagggtgacgtcatcgggacgtactaagactagggttgggccgagagtcggagccattactgcaggaaaaggtcccggagagctgagcagtcaagatggtggggcccaggtcttgggagacgggcaggattggggacgagaggcaggaagagacgggtggggggcgaggagaaggcaggggtaggaggcaaagggaatctgaggacccgaaaggttggaggtggggttggaaagactggggccctgcggggaagcgagtctgcagcctgaaacaggagtttgtgggtcagagtttgtgggtcagagtttgtggggctgggatagaaactcgggggattggcgttcagatgctgaccacttccctcttctctgagcagtgtgacttcaccgaagaccagaccgcaggtaggttatctctgatccctaccgaggtcacccttagggagagggacaccctccccccagcacctatcctctaatcttaatctgtcatctctttagcacccccatgagattaccccctggattattttctcttcttctggatcctccattttcttttctcactttcttcctccctccccttccactctagatctgatcccaagcactgggtgagttttaggtggtgtgggtatgtgaaaaaacttggtcacttaatgcctgctgtgtgtggggtctcgggagggtgtataaagctgcctgctttcctttgtcctttaatcagctacttctgcctcttttctcctcttgtgataactgtccccgccctcccagcttgcagttgtgaagattgtagagcagtgacctgatattctgtgcagatggggacaagacaggggagtttgctaaggatatgactgtagctataccctctggaagttctctttatactggaggggtgcgaagtggcaggttgggatgaccctagtcccaggctgctgctcccacttccttataaggacaggactgagactgggcggtggcgaattcctgccctgagaagtgtagtagcagcagtggagattggcaggcctgccgcaggcagaggggttgtgtaaatggatgttaccaggctgccagaaggggaggaagcctctatatagaacacttgagttgggaggaagagaaatagagccctcttaagtagactttggtgtacagtttggtgcagatatctcgtttcctcagcatgatcaaagttgaatgggcagcagagctctgaggtagggtttggattaaccctcaaatcctgtgttgacattcatctgaatcctcagagttcaaggaggccttccagctgtttgaccgaacaggtgatggcaagatcctgtacagccagtgtggggatgtgatgagggccctgggccagaaccctaccaacgccgaggtgctcaaggtcctggggaaccccaagagtgatggtgaggggcctaaagaacaactcctcagtgtggtcatgggcccacagttcttcagctaagagcttccctttatcttcataggccccaaactcaagcaagtctggattagcaaatcccatggatttccttgcttttagtggggagtcatctgtcatctctctgttcagttgaggtctctataatcccctgtcctgagaacttgtgttacttctctggcctgacacttccacctcctttatggcagagatgaatgtgaaggtgctggactttgagcactttctgcccatgctgcagacagtggccaagaacaaggaccag

SEQ ID NO: 58162 - DNA, 2471 bp, Homo sapiens
gggtttgggtgtgaggggctagagataggaagctcaccctaacctctcgaccccaaacccagggtactgcaaagctaggttgcaaggtgacttcattgtaaaatcgaggaaaggtttcggaaggggccgctacccaggaactcctataccccggctccctgagagattctgttgccccttagatgaaggtgggggatgagcggcggagacaggtgatccctgggtggagacctttttcaggctgatgagcagccaacggcttgctctgtgactgtttaccctcctgctttccattctctctctctgaacatacacaaagcaccggagaggcctcagccccgctggtacctggctccgtggggagctctggcgggcacgctccgggttgcgggggagcccattgggcacccggtccacacccggccggccgcctctcccagaaaagccaggagggcgatggctgaggggaaggtgggctaatggcaccggggcccgccgggcagtagagaaaaacaaggggcagagggcgcagcagtgggggcgggggctgggctcagaggctgggggtgcggggagagggaggctgggggaggggcgcgggagcgcaggagggcgcgcggggggctgcttgggaggccgcgggggaggggctggggcgcctggagggtaggcaggatcccggggctgcagggccgcggtccctttgtcccgcccccggtccccgcgcggcccggcccggcccgcgtaccttcttgtagttcttgccgagccacagccgcacgttgtcgaactgggtcacggtgtccgcggcctcgtagtacttcacgttggggccgccgtccttcttccgcaccgccatcttctccggctcgggccccgccgccgcccgccccactcagctcagctcccgcctcctccgcctcctcctccgcccgcctcccgccgcctcccgccgccgcggccgccgcctcccgccgcctgggccggccccggtccgcgctgcgccccctgccggcaggccgggcgcggcggcggagctccaggcgcgggccgaccctggcggcctccccggcagcggaggcgggagcctccggggagaaggacgcttcctggagggggcgccattctcctgagatcgctcttaccagacgcgaagccctttccctctttttgcctcagctcgggagtgtcacctcgctatcccactccaggcggccgccagtcgctggagcagccccaacccgtagacccgagtggtcctcaccttgcgcattcctaacccgacgaagcccctcgtcccccaaaaccccaaacccctttccccaagaagttccttccttccatccattcacagcagctccccatttaaacttttcagagtctccctcactcctcgcgccttgtccacccagcactcccctcacttgttaacccaaatgtcccctagtcgccaccctggcggcccagtgccttccctcaactgcttcctccgcaggcctcgctgtcgcctcctaagtaggtgtgagctcctactcgagaccccgactcttcgctaggcaggagaccctccctccctgggtcacccagtccatccgactctttttctttgggtggcgtagataggaggtaaggaaccgaggggtggggagtcctcaggtgtgtgtgtgtcggggccggtaccctgcttccggttcccgcacgcattcccggattgcagtgcggaccccttctgtaagcgcgcgataaagcgcggttttggaagtcacggtggccgagtggttaaggcgttggactcgaaatccaatggggtttccccgcacaggttcgaatcctgttcgtgacgggttttttttttttttctttcttcttcttattattaaaagggagtctcgctctgttgctcaggctggagtgcagtggcgcgatctcggctcaccgcaacctccgcttcccgggttcaagcaattctcctgccttagcttcccgagtagctgggaccacaggcatgcgtcaccatacctggctaatttttgtatttttagtagagacaggttcaccatattggccaggctggtctcaaactcctgacctcaggttatctgcccgcctcggcctcccaaaatgctgggattacaggcgtcgacttttttaacccctttcacagcacataaaggtaaccccagttctcacacgtttctttcgtgcactttctctctccaaaagggaagccgccaaaaggtcttaacccctggatttgggaggatgggagtgatcttgggaagtttaattatgcacgactgtattggctgctagactgtgaggcattttcagaattttgtaacttcaggcttcctgggagagctttggcacatgtctcattcttttgagggcatagggaaggatttggttgaagggttacattttgggaatgtgagtggctgttttgcaatattagtcaaacttagagtttc

SEQ ID NO: 58163 - DNA, 2102 bp, Homo sapiens
cactacattcttatttggggcaaaactatcagccaacaacactatcagtctcttgccctattgtcagactctaaaacccctgtatagaaagggataacactatcacgggccagtccccaagaacagtggcctcaataacagccccacttgctattaaatgaaatgaagtttctgaacggggaagcagtctgtcaatccctcaagcaaaacgccttcacccctcctggctttctgctcttcctctagccccctcctccccactacccaatttcccaaagtcctgagttagggaaggccttccagtgtgtggtgtgtgaaccctgccagagagccaggctgcaaaccaagcgcagggatgtgaagaatgtgagattccttcatggagggctgggagggggtgaggagcggggaaggaatgagaggacaaggctgccaacgacaaggcatgggagaggagccaagctatggcgcttcgagggcgggggtttaggttccaccgcccctgcccaggctggcccccggaatgctcccttcctccccttctggcccgtcaatcattgcccatttaaacaccacgctgttcccccagttctgcaggtgccggtcctccagctagccccggccccctcccgcacttctcaaagctcccctattccaatggaccttccccaacaacccgttctccagagcccccttctcacctcccgactcctcgccagtgctgctcccttctcacatttttatctctaccaccatccctcctcctgaaccccagttatttcaaccccccgccccaatacccctgggacatcacctcctcccctcccacaccctcttttaggtggaagatcgcgcaggcgcagtacgcaccgccctggaagcggcctggagtctccgcaacctgacccagtcggagctgaggccgcagcggccacagtactgccctggtgccgggtcccagcctctcccgggaagggaagggaaaggggaaggaggggaaagaagactcctaccactcgtcgccgcctcagacggatcctttgccccgcccaccgctgctacgcaacccggcggaagctcgtcaccaaaccccgcctctttgtttaactcagcccctacaccagcagccaggagctgcctacgaggagggacgaaggctggccaggcctccactctagacaggaagtctagtctagagtctatatggtcccagccaggactatgtagccatttaggagggagaactctatgttcttcccggcaaaaacgtgtgggcctggccggccacgcttcgctttggaggggtgcaggtgacttgtgtcttagagctgacgcagattgttgcgagatcattgcggagaggcaggcctgcagcgtgacctgctgcgggtccggcccctctcccttttccagagccctggtcagcatcccagagcttcgtaaccccttgactcctgtcatgggaatggatattgcagttaacaaggcggccgcggggtggggagtgagggagtctgaccgcaaagcttagatctggggtgctcaacgggttgtctgcctctctcccaggcgctctcctgccgtatccacgatggctccccgaacacttgtggagttccctgaaacacctaagaggaaggaagggagaaaaaatttccctcttcctgagttggggtttgatttccttagcttacaacaccgtggtgttggggatgtgggcggtagagaacgtgggatccaagggaagtcaatgtggagcctaaagagctccgtgagcagataagggattaattaagcaaaccaaggcattacaatcacatgacttcctagactaatctggtattaaatagtatggtatttattgtggacattggctaagcaaatgctaatgcacattaatacacacatacacacatatctttatgtaatttgtttatacacaacaatacagagctagctaccttttgtggacaatttgacaggtcccaaaaggaactaaagtttcaggcctcctttctgctgtcttctagcgggactctgagataagtaagataagagtagtatggccgggcgcggtggttcatgcctttaatcccaacact

SEQ ID NO: 58164 - DNA, 1232 bp, Homo sapiens
caggcgtgagccaccgcgccttgcggaattggaattacatatgtttaaatagtcgagaaatgaagtgaagcattgagccaggattcaaacttttgtccgccagattccgaagcccttgctccttttcccattgtgtcactctttggaaagaaacgtcttagaacctaagtgcattctccctagccaagttaaggaaaactgggggccctgtgcgccttctagtggtggatttttccccctacagagccaactatctccaaggttcctttaatacctgaaattcgcccccttcgcggcgcacgagtctctgatcccgattggctgggcagggcaggcggcgggacgcagggcgcgcccgggcggtgctgattggccggaggaggccagccgggggaaacttccgggaatgtccgcactcccgcgttccacggggcagcatccggcggcagcggagcctgtggctccccctgcgggctgctcagcggcgtgcacagtcctgccggctggcttgggtgggtggtgggctgcgggtaggggaggggatggaccgagtcccggcttgtcgggatgagggttccggaagatctggccagtaagattctactccctggctgtgcaccgggttccctacccctgtctacgtcggctccgccacttcgcggcttgagactaaaagagcatcccggcagggggccttccagccccaaagcagcctgtccagagacccccaaattctgatcctgaagttggaggcctccggggatgttcttttttaatcttttagaagggttagaggggttgaggctgcctgaccccagcctaatggggtaggtaggccttgggaagtggagcatgggggcaaaggatccaagcattgagccttcatcctctattccccatccagtggggtgccgaggctcaggcagcatgacgacggagacctttgtgaaggatatcaagcctgggctcaagaatctgaaccttatcttcattgtgctggagacaggtgtctatactggggtggcgggttcgcgggatgggggtcgggggcaggaggggaagaacgctgtctgcgttcttaacttgctatggggatggcaaggcaagctgcaagacactcctcactcccaatctcttcgaccctgggacagaaagttgcagtcaggtatagggtagatagaactcttgccagatctagacctcctgtgcgacgcgggcctctttccactcag

SEQ ID NO: 58165 - DNA, 1251 bp, Homo sapiens
actctactctgtgttggactcctttgctttctgtgggaaaaggaagaggttagcaactaggcatttgggaaggtggggtgtccctagaaggtggaaggaaaataggttacaggtaaggaggcccaggcaaagcagacctgcccctttaaggtagtgtccctcccctaccccctccctgcaggtgacccttgcccgcctgcctgcctgcccccccagctggaaccaagaaggttgtgtcccccttcctctgggtgtccttgtctcctgctatcaggtaatgccaacctcaaccccctggaccagtcaccccgatcagactttgcttgcctgattttaggccaggtcagacatcagaggagagcccagatccttgtttcctctccccccgcagggcttcccctttcttggtcatcgatccctagagctctggctctttctcttcttggggtgagaaactgctaagaacagtttatttcccatgcatgcatctgggcttgccactgatctgccttttcccccctcctccccaggttagggacacctgggtccaaccttcccaaggaatatggggatgggggttggagatgaagtttagtgctagactgtaaggtaggtggggtggaagtacatgagggaaagggctaaaatggtactaatggtgttaaggatagggtgaattatttaagaggaaaaagactaggcccaggttctccttagccatgtggctttcccagggcagagggtggcccctccctacccaggggcccagcagagactgacttttgatccctaccccagagaccagtgaaccattaactcctctcttatgtgagccttcacacactggccccacccctgaccccgccccaaggcaggtgggctaggagggggtgcatgtccatctcagccttctatgtgacgtggcctccgatccacctggacacctggaggctaagcctggattcccccttccctgactcaggaactgcttaacgtctacagcaaggcctaataggggacctgaggtgacagctcttatgttgccagtaggggtgaggccctggggattgaggggggataaagaggtggggcaaagttgaggggtggggtttaggggacaaggaatggacggtcagctctggatgaagtatgaggagagctctgactcagggaggtgctccaggaaccagcaaacaagaggctgctcccgcaggaggcagtgtgaagggagaaagaaggctgcagtagggg

SEQ ID NO: 58166 - DNA, 1588 bp, Homo sapiens
ggcattcccagcccaagtgatctgggcttcaagcctgacctgctctccatccccaaatgcagagtaggctttcactccaggatggaaagaactgcggcctcatctgagcagaggagacacggagccgccccaccggtggggaggggtccagaacacgggagccaggattccggtctcgccatcctccctgctcccaactcaccagcacattgatgttctccttctgcgagagtagggaacgcacttcctccacatctcggctaaagatggcctggaccaggggcggctgcagagagaaccggcattctgagagcgggctggagccggagcggaaccggtgtgggggtgggggtgggggagcacctaggtttgagtggggggcgtccgtggaggggctccactctagggattctggctggagcgagctcccgcggtgcctccgccggttgccaggtccccaaggacaccggctcggttgaggggagcgcggcatggggcggggcgggagctgcgggagccccgggctcaggcccagcctaggccgcacatccccgggctcgcgtgacggcagcgccgagccctggaaggaggaagcgggaaagggcaggagggctgacctggtccgtgatgctgaggatccccatggctcggcccgggctccgtccgcatcgagctcccggcggcggcggcggcggctccaccggggacacggagcggcccaggcggcggctgcggtggcggctgcagggagagcgcggccccgcctaccggggggcgggcgagttggaggccgcagcgctccctggcggccgtcctggtcccggcgctccccgcgcaaacggaccccggccgcagcgccctccgccccaccctggcggccccagcagcccctgcacccccgaactcgcgcgccggctccccggctcacgcagctggccgcgctgtgctctccgctccagtctggcggcccaaggggttccccacaagaccctagcggaaacctgggccttagtcccgcggtgcttcccaaactgaggaccgaacggctggccagatcttacccagcccacaatgctcccgcccgagctaactcctcccgtcagcgattccacaccccgaaatcccccacagactaggaggaactggcgggtggagaactgggaattatgtatggcaatagccccagagggagggaaagcgtgtatctccactggcggaggcgtgagttcggtagagaagaaatagcaaaagtgctcaaactgcagagaaaccccaaggaggattctactgcagaaaacacccacaaagaggccatgacaactggcagctggaaaaggccgccaagaccaacagaaggggcattttccaactccttactgattccattgcaaggttaaagtggaaaacactcaacaatttctccccagaacagcctgtggcgcttcccctcctccaatggagaggccagagagccgtcaattagagaagaaatgaatggaggtcatctcaacccagaaacggaaaaaggaggaagacgaaaagtggagattgaaaaattgatacaatttataaaaggtgatccagggtc

SEQ ID NO: 58167 - DNA, 638 bp, Homo sapiens
ttgaaggaagggttcagtcaagagggtcttcctggaggaggtgtgttttgagtcagtacttgaaggaagttattgatgtagaatggtggagacatgggaagaaatcggttgtttcaagtatagggactaaactaggaaagtttaaatggcagtaattagttaaaccaattagtaggggacagtaagcaaattggcttggtaggcctgttggaccttggggattctgtagcagtcaacttggttaaggcagagtgataatgaggtcacagttcagttatgtatccctgttaatttctgtcttttaaccaaccagatccttactcctcattcaaagcagctgtctcacatgtataagcccttagtcagaggcgggtggggctggacaagacagtggaattcgaaagagtaaatctgtcctttaaggtcatgtgcccatctgaaggtggctccagattaccatttgtgaactggaaggaggcactgtactacagtagtggaaaggaggactgggggatgtggacattttaacagactctctctggagtgcagaggcgaaaagaagagatgttaggaaagaaaataagtgagatcatcacccaacttggggtatcacggaagaggataaacggaaaggtggc

SEQ ID NO: 58168 - DNA, 1835 bp, Homo sapiens
aataaataaataaataaataaaagtaaaagtaggtggaagaagctgacttgctgaagtcttccggccttcgtctttctctcatgctggatgcttcctgccctcgaacatcagactccaagttcttcagcttttggactcttggacttacaccagtggtttgccaagggctctcggggctttggccacagactgaaggctgcactgccggcttccctacttttgaggttttgggccttggactgatccaccactggcctccttgctcctcaacttgcagacggcctaatgtgagactttaccttgtgatcctgtgaggcaattcttaataaactccctttcatatatacatttatcctattcactatgtccctctagagaacctaaggctctaacagcgacgttcagaggatctacagatatctgcggtagacacgcccacgaagtcgcctctgtgcctacctatcgggtcctgtgaccacaggcgacctcagtccccgaaccatctttgcagcttctcaaacgcacaccccagtgccctttctcgccacaggtgtgaaactacatctcccgacaggcggcgttgtccccttccttccttccttcctctcccaggcccgagccatggcaacagcgtgacgtgggggtaccgagatctgcgggagcagcggtcccggcttcagttctagcctacccggcagcctggacgggagcaaggcgagaggtgctgccgcctcccgtcgcccctgcgctcagaggtcccgaaccagcccagccgctgcctcttgccgctccgcctttggagtgaggagggcgcagcccgcgtcagaacttagagggccaggcagggtcgcgcgcatggcctgggcgggctcgcggcgggtcccagctgggacgcgcgcggcagccgagcgctgctgccggctctcgctcagcccgggcgcgcaaccggccccgcccccaggccctctgccaccgccgcgaccaatgaggtgagagggaggtgaccgcggctgagggcagggggtcgctgcgaaccccggggttccgcggtggaggggtgctatactgggatgcaggcgcggcggggactggcagcaatcatgccctgggagctaacgtagagctttggataatgcttttgcaagttgtacgagaagggaagttctcggggtgagtgtccaacctcttcttggccctcgcgggcgccctggggtccccggggacagtgatgcttccttaaagtcttagctttcagcagtagtgtaggcccagtcaaaggcaactggcgcttcccacacacccctttttctcatccccctcaccccgcccccagccctgtccttagctgccctcgaccttttgcactcgtgactccctggccagagagagcctagcgggctgcagcaggtgctggggggaaagcttgtttggacgaccttcgtctgggatgcactcttcttctccttcacctacaaatgatagaggattacgaagaactatacggttggctcctctttcctttggccttaggtttctgacctcctgcagcctcctcttgcctcgggctgcccagatcttggcggctgaggctggcttaccttcgagccgttccttcatgggatttgctgctcccttcaccaacaagcgaaaggcttactcggagcgtagaatcatggggtaagcattctctgccttgcatccttgcacctcccttttccctccaaataaccctgtccaggcaagaatgtcagggtatcatcggtgggcaagattcatccctagccatccccctccccagctacaatactgatcctcagtcctcccctgccactct

SEQ ID NO: 58169 - DNA, 749 bp, Homo sapiens
ctaaaaaaataaaaataaaaatggctgggcacggtggttcacatgccatttcactccagcctgggtgacacagcgagactccatctcaaaaaaataaataaataaataaaatgaaaaacaaaatattaagattatatgaccttttgtacctgctaatgtgtgcaggtacaaatatacacattcataccacctaaagtgtttataaataagcctttataaataaatgctttatgtggtgtgaatgtgtatattttgcatcattctgataccaactccccaatgccaaccaagttaatatcaattttaaatgctctctgtcttcctcaactgcaaacacaattctctacacacagttggtgccaaattaatattgaccaactaaatcaatctagatttgccaaggacccaaggtggttgcatcagagcagtgggtcatgctcttctgtgtcttgcaccacagtgaactctttagggccttcctggtggctggcacctcctggccaaaaatcatttaatgtacctgctttgtaaaaagaaaattttctgttcctatactacctatctccaaataaggaacaaaagaaaatggtacattctcctgtaaacctagccagatcatttgtacttttacccagtgtttctgagtttgtggggtactagaagaggatggaaggaattatgtactatgcattgggataagaaacaatctttccataccccaaccagcgttgtaaactattaaggacact

SEQ ID NO: 58170 - DNA, 663 bp, Homo sapiens
ttttttaacaggcatcaaggaaaagataccagttttctttttaagggcttcttgaccaagaagggaggcatctcagggagaggaaacaaatttaactaaccctgatggccaccagcagagcaaatgactctagacaggaggtgcttgaggactgtaacatcaaaggctacatttcatttcctctaccccgtggctgccaaagaaagctgctgaatggctctgaacagtacattcaggttatgttcattgatgagacaggtagattacaaacctctgaatcatccctgaacttctacctcccagattctcccctaatcctggaggtgtgacagttgggcttttggcttctggatgcatgccacctgtagagtcaccttactggaacagcagctctcaggagaatcaggcagtcatctcactcaataggtcagctccttcatggggagagatggagagggctacttccaaagacaagggcctggctcacaatgtctgacagccagtattctctatagggtggaggtggcgttatcacaatcacgaagaggtttttcccccacaatcactaagagctcatttgttgccaccccttacaagaactcctctagtgagtcagctattattgatagaggtgggctgtagccctcaaatgtggtaagatga

SEQ ID NO: 58171 - DNA, 2441 bp, Homo sapiens
ggactgtcccctgcttggattagagggctgggactccctcagcacagcagtttctgtctaaaagggccaagttacttagaactaaaagtactgcaatttgaaattgaaggcatcattacctgcaacagtatttctatgtcccaaaaggcaatcaataccaagtaaaggaccccaaagaaggagagaaagttcctggataaagtagacttaagatcaacggcataacctgggtaagcaagtagtatgacggtcatgtgaccttggcattagtatctcttgccgaggatcttcatttattggcttgcagtttggtggaaacacctttctggttctttctgcaatcatgtatgatagtcatgcaggaggttgtacagaagtgctccaccccacccaagctcctcctatataaaaagtgcaagagtcccaaggacaaagaggagggcctgaaggacccactcttgtgctcggcgtggtcaccgaaggcttaaataataggcttggagaaatggaaacaggcagttcgggaactgacaaggcccttcctacaaagcagaggacgaaattagccactgctccagagtgagcacatatcttcactcccgctccctccaccaaactgactgtaactccagtggaacaccacatctctagtctctaccagaggttcctgtctcggctccttgctatttcagggccacgcatcccttcccctttcatttcagacatgcggggtgacagcagggtcggcctcctcacgcgttctggactgcgggccgagggcgggcggcgtgcacttcacccccaggagccagaagggaagcgcggcacatggtcctgtagcttcacgcagggctggcggccagccaagcgcagggccctttaaggcgcgcagggtgcgcacgggtgtgggagggagaccccggcgccggagggcctgcggtcgcctcagccccaccctgggacggcgtgctccctcccctcgctgctcaccttggttcccaagagccgggcggccgcagtaagtaaagccatggcgggcgatctccgggatctggtggggaggtaagaaagggagagagctgcggcaggaacaggagccgccgccgctgcaccagaggccgcgccgacgggttgacaaggttgaaaggaggcggctgaaggaaagagtagacgaaccggcggcggcgcccagcccggggtcctcaaggaggccccgcccactggccggaacccgagcccgcccctctcaagggactctccccgggcccggccattggtccggtatggaagcggggcgggaccttagcccttgacagcagttgtgacggggaggattggaccgcccggattagggctaattaagggtggatgggtggcgggcggggaagtgcgggtggctaaataggtgcctgataactcagttaacttccctcttggcttttccctttgaccttaacacttttggggttatctctgaggcgaatgctaaaggagacgctccaggactcgacctctgaaggtccttggagccaattccgtaatatgatcatggaaactgatcattgcctgatccttctaccgccttggcgcgctttcttgaggaatgtctttggttaatggcttcacggccatggaggtgacatcatgtggacaacaggctaggatgccagagttagctgctcggtggagatcatttgaggtcagcagaggccacgatattatagatactaacagaccccgatatggggagaaaagcaaaagcaggagcctgaatatccagtgctttgtgagctgtcagttctgtgtgtaatggcaggaaatccaagtcttaactgcgcccttactatgaaggctttccgagccagccacagcttctgggtcatgggcattagtctcactgccactctggtcacgtaaccccacacagcagctcaccccactttagccacagattaggagccgcagactagcccctcatcgaagatcccctttggtcacattctctagggcctctgggccacttctcctacttggcagtcttctatgctctcttatcttgtgctccccagagaccatgacacgaccctgaagtgatattccgcaccactttctaaatcctctgggtagacgaggcttcaggacttttgtgcctccctaagcctgtcgtagtcattgaccccaaggacaagagcatcttatctacaaacctccagccccaagtgaaaagccttttttttttttggagacagatcttgctctgtagctgaggctggattgcagtggtgcgatctcagcctcctgagtagctgggattataggcgcccgccaccacgcccagctaatttttgtattcttagtagagatggggttttgccatgttggtcagactggtctcgaaatcctgacctcaggtgatccacccgcctcgggctcccaaagta

SEQ ID NO: 58172 - DNA, 1154 bp, Homo sapiens
tctcctttacaaagaaccgagtttctagcttggacttggaaaaagagatagaaaacccctattttctcttcttaattttctttatactcagcttcacacctaacaaccaatgctcttctggcctggggatcagatagttaggtctcaggaaaaaactttaggcaatgctccagaggagcactgacctcagctacctttgaagaccccggtgacttcaaagcttcactgatcaatatttgctccccatttagcatctcataaaggatttccacataaccctagaatagtctgacctggttccttttctctggttaattatccacagagactaaccagcagaccacaggactgaacttcagtgccccaggatgagactaccaaagggacaattattgagaggccacaggatcatctgtcttggagctttagtgattgggtggggaacagcaatgctctaagcctctcgacactgggtcccagagcccctagtgccatggggactttatggacttgttttgaagttgtccaatcctgacatcgactgctataagggcaattggaaagcacaggatcaaagcggctaactggcatctcccaggagctggcctagattccttctcaacactgatgggacctggggaggttggagagaatgttaaggaagaaagattggcatgaataaagcagccaagtgagctctaggtccaggtataactaagtgcttgggaacttgaaggggcaagggagagaaggctgagaatttaggttgttgtgaccttgggaggacctctttaaagtgtagggaggcaatagcaccccctagtggcaaaggacaagtgggctaataaaatctaaatttaaacccttaaactacaaggtaaaccaaacgcctctatttaatagataatagctaaaacttaaactggaggatcccttactatttgcagatactatctaaatgtggaacatgcattatctttttttttttttttttttttttggagatagagtcttgttctgttgcccagcctggagtgcagtggtatgatctcggctcactgcaacctccacctcctaggtggcacacgccgccacgcctggctaatttttttttttttttctattttagtagagatggggtttcaccatgttgc

SEQ ID NO: 58173 - DNA, 2552 bp, Homo sapiens
acagcagaaacaaagtattaaggtttgcagccaggaagcaagtgcatggggaataagcctgcagcttcttccaaatgagacagagccaaatcttttttctgagtctgttttcttcatttctattaaaccaaggtcctttttaagcagtcgaatttcatccaaagccagagtgagctactttgtttgggggaacagtaacagttacctccaccactgactggctgccatctggattgatccggaaagatcccatctgaatggtcttcttggggtccacctgggcaatttcccattctagttcatccaccagagccctgcatgctggtggaagaggagagaatgagagcaggggacagggtagggggtagggtgtgaggagaatgggatcaacccaggatttccattcatccttctcccaggccttggatctcatgccctcccaaggctctgcttcctccacttctttttcccgttgtgcctttacctccacagtggagatcctggctcctccgagcccaggcggttcccagcagggcccccagaagcagggccagccaaccccagcctttcatctttagcgtaatggggtcgctccacctgggtttgagtgggaataaaacataagtgtgaggagccgactccatttttccctgacccccccaatcctcaccccaaggctttcaaaggcctcattgtgactctggctctactttccaggaaatggccgggacacaaaggggcttctctgttccagcgcttgagggctctgattcccccagggtggtgggtgggagcgcgagctcaggacttgcggctcagccccagactctacgtggataggtgaggccctaagtgttggtactttagcactgcatgcctagggttcacggggctttgtggcagctacaggaggtaagttggcgattacgtgaggactacaggcactagggaactgccggcagggagccctcagtcaggccaggaggccagcgaggagagcaataactagggcccatttggatcctgcaccgaagattcctgcgtccccacctccagcccgtaagtgattacccgtacggacaccagccccctttctaaggactccgccattgctttcgcttcagtccatccccaaccctcagcgcccagcgcctcgccgcccgcatccgtcccacctctgctcccagggccgccgccgtggcccaagcgctggaagaccgctggactctcactttggccccagtggctcccgaaactacacctggctgcagggagcagggctgtccgggattctccagagcgcttcgccgcctgccacacacggggtgtcccggcgaccgcctgacccagctcccctgacgctaactggtacctaagcgggactccagcgtgctgcggtgcgagccccaatcagacaccgaccccaaacccgcccctccaaactctcgcgcgaacaggcagcttaggagaggctcccgaacagcaaggaccccggtcaatcgccgaaggacccagacttgcgtggcgaacagatccacgtgaccaccaggggtcagccgtagaataggagtggccttaagcgacgacagagtccgggcgtgctgtatgggagcggctagtcgtgcgcgtgagccagcccaggtgggctaggaccttcaaaacggtgcgctgccggccagcgagcagtccaggtttcaatacacaggaaactacatctcccaggaagcaccgcagcaccggacccatctttgtgagcaactacaagtctcaagctatcctgggacctgtagtttgtcggcttacacaattaacggaaaccatactgtacatcttcagtctgacttagggtactgggcagctatagcaaagacccagcattgcccagaaaaggcataaattatacctttttcccctttttttgagacggagtctcgccctatcgcccaggctggcatacagtggcgtgatctcggctcactgcaacctccgcctcccgggttgaagcaattttctgcctcagctagggttacagtcgccatccaccactcccagctaatttttgtatttttagtagagacggggtttcaccatcttggtcaggctggtctttaactcctgacctcgtgttccacccacctctgcctcccaaagtgctaggattacagaagtgagccaccgcgcccggcctaattataccctttcatatccataactttggattccggacctttaccttcaaaggaaggagaggaagactgaagccagagaacccacactagcagttctctaatgagataaataacaaacgatattttatttttattttataaaacatgcagtttacaacaaatttttaaaaaatggaacaaaacttgggacaggcaagtgggatggaagacagatgcttctcagccatcagcaggaataaatgaagccggcagccaagctttgtccaggatccaaaggcccttttggcaatggtattggcaacactggtttgcttgggccaccaacactctacttgctggcccctccaggtatccctgaagcag

SEQ ID NO: 58174 - DNA, 2579 bp, Homo sapiens
aaaaaaaaaaaaaagggatgcctcctgagaaagaatatgtcatttactcctagatcctagattctccctttatccctccaaccagacccagctgtctcatcactacaactcctcggtactggctatctgcaaagcagcttccttgggttaagaccagataaagaccttcaacatctttcaaccctcacaaaggggtacagttcttaccccgtggctccccacccacagcatctcctcgtgcaagtcaaagtgggagacggaaacaggtacacccacttcagccaccacgctgtgcaattcagagtagacaccttccattatgtgcactgattcctggacgggaagagcctccaaggccactccctctgggtccagctccacattctgtagcagacttgggttcaggtgggcatccaagacagggtccagggcagaatgcatggctggggcatattctgccagtccagggtccagaccctcaaagttcatgatgacgatggcagcttacacctgtgtcacaccctcccttaccacagtccctttagatgcctgacccaaccttcagcaagacagcaccgatgggcctagaatggacatcctggcctgtaaggggaaagaggtagctgagtcaagggtaggcccaggtactggtacttagggtcttctaggttatgggggcaggagggagatgaggcaggcatgagggatgagactgccagccaaaggatgaagcaggcgggggagggatgggcagtgggggtggaggtggtagaactgttgtccctatccctcctccgctaggccctctgtactctccaccaccccattatctaacctaatccttgacttccctttcttctcacttcggactgctcacttgccttgttcagccctgaatcatcaggtgaagggagcgagaattgcgggggttggagttaggtagagggatttaaggtgctttctcccagaattgggggtgaaaacgggtggattggacggtggggagaacgagaagtcagtttcctagaatcctctccaatagctacccaggattctctagaggaaaacaataatggccagttacccacaattggggcgggggcaggggaaggtgacggaaacggctagttacccagaattctctgggggaaccagaaaaatcggttatctagaattctcccacggcagcggtgaggagggggatagggcaagggtcagatgtgttcctgggatgcttacggggaatgggtcattaccaagatttctccatggcggatattttggagcgcgtggaattagaacgagtagggggagcgcaagcgctgtcagctccgcgggaaattccagtttccccagttctcccccacgcctagggctcaacctaaccactacggcgccaaggaccggggtccgaggcgcttcttccaatcaagaagggctcggggcatattttagccaatcagaagggctccgggcgcatctaagccaatcagaaggagccaggtacggcgaccccaggagagagcgtgtgacgcacgcgccggaaaaagaggttacggggcgccggtgggacaaacgcagccagacgccggacttgttgggtggcgttagaaagtaactctgtttttagtcttcttgaacaaaattacgtctaggtttgaaaaccaaacttttatgctttctataactttaggaactctaaaataagggacacacaaggcaaagcactaggagtcgctgttgggtattcccagcggggcttagtctacctcctcttcctgcggtgccctagtgagccactccgccacctctgaccctgttgcccccaaaactcgctggcatttcctattatttccagatatgggagagaaaaaaaaggaagcgggagccggactcctgacacagtccaagtggctgcatcttctacaggcatccatctgaaactcccatccgtgattgttccctccccagagaccccggtaacattcccgggtaacaagatgcccctggttatcaaattcccctagctcttgaggctggctggacgttatccctcagagggggatgagcatggcaaattgggacttgttattctgaaggattcgtgggtcctgtgaactctaattactttgaaatgggtctaggttgtgagatgtctcagagcactttagctcagctgttattactgtttctaaaggccacataaagggactctgatgggagacattcctcatggaggattcaattctataacatttctctcaataaaggctggtaaatagaccttcattaaaggaaccaagaatttaaatttctaggactcagaggggtggggtcctatacccagtcagagatcctacctagagcctagaccaagagaaaaacacagatggtctctcaaactgatttgatctgacttcgcaggtcattagatatagaatctccgaaaaaggtggatgctgagagacatagacagttcctacactttaagaaatctccatcttgaggtctcaaattgagaaagacttaacagacccatgagagttacagatccctaataacctgggctaaataatcca

SEQ ID NO: 58175 - DNA, 2496 bp, Homo sapiens
gcttatactttttaacaaaacaaggataatagatttatctatctttgtttttagatttatctatctttgaacatcgttttttggtgaagataaaaaataatgcagagcagagggaaaaacgtcagataccgaaccaacataacaatgccagattccgggtctcggaagctgcagggcagttttgggagaggggcattagggttagggagataggctggacagaagaagatcgaggaccgagcaggcgacagctcctatttcaatctggggaccgaagctaccctctccagggggtaacccctggggccagtcgcccttccctcggaggaactctcactctcacccccacccctaccccagcacaccctctcagggcccgtacctgattagggttgcagtccccgcgccctccaatggctctggtcgcgacttcccgtccctagtatgagctcgggtactagaacctcgcgccccgcctacaacttcggctaacccccctcggacccgcccccttgtagttggcagcggaagtccggagcggcccccattcccagccgccaccccgacactggctgccattcagtcaagcccttcccagactgcgagctcactggcgccgccgcaactccgcccctccgcagggcgggacaagctgagccgaaaccacacctgcagcttcagcgattggtggagaagttcaagtaggcactttctacgaggggaggagtccaattagtggactagcccaagactgaaacagctgattttcgagaacccgcgcgtgagccccggaaccgaaactagcttgaggagcctggagacgccaagggctccatgggaaggggtgggaccggaatttcgacgccttgggataggaagaggagggctgaggtaatgaaaacaatttttttttatttttattttttgagacatggtctcgctctgtcacccaggctggaatgcagcggcgcgatctcggctcgctgcagcctcgacctcccaggctcaggtgattctcccgcctcagcctcccaggtagttgggactacaagcgtgcataactccgccaggataattttttgtatttattgtagagacggggtttcgccatgttgcccaggctgatcttgaactcctgacctcaggtgatcatcccgcctcagcctctcacagtgctgggattacaggcgtgagccaccgcacctggctaatagctatttattgaaagtactgtgataagcattttagattcattgtatcattttaaatttacagggcaactcattgaggttaaaatcattctatctcctttagaaacttcaaaactgatcttagttcaagaaagaagttactattcagtgatcaccgaggctctaacaagtggagcctagattcgaaaccaaaccctgtgacttcaacacccaaacatttacgttcttacgttttactgtacagccttcctcctggataaatcagattaaaattttgaagacatgtatatagcttgtcagggtagtacagttattaattctgtggttaccacattcttttatatctcaagactcccagccccaggatctaagtcatagctcttgattatggcccacccccagtagggagctgaacttactacttctgatatgaaagaagccagagtagttgtttcttccaagtcactcacatctgagatggccctcaaaccctccttggtggtctccggctgagagatgtttgcgtctttctgatcttggtaatactggatcaactgctgaaccccagaccttaatgcaggtttaagtgcagcactgatcgctagacccataggcccccctgacatcccagccatggtcatcagaaggtcatatcccagatctatggccccatctcggcctcgttccctggccttgcccaggcagttttgagtagcataatacaaagctgtgcccaggttgtagaaggttcccactcctggcagcagctggactacattgtgcacagcttgctccttctcattctcacagtcctctgtcgggagggagcgcccgacccttcctgtgctttgctgctccctggctaacagctgcagagcagaggccagggcttccactgacacgttcctctctgtgcttctgcctttctggagccctcgaagatgctggatgaggacctgtgtagcattcacaccaccctggcggtagagctgtagctgtagagcccaaacatcagcctgacaaccagcttcctccagggcattccttagagccaggcttaccaagaacttgggtagaggggccatgtggctgaaaccaggcagtgactttgggtgcagaaattggcaggacaaggggtctgaggagggtgtctgggattccaaggacaagggaaagtgcatcaagacatttgtctgctttccatatgaagtggcatccacagggtgcagcaggaggtagcaaagtagcagctcaactggtatcatgatgagtctgaggccacgca

SEQ ID NO: 58176 - DNA, 800 bp, Homo sapiens
tagagtgcagtgatgggatcacaaatcactgctgccttgaattcctgggctcgagggatcctcctgcctcagcctcccaagcagctgggactacaggtgcgtgacaccatgcccagctaatttttaaattttttgtagagacgtggttttgccatctggcccagcctagttctgaactttgggctcaagtgatccttccacctccgcctcccaaagtgataggcttccagatgtgagccaccgcgcctggccccaagcttctgttctttttaggtaaaggcctaggaaataggaaatgcaccccagttgctcccacttggtctcccccatttacaggtcaccagggacttctgttttatttccacccatatatagggaccccaaattaccacacagtccagtcattgagaagtgagactgccttggtaggtttgatcgcttcctgatcctgttctgcctagttctgtgtcccatgaggaaaggagatatttgctttcccctatgatcagtgaaggatgtaatctctgcaaatatttgcccatttatactggctgctcaaaccttgtgccccttgtcacacactcaacctctatgcctacagtcctgttctttggcatttcctgtatgtccctgccacattcccactctaagctcatgataggagccagggaaattcagaattaggaaagatgagatgtttgtgatactctcatttctcttcattttaaaaattaaattagcggctgagcatggtggctcacgcctgtaatcccagcactttgggaggccaaggcgggcgg

SEQ ID NO: 58177 - DNA, 527 bp, Homo sapiens
agctaaatcatctgaatgaggaaggtgaatttatcaaatgaatggtcagcctgtaaaaggtaaataatacaagagatgacaagcaaggctattccctgaataaggaataaagtaatggatgtgtcttaagtgacggtgtgagggatgtgtagtgattgcttcagctctcacaggaaccaaaggggaaatcctacagaaacacaatcctggaaccttcccattactaccaaaatgcaaagtattgacagagcaggactttgctgaaggaaatctctaagctctcttctcacgttatttagctgactgaaaagtctgggccatgctgacccctggtggagacaatgggccactgcactccaaactggtggcgaggccgggcgggaggccaagacgggtagatcgcttgaggaaaggggttcaagatcagcctggccaacacggtgaaaccccgtctctattaaaaatacaaaaaattagccaggcatggtggtgcatgcctgtagtcccagctactcgggaggctgagg

SEQ ID NO: 58178 - DNA, 2046 bp, Homo sapiens
attattattttttgagatggagtcttgctctgtcaccaggctggagtgcagtggcagaatctcggctcactgcaacctcccactccctggttcaagcgattctcctgcctcagcctcccgggtagctgggattacaggcgcgcgccaccacgcccggctaatttttgtacttttggtagaggcggggtttcaccatattggccaggatggtcttgatctcctgacctcgtgatccgcctgcctcggcctcccaaagtgctgagattgcaggcgtgagccaccgcgcccggcctagattattctcacttaattattactaaggtctgtatataatttctattttataaattagaacactaaggctcagaaaagtggagtgagttgcccaaactcacacagtgaagccgggatcaaagctaattacagtactgtctaattttaaaatctatacttctaagcatctggctacactatatctctaaaagttttacgtagttcaaatgtgagcagcgttcgtctacgcagaaaaactgaataagcagcattaaccgcgggcagaaacagaacagaaaccactaccttggcggccgcccgcccccgggcgtcgcctacgtcataacactgcgcggccgcccctcgcgcaccacgtgctaggggagcgggcgggcagatggctgtgtctgtaagcgggaggcgtgcccggttcatccaaggcgcaagatggcgctgctttttgcacgttctttgcgcttgtgccgctggggagccaaacgattgggagttgcctccacagaggcccagagaggtaggattatctctttttactcttttacctccagaatggctgccgtctattattcccagaccccactccgagaagcaactccaaccctctcgggtcttttccttccccacctgccttggtcttaagattccaaacctgtgataccatttggtttctttaaattccgggacttactcaatccgagtttttcagctccgtgagctatccgtagtaaagcgacctcgcgactctcttgcccgcttggcattctgactcttccctagttgctcgtgtatcatggctgcctgcctcatatctgaatatatcaccagccctagggttctagcccctgttattatcccgtctttttgctctgcccgcaggcgtcagtttcaaactggaagaaaaaaccgcccacagcagcctggcactcttcagagatgatatgggtgtcaaatatggcttggtgggattggagcccaccaaggtggccttgaatgtggagcgcttccgggagtgggcagtggtgctggcagacacagcggtcaccagtggcagacactactgggaagtgacagtgaagcgctcccagcagttccggataggagtggcagatgtggacatgtcccgggatagctgcattggtgttgatgatcgttcctgggtgttcacctatgcccagcgcaagtggtacaccatgttggccaacgagaaagccccagttgagggtattgggcagccagagaaggtggggctgttgctggagtatgaggcccagaagctgagcctggtggatgtgagccaggtctctgtggttcacacgctacagacagatttccggggtccagtggtgcctgcctttgctctctgggatggggagctgctgacccattcagggcttgaggtgcccgagggcctctagtatgtccattactggagtccctaatcacgcctttggccagcctccttttgaaagtgtccgaagcctttttactttgcctcaagcaacctctagctcccacaattcagtgttgggtcctctgtgcaatatcatgatcatcttcctcatcccctaccttgtgaaagctaggcatacagccaaaccctccttttccccacccaccaactactgccaatttcctaggctaccatgggtgtatcttccttgacctgcttccttcagtccctctgcctccctttgcccaggcctttctcagactgtattccatcctggggtcttatcattcagctttgtttgaatt

SEQ ID NO: 58179 - DNA, 805 bp, Homo sapiens
ctggcctctatattttttaaaaaaggtcctacttagatgggaatgggatgaggcaggtcccagatacaggtttgtagatggagccatcacagaacaaggggagagactcagcctcttttcctcacccagactcattgcttactcatgtgtcaactacagagtcaataccacagggactctgatacctgagtccctgaggggaggattcctaacaccaccttccccaggaggggctgtgattggctccagggtgttgctgcccagctgctcccaggttcttgctcaagccctgggagacctacagctgatgggctagtctgacaccctgttcaaggccaactcacagttccaggtgacgtgaataactgccctggcctggccattcacccttgcctgcaggtgtcccacacccagaagtggccaatcagtgcccaatagtgctgtcctccccttgtctctggcatttggcccttggtcctaggcaggggtcaggacctgctcacttctctaagggtcagaaagctctaggctctagactcatgggtgggggcagggaacagtactgagtggggatgacggaggtggtgcagtctcttatactgacattgtcagcataacatgtgggtccctgctgtgcctcatgtgccttctggggaccctcaaaggaatcagagccccaccagtctccctggagagctgaacaaatatgagggatacaggaacacaggagcttagaggataatacctatcagaaggttaaggtggcactgaccttgatcagggagctgacaacaatggcaccagc

SEQ ID NO: 58180 - DNA, 1336 bp, Homo sapiens
cctccattacaaatattctccccattcaacaaccagtttggaaattcccccccattctgctgttcagggagcactgctacgcacacacccaacacttatggacgtacctgcgcaccaataatacacgcgcatcacacattacctgccgagaacacgcagaaacacaacacacagaccccagtacacctggaccggaggcaggaggctgttccacatccacgcatctcctaaaatacacacgaggactagggaaggtgaggactggcggcgtgagcccggccctgcactcagacacgtgagccaagcaacactcggcgcgcatctgtgatccgggttaagtgcgcaccttggacaggcgccatccccaggacccgcttgcccgaacgcactcctaggcagacggcagattaccgcccgagcgcggcgcacccaaagccccacatccaaaggaaaaggcaccgagggctagtgagcgaggagaggggagatgagcggcgctgccttggaagggcactcgggaactagcgagaaccacagtgggagtgggggcaagcccgtcccctgccctgtcccaggagccttactgatcctggtgctgcggctggtggctgtgtggcgtctctctgccctgcgccgcggcctcactgaggtggtgccggacgcccccgccaaggagggggctccggctcgggtgaccccagcctcctcgcccgcagtgactgccagcccggctcagggccttctgcagagccttcatggagcgcatgccccagcaagcctccggctctgcaggtgcgcccgggacctctagctgtggctgggaaggaggggcggagcgagcgagacaaggtgcgggggagttctgtgagggagcgctggacctggaagacggagaatgtgggcccggtgggtggggctggggctggggcaggagaaggggcctgcccctttaaagctggctccagggttaggggcaccctcaggacaggggctaggtgaggagcgttggggatgaaggagaacccgggtggctttctagtgggtggagagagggcggtgcctgggagctggaatggacaatgcccaggtccaatcactgaggaagcaaaaacattgaggcggggaaagggtaaggttgcccaatgagagcaagacggtgggaccttgcgacagtctgcggatgcttccgcgtgggcccggcgagcgcgggtatccgcggatgctgagggcgggaaaggcgaggacaagctgaggcgaagccggtgggggcgggaggcgctccccgggaacaccgtggggctgcgaatgatggagttgtcgtgtagagaggagggtg

SEQ ID NO: 58181 - DNA, 1154 bp, Homo sapiens
aaatacatacttcacttatcaggaaagatgtttcctgaggagcccatgacagtcatagttttcttactctttattggctggtggtaaatatgggaatgccgtcaacaaatgtataatgcctaataaaggcggacttttttctcaggaagtagtgttaaatttttttttcctttctttggaattaaaatagttactgaaggggaaaaatgtggatttcaaagagggattctgcaagataattttgtgtttttttttttttaaacatcagttttaatgcccttcagtaacttggttcattaaaaaaaaaaaaaaaaggctgaagtaaaaagagacagggtctcaacactgtttcttcaatgtttgaagaagttgccaaagtagagagatttgagtataggtgagatcgaaagaggaaatgtttgggactaaaggaatttcaaacttgtaaagggcctaaccacgcctttcttgacatcatctctctggcatgtgttattataatttaactcctcataggatcaacaaccatttcctttggaaaaaaagaaaagggactgtgtttaacttaggataatttgccttctccaacgtacttttcatacatttctatttcttctcaatgttaatatattgaagactgatggggagtaggaggtgatgaaagtaaggctgactggtgggtactgccagatcctcattctttgagaagcttgttacctgagattgtcatgagtgtttactcaggagagagaagtgacaaacagtgctggattcacttagtacttctaacaggatagagaattttctctgtgtatgtttactacttttccttctagtttccatcaaatcaaatgtaataggactgagaattaagaacttgtcggtctaacatctcttgactggggcagctgttctgttatcagtaataagttaactcaaatggttaaagtttagtggtaggccgggcgcagtggctcacgcctgtaatcccagcactttgggaggccaaggtgagtggatcacctgaggtcaggagtttgagaccagactggccaacaggatgaaaccctgtctctactaaatatacaaaaattagccaggcatggtggcaggcaccagtaatctcagttacttgggaggctgaggcaggagaa

SEQ ID NO: 58182 - DNA, 1992 bp, Homo sapiens
tatgctgagggaatttgcatcacttacatagagcgtaccccgctggtagataactgagtttgcttctctatgacctctagctaaagggaaaacaaaacgaaaccagacaggaagacagagatgttctggagaagggattgggatacgtgagtcaactgaagttgactacttccagttgacaagtttacaaaaaaaaaaaaagtccaacgaaaggtctctcgggccacatggttggcaagatccaagcttgcccagaaggcttcagaaaatgaaaccaaatctgattaaaatggacatttcaaaacaacaagacacgcagcagcaaacgcacagctgccatttcccggccacttcctgcgggaggctgggggaggggctgtttgtgtacagatagaggtggaaagctatcccctccgtcgtcccccaaagcagacaaatctctcactccaattaaccctacaaaggacaactgctattgacattgccttctcctgaaaactgggaacaccgggaaagaaagggatgatgcggtatcatctttctgccacggaagcggggatcccctcagtgaggaatctccttggaaaaaggaattcctctttattcttcccttctgcccctcagcccagctcaaattggaaagcctcagcggaagccctatcaacctccatccccggagtgcgcgattctcccgggacgcgagggccccaagccaagcgcagcaccaccctcagcaaggaaggccctctcctgatcttcacgctcaagagaatgggtgcgctccccgagggagacaccctcagacccctggaaaccccttccgccctccactcaccacagtcaaaacgcccagctccccgcaaacggagcgttttaacccgccaagggaaccccctcacccacccctcgcgctcaggcaatccccacccccacccgaggaggtggagcccctcccggggattccaccccaagtcccccacaggagtcatctccaccagccaggcggcttctccgcctcctcactgtcgccgggagcccctacagctcctcctgcccccgcggccccgtccggggtcctcagcagccccaccagccctgttctcctcccagaccccagagcaaggagaccctcgcctcgggttggatcctcgcaggaaataagctcccgtcggcttcccgccccggcaaggctcaagccggctctggagcttctgttccccgagggaagcctcggatgaaagcggggctccctccccctcaggcccctggccacagaccccacaaacctgaggcagcggcgtccagccgggctcggggctcgtctctccccggggtacaagcggttcacatggccgcgctccgggcgccagaacgggtggagacgcccgctggggagggggtctggggtccggggttcgggaagggggagggggacgcggctcaaccgcggggcccgagaggagccaacatggccggcgggggaggagtgagtcggagccggagggggcggagaagcctcggccgggagagagtctccccacgcggcctccgccacagggtcctaaagcccgccagcccatctttccgacccggacctgggtcctagcgccgctgtgcctcctgcaactctggccaccttgcccacctggcagctccctctgcacccgcatctcatggaggcagtggtcctgcttcacacagggcaaactgaaaggcatgccacagtcccaaggttaacttaaaagactagaccaaacgtctaggcccaaaggcaggtgccacttctctaacaggctggtaggggtaagagtcaggggaatttcgggggcagttatttcccaggtagggtaatggaaacgtggaaatagaaaggttagtcactcaggtcgcgattcagtaaagggatggggagaggcaagagtcagccacccactcacctctgtcccttcagtgcagcctggtcctgcctggatcaccactttcctggcgaca

SEQ ID NO: 58183 - DNA, 2914 bp, Homo sapiens
taggaaggcgtgggaaagcgctagttcagaggggaggaggcgaaacccagaccgcgggagatttttctggcgaagaaggcgcgggggagggggagatcctgggcccagaataggaaaggtactcgggagacgatggcggagaggcgtgagaagcctccggattccggtcgcggaggacagggggaaaatgggcgagtagatagttcaggggagagaggaagggcagctccctcagggggagagtcagatcccgaatcccggggcagcagggatcccggggcaggataccgcaggaacggcccgccaagggactccggagctggaggtgggtgccgggcctcacctggagcagggccgggccgcaggcggcggcggcggcggcagaggcgcaggtggccgagccgggcggcggctgcgcctcctcccccagccctgggccggcggcggcggaggggaggaggtggtgcttaaaggggcaggaactaccgaggtgaggacaaccgctcaggagagcagtcgcgaaggatccactgggggagaggatagcgggtggcgtctcctaggggccagaaccaggaaggatcccagatgggaggaagagaacggatcccagaaagagacagaaacttctgcggtgaagtgggggatggtggtaggtccgaaaggaaggacttgggagagctctgcccgcgctcccagggcaccagcaaagaccgcttcacaaaagaggccggggaaggcagaaagagctacatgggctcctaggaggcctaggggtgcaggagagggaactcaaggccgagcctgctgggggtcacgcgcagcgccctactaggtgaactggttccccgtgtttcagctcctcagggctccatccctacggctgtggggcctttggaatcaggaagccacgaaggcaaaaacctcctatcctctcaacctcaatcctgcgtcccactcagtgccctcagtgactgtagtgtgggggccatcaatagcagccctggtgaggctgatgtgggaccatgagaatcgactttggttcagttttcccccaaccaccaccacccttgcttcagtctctggggcaacaggaagcagctgctcagtgcagcccccacctgaaggtgggtcaaggtgggggaggagagaagacagacttaaaaggccttagaaaaatgagagggaggggaggcattttaaagaccttccagcactgccaaaagccggctttacttttgtgggggctagcagtgagtactgtcaaaatttccttgaatctcaacagcttaaatggggaggagcaggggcaatcctccacggggcggcggggagggggctgggaaagccctggcctaagatgcgtctcaggctcttccttagaactggggcttgcccatactcaggatcccgtggtcggcagcctcgctagctgagccctgtgccccccgtcccccagagtcctgtttcctctccttcagcccccaaatgagcaaaggttaggccccacccctgctgagtcagccagggagggagtaggcatccctcaggccttccccggggctggtccccatactcacccatgtcaggctggcacagctccaggctgggaccacccagctcctcactgtccttgggcctccacttcacgtaaaggttggtgttggatcctcccaaactgtgagctgggaactagcaagaatcaaaaagccagtgtatgcttcctgcgaaccacacagcctgaactgctgtagggtgatgtccctgtgtgacagactggggtggggagggaggagggaagggcggggctttctctgggtggagagagggaggaggcgaggacagggcagaccaggagaaatatggaggaaggttagagagctgtgttgacactccagtggcatggtagaagaggccggcaaagggggaaggaaacaaatagttgcagctactgagagggagaaggttctcgataaacgctgaaggacgtgaacatgttgggggaaggggtggagggatgcaaaagacctttaggatttcagttcccaggtctgtatcgggtgacgtgagaaaacaaagcagaaagggctgacctgtaccctagggctttttctaccagcttcttacccactccagagtcaggacctagaggaagtgtccacacccccataactcagcatttccccaaatcccagcttttctgggagcaaactaccagcacaagcagctcaggggctccaccttctgtccagatcatgacacaggagagactgcgggagaggctgctgccaaggacgtcacaggcagatggaaggaagcttagaggcccctactccacccctggccccgcgccaaaaagccctccccaaccttcagcccccaggggcctctgaattggagctcagcttgtccccgcccagcttctacctaacttgatggactcagcgggtggagcttatagatacaggctcctccccaggacaaaagccccagctggtctgtaaacagtctttaactgagagccacatcccagcaaatggccttcatggatttgaaaatgggatcagagttcttgcagagtctccagtgctaccgcgagagggcagtcggatgggtctggtcccggaaaagaacacaagaggaacccaatctgaccttgcacgcttcttttaaattgaaatggtaaaatatatcttctacccctgcacctctcagtcggctaaaatgaagggaaaataacctaacttcattagtttagaagcccaagccagcaactctgaaaattgctattcccttgtaagattatcttttctggactttcataaggggatcttcacagagggtggactaggccttatggtattatatgcctctgcatagcctcaaggaatcacaagcaacttttatttaggct

SEQ ID NO: 58184 - DNA, 1902 bp, Homo sapiens
atcaagacctaaatcgaccaagactccttctcagtacctaaatgtggcttcagcaaactcagaagaacgaaagtcattttgataaaatcatcatagaaggcagacagcttggttttggggatatttgggctacacaaggtctttactattcctaacaaactctacttacccaaatgctgggccacctccaaaaccagtctggtctccctgccttgcacttccagggcatttagaattggtggtagtccctcatcaaactggacgtccaccactgcgccaatgaccgccacgatgcgcccggtggcggcgcctgcttttggcgaaggagatgtttgcgccgcatagtccctgactaacagacaaaagatattggaaggagctggggtcaggccagttaaaggtcatcggaagccaggacttaacacacaaggagaggaaaactcagccgaagtcaggcctctttccgcttgtacggaacgcgtgtccaagagggaaggccgcgcagcgatcgataaagcgcctgcacagccttcccatccgcatgcacaagaccccatttttcgagagttcagtacccctattcaaccggaaggtcaacgcacctgcccgcaccttttccgtcacacaaaggactttatacaaaatgggacagagctgggtcgaagaaacctcctatgggtgtcccattcttgttctccagccattagagagcaagacgcggctccaggcatccttttaacaccacggatcccttaggcccgagctaccatcgttccccggctcaaggtcatggggcggcaaaatggaacgttagctcctagagaaaagcacttaccaggatggaccgccgtcggagcggcccgcagtaagagctgagctgggggcagcgacgctgaaggggtgagtctccgcaaggccccggaggccggagcagcggccacccgacccacaaaccccaacatggcgtagtccgggtggagactgaaggctgcagcaaccgcagccgcctgctctcctgccgttgaggcgaggcctacgctgcagtaggcaggtccattgggtgaactggctgctcatcattctctgtgctgcttctacaggttaatacacgctgatcttctcatccattggtcaaaactggtgctaatctgaaactcctttttttattggacagtgtgaggttagagggcgtcactctgagcctcaaaacttaattggatcatagcgacgtccgttggacagggtaatcagaggaactacgtttaggaaaggggccgagttcctgttgaaagtgcgtggcctgtctttgcctgtccttgggctttctccttagataggtccttgatctaggtgacagccataggggcggtggttagggaagtggtagtgcggtgaagcaccactgaaggtgagcgtggcgaagtcaggagccctctttagagccaaaataaggtttttctctcgaagtagtgagattgcaagctcccaggcgattgcacagattagcaacctagacaggatctttatcatttaaacctattaaaatgaaataaactaatgtaaccagtactttagcagggcattgaggagactcaataataagataaataagactaagaaccttccttttaaggtccaggtgaacaaacaatgcaataatgtgatggttcctggttagcataaactgggtgcacgaaagacgaggggataaaattgggtcacctagagatacagaattgtccaccttgaaggaagctgagagacctcagctatgaaatgtgaatagaaattcttagggtaggctgggagcggtggctcacgcctgtaatcccagtactttcggaggccgaggcaggtggatcacctgaggtcaggagttcgagaccagcctagctaacatgg

SEQ ID NO: 58185 - DNA, 3085 bp, Homo sapiens
ccacctcccagattcaagcgattctcctaacctcagcctcccgagtagctgggattacaggcatgtgccaccacgcccggctaattttttttgtatttttgcagcgacgcggtttctccatgttggtcagtctggtctcgaactcccgacctcaggtgatccgcccgcctcggcctctcagagtgctgggatcacagttgtgagccaccgcgcccagcctaattcaaattttttaaaaccccgattacgtatcactttcggggagggggctccttcaaaaattctaacatgctgtgctctagaagcttgttcccagtgataaactcgcttcagcctcacgcatccctttagatttctagccaatatactcagcctcagtatcatgacttgaatcaagcaaatccttattacttttccaaagacataaagtcactcccctcttctctcttctgaatggagtctaaaacaaaagaaaaaaaaggttccaccttaattgttctccataccttttaggacgtagttagtaccttgaaaaataacctcccgtcaaaaaaaaaaaaaaaaaaaaaaaaaccctgtaaaaccggcagttcccactgtacgcggcagtgccaagaattcttaccggttaaaatcgccaaggctttcctttatcatcgtaaaatgaagactgccatagaatctgtattcacctccacacaaatttaagatctttgggacgactgtaggttaattaaatgcctactacatacctatttcatcctacactgtaacaagatagtgaaacctcacctcaagtagaacatgaaacacagaaaatgtccgtatctttccaaagtcgacacgtgcggaactacctgctcaatggtaactcctcctcgctgccagggaagcggctgagttttggcaacctcccgtgttttcaagagactggagttaggaggcggactggaagtacccacactcaagaaacccagacactggagagggaagtatgttgcggcgtgggcatggcttccttctagttgcctagcagtacctgcagctcacggcgaggtccgcgtggggctctcccaggagctccgccaggcacctggcggcacccaccacaggtgcactcgactcagggcctggccccgggaccacaaagcaacagaaccggagcgcccaagcagccgagaggcgacccacgaaggttcacgcttcagggcgccgcatggcgagcagctaccgggagcttaaggcctagggtgaagttaccgaaagaggcgagtaacccagacagccaaaggggtaaaagtaggatttccggcatggggaagccaaggaacggttcaggggtgggggaagcagacatctggaggaaaaatgtcctccacccgccaacggtaaccggaacaaggatcctggacctcccgcccccaggcaggaacgactgccaccaccgatgcgagaaaggctagggggccgcttccagggagcccccaacgcggcctcggcctcactcggcgaccttccctcggcggggtgtcgcactcacattgtgaacggggcagggggacgggcgaactggtgggcgggcctctctggcggcggctgctgctagggagtcgacttctctccggtggcgactccgctttttctctccggtcgcggcctcttctcgcttccctcaggcgacggcggcagcggcgggctcgacctcgggccccagaatgcaccgcgcggaaagagcggctcctccggtcggggagaagaggaaagtgtaggaaaaggggcgcgaggacggagaatgaacgtgcgtgcgtgcaaacgaggggtggtgaggccgggcggcggctggtgacgcagcaaaatgcccgggccttgccgccgcgcgtgcgcagtccttgtttttgggctccggcgcggctttctagagatatctacggaaagggcggggcctcccagctccttcgcgatccttcctggcgccggccccgcccttcgtccgccaccccacccccactccgccccctgctagtccctacgcgttcccgcctctcctcccgctctgtcttctcgcgttagaaaaccgttagtggcccaactgccctgccatgcgccttcggcgatttctctgagaaacggttgcgttgacagtgggaggcaaggctgaggcggagggacacggagtcgggatcctggagaactgaaatggcgcgttggttactcttgagggagtaaatcagctcactgagtcatcattccaccacaaaaacctgtaaaaagcctgtgctgtggaaaagggctcacttcagaatcaagggcctgggtccacctcgccatttttctgaaggttggaggctctgtccagggacagcggaaattcgaggttcttggcggaggaggagcatttgccaattggggcgggcttttgcccctaccttgagaccttagtgctgtagatgagccaggaaaggtatttgaggggagagtctaggtttctgggaatggagagagtaggacattgtgtgtttccacgcacatcgtttgggggagaaggggttccccgtcgctttgtgcaacatattagtagggtgtagtaggggtagcaaccaagagacccaaaacagtcctgcttaagaagaagccgcttaacggtggattggggaaaaatactctagtgcgctgcattttgaacaggaaggaggtttaacgaaagtgctataaaacctttctgaagaacggggcttcataataagcactaaggtatttagtgtctgtgttgtgcaggacaggtagtgggagctacgaaacctggaccctagctcaaatgccattaaaaagggaaattgggcggggcgcccgtggctcacgcctataatcccagtactttgggaagttcggtgggcggatcacctgaggtcaggagttcaggaccagcccacccaacatggtgaaaccccatctctactaaaaatactaattagcagggcgtggtggcacttgcctgtaatgccaaatactagctagtatgaggcgggaggatagctcgaaccccgaacccgggaggcggaggttgcagtgagcactccaacttggg

SEQ ID NO: 58186 - DNA, 2579 bp, Homo sapiens
atatgttttaaccagaatttaaaattagccttcacagtcgttaatttcgacgctgaggataaaaggatttatttcaatcctgggtttcacacaatgatgcaggaactattccagcacactagaagtatctcagcaccaccaacccataaacaagttatccgacctaggacgactctggggcccagtaggacacatttaccaccagcacacatctcatccagacatgtgataaaggcacaatgccaagctctgctaactaaaaccttgatgcaacttgctggctggagtttcacaaatgctccgggctccttggcctgtgtcatctagttccaataggtaagaatcactgagcccattccctgctgagttttcctatgtgaggtgggggttccacaggagagcttcttttgaggcgacaggcataacatagaaagcaagctagggtacttttaacgtccacgaatcttaaaaatattatttttactccaaatccctaaagaagtatctccaggatagtaattttacggtctatcctccttggtaaagctgcaaccccatcctcctaaaaagtgtatttccccttggtcattttgcccaccaaatggctttagggttaattttaattaatggcaaggagggtagggaaacctacctgtctcagcctggggctgcggcaactcctgctctgtagcagggacggtttctgtggcttcgccgggcatttctgaaggaagggaataaaaaggaggcctaaattgattgggatacattcacttgcccaacccggagataagtattcttaaaaactccgaggagggctgttagaaaaaaatcgtgagggtgtttggtgacaaccttccccaaagcacctgggaataagaggtaaatatgatgtgaccctcacgcctctatcaaggccagcaattcccactgcattctcaacccgagggagaggatcccgggctggctctcgatcatgggagacttcagacgctactgtgaaccccctccactcctaatactcacactggctgggctggggcctcctggactacgtttgccgactttggggtaccaggaggggaaagacggtgttttaagtccaacacttgcttgtcacagggagaacggtgttacaggttctaaggctgtgaccccttacccttttctggatcctgtgaagcagttcccaaaacaagacgcactcctcttccgccctcaacactgcaactgctcccatctctgcaggctcggattctgggcccgccccgcagcccttctaccctgcttttgccaggacaccaaccgcagaccccattttgtccggaggcccaggggcgagtaggaaccctgtggcccagtaaagcctccaactctccttaactctcagtccccggggcggcttagcccgaaagaaaggcggatggctgcggatagacagtagcggcacagaaagtacttactgtgcagggaacgcggaaccaagatggcggcagaaagaccgagcgagagcgtgacccacgcctgttgcagaaggaagcctggagcggagggggtgggactaggatccgattccgggtcaagagctgccggcagccacttcctttgacgagtgactgtcaggccgttcccacggcgggggtggtgacaaggactaaagggtaagaatttagaacgggacgcgcaggcctagcaggagctctctgcgcggacccacgcagtcctcagaactaagcagactccgccctccggtccgcgaagtggcgactgcggtattaagtcgacctcgcgatttctcaaatagtgcaggaagaagacattaaatagcgaatgctagagactgcattcacaacattggagggtggaagtgacttaggctaaccagttatttttggaacacacgatgtgaaaacatttaaaagctgctggaccctctccccccccatcaacaacaacaaaaaaacccattttaaaacttgagagatgtgatgggtcacatataacttcagttcagattataaatttaattcgatttttcttgttctgttcaatgactagagagactcaaacgatgtcaccagatgacagcaactcatgcgtgttaaactcttcgtaaaacaatgttagctgtacccccgccccccccccaaaaaaaacacttcttgtaaccaaattctgtaattatgttccaaccttgtatggataacgtaatccagctaaaaactcctctgtctccctaaataaatgaaatcgtaacttctctacttctgaaggctgactccattctttggaggttttctggttggtccatcctcacactgcccttgaataaactctttaaatagattccggcccttttgattgttttaggttcacgacaatttagccgatgttgaaattataaagctgcagattctccttcccagaaaaaaagaacataggcacatatacaattcctttgcttgctattttgggcacttcttggatttttttttttttttttttgagtcgctctgtcggccaggctagagtgcagtggcacgatctcggctcactgcaatctccgcctccagggctca

SEQ ID NO: 58187 - DNA, 890 bp, Homo sapiens
tcctcgattcgcactaataaattcagctgcaaggaagaaagtatttctcttcctctgagagaggctcttccgctcctgatgcaaaccatgcctcagcagcttcacgctacgccccagtaaccccctgggcaccgctgcaggtaaacggggcacctaatgtgagcctgaccacgcagaggtaggagcggcggctctgttttttttttttttttttttttttttacagcgtggccgcaggctggcttattatatcctctctcggcccatttacacctatgaagtggtggggcgggctcgagagagcaaatgaaggcgcgcggcacaaagcctggtgcacagaaggcgcttcatattgtcattctaaggacaccccgcctccaacctcctcacactccgctcccgaacccattcctcgcctccatcacctccaccgtagttgagccagcgatagtactgagagtagggaaagagcctccggtaataaagtttaagcagctcgggcagctcggtggggtcaaacgtctccattgagcgcggaactcgccacggtaaggattaccacaggaattggcgggaacagcacggccggcggccccgcgactgcgcaggcgcttatggccgaggtcggctgtctgacccggcggcccgcagtccgccggggccgccgggaattgtagttcccacttggtgcgcgcgggggctgcgggagacgcagcagtttgcgatctgcccacgcgttcgggcactagggccaccgctcttgtgggcagaaggccgcgtccattccaggaagaggatcttctccggaaatgtgagacctatagcatattgatttaggttattaagatgaagtaaaaaggatgctccacgtgaactttttggatgtttta

SEQ ID NO: 58188 - DNA, 1553 bp, Homo sapiens
aatcctgttgaagtaagtaagttgcttgaaaacttggagtactcctatgttagttattttccttgttaataaaataaagaagagaagattagaaaatatgttacaggaccaacaggtttgtatgcccactgcacagcaacataccaatacactgagacagtagggtttgcagcagagaaagagtttaatgattgcagggcggctgagcaaggagatgagaggagatcttcaagtccatctccctgaggagttctgggctggggtttttaaggggattgtggagaatgagggactggaaaattggggtcattgagtggttggggtcaaagggatgaagtcgtcaggatgtggaaactgcattcagtgagtcagctccttgtatgatccttcagaactgctgatgtcgatggggtccttcagatcagctgacctcattagtttcactggtgtgcaggacctgaaaggatatctcaaatggaaacaacattttataatgttcaagttgttatctataatagagcagttaaggggaactatactgtctgatctatgtgattctaggacaatatgcctaaacaacgatgagaaagcaggtcagagagccggctgacctaatgattaatgctgaatgtgttgcaagcttggtttgttttcatttctttctctccctgctttcctgattaattttcaaaggttcataaggacagtttcaaatatgttctattgacacaggagcataataaacaaaaggagaatggggccaaagtcacatctcagtttaaatatgataagctctgtctcttgttatcataaactactgaaaagtagcagagagttccatcatatttgtttaaatgccagagttttggattgatctcacaggaatgttccctctaacagagcacgtgatgatcacaaagccaataaaacgtgttctgggacgttgcaattgctctttaatctatttggtgcgtttggtataggaaactgagtatttaaaacctaaactgtaaattaacctaccagactttagataagcaatctgccaatataaatattgtgtaggttctcttgttagccataaggctatacatgttttggctctagctttctccttgcagactgcttgaaataaaggattggcagattcacattaaagcacaacattaagccttgttccttcataggaatttggatttgtgtgaagacaatgggaagccatggaagggttttttttttttttttcagagtgtcactctgtcacccaggctggagtgcagtgacgccatctcagctcaagcgatgacccttgggttcaagcgattctcatgcatcagcctccctagtagctggaattacagttatgtgccaccattcccagctaatttttttgtattggtagtagaggtggggttttgccatgttggccaggctggtctcgaactcctgacctcaactgattcacctgccttggcctcccaaagtgctgggattacagatgtgagctaccattcctggctcattgaagggttttaagcagagtagaaacataa

SEQ ID NO: 58189 - DNA, 2215 bp, Homo sapiens
aaccccagctactccagaggctgaggcaggagaattgcttgaacccgggaggtggaggttgcagtgagccgagatcatgccactgcactccagcctgggtgacagagcgagactctgtctcaaaaaaaaaaaaaaaaaattagaggatgggggctgaggagcatacaagactctctggtcagggcagctcttttctttctttctgtttttcattttggtagtaacagatctgattctgcagctgatcaaggatgacactggtgagaaccctatgagggagtgaagcagcctggactcttaccacaagagggaggtgttataagagcaatgcagaggttggagtgggcagcagttggggcaggaggaagccgactgctgcctggtctgcaaagaagtcctttcaagtctctaggactggactcttcctaagcaagtccggtatgtaggtgggtaagggtggttgtgtgtgtgtgtgtgtgtgtgtgtgtgtgtgtgtgtgtgtgtgtaggggatatgggatatggtctgtttggagacaggttttgattatgattttttatcatcttaaaagatccttcaactttgattcgtgaaagaaattttgtcacgattgcttgctctgcttttttgatctttactcccatgaagtttgggagagtactggttacaagttgggagtgatttcatacttacaaatagggactctgggtatcctctgaaaacgggattctcggcagtgggggaaacaagctctttaatggttaatgctgatagctgttgggtaagtttgtgaaactttgggtaagcggaaaggggccttctgtgattgggccaagatcccagaactctgagaggttgaggagtgaggatcccttgaactcaggagtttgggaccagcctgggcaacatgatgaaaccctgtctctacaaaaaatacaaaaaattagctaggtgtggtggtgcacacctgtggtcccagccacttgggaggctgaggtgggaggatcacctgagcccaggaggtcgaggctacagtgagctgtgattgcaccactgcactccagcctacatgacagagtgagaccgtgtctcaaaaaaaaaaaaaaaaaaaaaagaagaaagaaaaaaagaaaaaaaaaagaaaatcaaaaagaaaagaaaaaacaattattgacttgaggaatacttagcctgtatgcccaagtgggaagaaaagaatgtcatggtggatcagttcagggagccatgtgctgtttacagacttgctcttaggatcagtgactaagctgactggagtttatagacaaacccatgtctgaagattttaaccaaagaagggaataaaggctacttcttactttgccatgtattatattgcagagagagaggtcctcgcttgagacagaaggaagttaaggtgcacgagcatggcccaaaatagtgataaagagctgatagaaatgattaaggatgttgcaatatgtggagttatgcatactgtagaaaagtggtggtgtaatgcaccagataatgcacattcccatggcacagtttccttctatgaaagctcaggggaagagacagggctcagggagaaaggcaatatggcaataataagacaacaactacccaaaataatactaatatctaacaattatgtattgctttacatgcattaacttatttaaccctctcaataaatcactgaggtttctttttcccattttgaacacgagcacacaggaacagaggccagttcacttactcaaggctgcagaacaagtaaatctcgaagcctgattttgaacccaggccatctggcctcagagtctatgctcatgattctattttttatttttttcttttgagagagagtctcactctgtcttccaggctggagtgcagtggcatgatctcagctcattgcggcctctgcctcccaggttcaagctattctcctgcctcagcctcctgagtagctgggattccaggcgcccgccatcacacctgactaatttttgtatttttagtagagacgaggtttcgctatgttggccaggctggtcttgaactcctggcctcaagtgatctgcctgcctcgcatcccaaagttctgggattaaaagcatgagccaccatgcctggcctcatgattctatttaagaaaatttttttttaggctgggtgcggtggctcacgcctgtaatcccagcac

SEQ ID NO: 58190 - DNA, 736 bp, Homo sapiens
tggcaagaaaatagagggcctgtgcttgccctttgaatattttggccatatggggaagagagaggatggttattaaaggggtggcaggttaggatggtcttagggaggatgaaaggcagaagaaagaggatagaagacaatacagagaaatttagagcagaggtagcctcactgggccctggaaccccctgagatgacaggcaaaatgttgtgggtaggaattagagtgtccaggttgagcagatctggattttggcagggaagcaacgtgtatgctcatctgtggaaggagagctaggtaaacatgaggttgggaaattttgaaggctagtaaagatttggaacaggtgttgttgcgaaataataagggaggagtcaaatggaggcaaacagaaggtttgccttatattggcggtgggcgggggggagggggcgcagctgagataggataacattgatttgttgtataaaagtttgttttctggtctttctctagcaccacttggcagctggcagctagagaacatggatggtaaaggctttggggtgctagtgaagcacccctaaaatggccaactatgagacctgtgctgaataaggaggcaaatgaaactgtgagaggattgcagtaatagagagagactgaggaaaaggaaggcagagcaggaagaaagaagtagaggggagtggggggaggggaagagccccaaagataggatggggctgtgcagagagg

SEQ ID NO: 58191 - DNA, 1488 bp, Homo sapiens
cagattatttcatcaccttatgggttagatacatcagtataggtgataatcaatattgtctataatattttgtattcttcaaatatttaataataaaaataaaatgtcatggtctgtgtaatctctataggaactactttacacacatattactataccttatataaaacagtaaaaagcacttgttgaattaaaaaataaactatatattttcaatagggactagtaatttaaatctgcttttctatgttctcattgttacctagcaagaaatggcttgctgcctgatatgcataaaagccaatactattgcaccagcttttgagaaaacaaagctttattgcaaattgactggccacaagacaggaggcaatgttcaaatttgtctttcaagctggagtctgaagatggtaatgaggcatgatctgattggatcttgcaatgcagtaatgccaggaggcatgatctgattggatcatgccatgggatgatgccagggttcaatctgattggatcatggatcatgccatgaagtgtcctcttgctttttttttctttttttgttgagatagggtcttgctgtgttgcctaggttggtctcaaattcatggcctcaagaaatcttcacacctcggcctcccaaagcactggcattacaggtgtgagctactctgcctggcctggtgtcgacttcttaattccatcccctttccttggttcaggcatttagatgctgcccatggttgcattcttggttcacctgggcacactcagtttatataacttgcaacctggggtcaatagcaattgaaaaacaacacattattttattatacaaagtggaaccagattgcgctaattttgagggtaatggatattgctgggaagtttcttgtggccaaacactgttttaaagaatttttttcaagctgattattaacaggaagaccttttaatcctgccaactgatctaagtaaagtgtagaatgtttggagggcatcggcattacgaaagaccttagtccttgggaagaaatgaataaatgtgtcaataaaattttaacctagatacaagatcttgtacctagtagttattcaataaatatttgctgaatgaagcaaacacagaaaatataaaattatgtgaagtgtaaagtctgtttttctgatgctttgtgagggagagattatttttaaaatgtatttatttatttttaactttttaaaaattaaactttttttcttttcttttttttgagacagggtctcatcttgtcacccagactggagtgcagtggtgtagtctcagctcagtgctcactgtagccttgacctcccaggttcaagcaatccccctgcttcagcccccaaagttgttggaactacaggcacacaccaccacacccggcaactttttgtattttttgtagagatggggtttcaccatgttacctaggctggccccaaattcctgggctcaagcaatta

SEQ ID NO: 58192 - DNA, 463 bp, Homo sapiens
tctgaattcagttctttgaggaattgccttactgttttccacgatggttgagctaatttacattccaaccagcagtgtataagcattcctttttcttggcaacctcgccagcatctggtattttttgactttttaataatagtcattctgactggtgtgagatggtatctcattgtattatgggatctttggggtgttgtttttctagccaggaacctctgtggctggtggcccctgtgcccgagttttgctcgggcccactgggcttgtttcacctactcagcctggcaggctgtgtttggctcaccctactggcctgggacccatgcctgccaagggtgagtcaggcatggaacagtgaggagtgtgtgagtgagtgtgggatccggccactgtgcacagtcagacgtaccagctgccgcagtgggccgggcagctccaggtgctggcatgggctctggct

SEQ ID NO: 58193 - DNA, 2065 bp, Homo sapiens
gtatgcagtcttcctcatggcaataggacaaaagacctgactttgttggaccttaagtttattcctggtgcctcaggctgattaggagaccttttggcttcagcctctccctgtggggttttctgtccctcacccctcagaggacttgtgtaggatgccagctggccctgaggcctgtgccacattgatgcaaggatgagagtcaagatctgccatgataagtcaagggaatgtgtaaaatggcatgttggaactcagctgcagctggtcctgctgtcctgctcggtgtaccccccagccaccagagggccccaaatggcctgctttggagtttctccagcaatcattgaaatttggctcttgtcttacagtctttggttaggctcacaaagtttctgccaattccctgggctgcttcaaaaactctagcttacaactgatggtaggaaaacaacacctagaaaaacacagaccatgccttagtgatcagaatatagatgtgatttgattgcctcatactaagactcagctaggggtactttttgaataataaaacttattaagaatccccctcgattaatcaggtctttctcatcttatgattaagtaagcttggaaaacactgatttacacaagtgatccaccctcagtaaggcaaaataaaatgtagacagtgtaattacctcctgctttaaaggatgcagctaagaatccttttgtgaagtaagtttctccaaataagagtgaaaaagaataagcacctcttatttactaagttagcattttcatgccctggatttttgagggccactgttcttgcagtttgctttctataccagtttctatacctttattatctatacctccctatctttcattcattccctccttctacccagatatatacacgtaccacacaacctgaatatttcagagcaatcttgattccaagcattcattcactgttctcataaaaatgcttgtatttgtcagtcctaagaacagtcatcattcataatgtatctgtcagcaatgaaaacacatccccagtatatgcctaagctaacccctaatattttgtacctggaacattatctggctaaccagagacattgaggacaaagcaatttgtctgaaggacagactcccccactgcccccgccatccatcccctgcactgtactctgtcccccatgcatccttcactccctgggtggctgcagcgatattctctgtcttggtgatgtccagggtcaccgtctccagcctgtctgaagtctggcccctcagctgctctgcctccttctccatcagacacatagccagcaccctcaagctttgcgtatccagctgtcttgccagcagattcccgaagcccgagtcacagcccatgatgaagcagttatctcaagggaggctcaccacctgtctctcccactaccagcgcagaaggtagtacaggcccacgagggctatcagggagagtcccatggcaggggtctctccttcaccttgggaaagaaagaaaatcttctaaaccttaaaaagtatgttctctgaccacaatggaattaaattaggaataaataacagaaaagtatccaaaaaatctcccagtagttggaaaattacaaaatatttggctaaatgatacatgcatggattaaaaaagaaatacaaagaaaaattagaatatatttcaactgagtgaaaatgaaaatgtggtacattaaagtttgtggagtggggctaagctgtgcttagagagaaatttataacactaaatgcctatattagaaaagaagaaaggtttctttttttaacatttattttaagatcggggtacacgtgaaggattgttacataggtaaacgtgtatcatggggtttgttgtgtagattatttcatcacccaggtattaaggctagtacccattagttatttttcttgatcctctccctatccccaccctcaaccctctgatagaccccagtgttcattgttcccctctatatatccatgtgttctcatcatttagcttccacttataaatgagaacatgtag

SEQ ID NO: 58194 - DNA, 2205 bp, Homo sapiens
aaagcgcaggaattacaggcacgagccaccatgcctggcccaccattgcccctcttatgtacatatttccttcatgccccacttgggctccaacacttcatcccaagcagccttccttcgtggactccctcttcaaccttcttgtgctctgacacttccttctggtcattgtggttcctatcatgcactgcaacctcccttcaacatgtgtgcttaccttgtttttgaattgaactactcaggaatggactggtagaggagaagaaaagataatcttgctttttagaagttttttttttatcactaacttaaaaatcacaatattttaaacttatctttaaaattggaatattacagataaaaccaaagggtcttttgatcattatccctaattctgctctgcttactgtttctcaggaagtaactcgctgttactagtttgatgtgtatccttctaacctttaaaaatataattttatatttatatgtatgttcccaaggaaaagatatacatattaatcttttaaattttattctccagtttaggaaaagccatcgaggctagaacatttagaatatgatgcaaagtctcttccttgaacaaggcttacttggagcatgagtcaggattattttggttgctggtgacagaaatccaactgaaagtggcttagacaaaaagagactgtattggctaatataattgggaagttcaaggtacaggaacaccaggaaaacagcaaggacacaaaccacatactagtgtgcatctaggtcagcagtcagtgcagctccacttagagcagtgggagtgaaaatagcagaagtagcaagatatccacctcctgacattatgtaatacatgaaagtagaatgagataaacatctgtcaaggagaaatttttgtaaattctagctagtatcccacacatcaagtttgctgaattgcacattgtgcaattctaggtggcaattcaaaggacaaatcccagctttgtcctgggacgttttaatacagccaggatgaagaacagtggatgaaactctaaaggttcaacatcttagtatgcagtattgtgttcaaagagaaaacatttacagaagaaactacccagatagattcagggccttaaactgtgtcattagtacactgcctctctccatctcatggttccattctcattgtgttgatgtcattctcagtcaagctgtctccttgacatggtcaggatggccagtagtcaagcctacattctatcagcattgcaagtttcataataattttagcacaaaccccaggattgactctcattggcctggcttgggtcataatgttgcaggaattagtaggacaagagagaccttggggtgtatacaggaagatctttattgagtacactcagacccagcagacttatccaaaaactgagcctagaacaaagacagcacttaatttttatacacacttcaaaaagggggcatgctagcttgaagcaggcttaccatggtgcaaaagcaaggatacagaggcagaacaaagacagttaatcaaattgtgacaggctcataactcaggattacacaagaccattgctatgcagcccagatgtttgttatctgggtttgccctagtgcctagcattccatgaccttcactatggcacccagatggctgtatctcacccctgctcagatggtttagggtgttcactataccacttagataaaacagaatacttgaatttactagttacagagaacaggaatctataaactcataccataagagaaaggaaaatttgtttttctcctccctatgttgagggagtgctgggagagtcttcagggcacattagatagtattatcaagacttttcctgggtctgggctgtgcctgtttctgcctctgggacaagtcagcctaatacaggaaagcttatttctctttttaattttatttctctttctttctttaatttcccacctcaataactcattcatgaaccaatcactgtgcatggagggtagaaattaatacccattttctcctttttatagtagcaaaaggaattttcagtgttgggaaagaaataatttttgccctctccctctccctctccctcttcctctccttctccctctccctctccctctccctcttcctctccttctccctctccctctccctctccctctccctcatcc

SEQ ID NO: 58195 - DNA, 2082 bp, Homo sapiens
atgcagaaattaatttacttgcccaaggttacgcagtttgtatgtgatagatcctgggatcagtcctaggcaagctggctccagagtccatgtgcttccccacccatgacactgggctgcccccaaagagcatgccatgtcaggaataacacacaactttgactgctactgatccttatgtctctgctctagctatagccctgttattcaccaagcctcatcaaggctcattacttcccatatgatagaaaacaattgccaacttctttcatatttgaacttttctttccacttccatcaaaatttgttttatcccatagaaaaaacagaatctgctgattctgaattctatatccaccatatccacagtcaaagtttgcctgaagaaaactcagctaatggtcagaaggtcaactggccaatttagaccccatccagggagctctacttggagaaagagctcacaggcaatgtctgtattttagctttgcaggtcctcacattcaattccaaccattaccccaggagatcaagctctgaaaggaagttgatttacaaacccagaacccaatttacaagagaagctactgctaggtggaaaacctacgtagggcataatcatgggccactaacttattctgagtgagatcaaggacactgagagcacctattagagatcagaaggttgtttcatgaggccaggtttacagccaaagaaatctgatgtttttaaagaatatttctatcaagttcctggaatgaactgcctctcttcactctagtagtatggggtcctgagagccagcagcagctgttgaggccagaacagcctctctcttgcacagggcagcaggccaccaggcatggtccttctctttggctaccttctcctaggatccaggaaacccatcacccctggtagaccctcttctactctcacttgctgcagtgtatggagtacatgcatggaatgtgcacacattatattccaggcctgctttcttggagacatgcctcgccctgatgaaattctgaagtgtcccatgacaccttagtgagacatttgcaaatcatctcttgggtaaaggttcttctaagatgactcatcttgcatttgagtgacattatttctaaaattattccaaattctgagctcatctcctgacttacagccagtagctacattatgcatcaactagggatttaacattataagtgaagtgataatatatgattgtggtggtttgcacaagaggggagagagtaagaaggaaaggaaggagttaaaccagttaaacctagttaagtgccagtgattatttattcaagtaaatttaatactttgtacttatcttgctttacttgtcttggccagaaaaatatttaaaaaccctcttgtcactagaatgaccttagaattacgaccctagactcagacatagacttgacagaatacaaaaagatgacatttgaatatcagtaagaattgtctcattacagatagaaagaataggaaaataattcagcttagaatataactggaaaggatccattggatccagtcagttggtgaagcaacctgaatgagagttgcaggcttacatcatgatatggtttggatttttgtctctgcccaaatctcatgttgaattgtaatccccaatgttgaaggaggggcctggtgagagatgattggatcataagggtagatttccaccttgctattcttgtgacagtaagttctcatgagatctagttgtttaaaaatgtgtagcacctatcccttttccctatccttccttctccagccatgtaagatgtgcctgcttcccctctcatgattataagtttcctgagatctcctcagccatgcttcctatacagcctgcagaactgtgagtgaactaaacctcttttcttgataaattatccattctcaggtagttctttatagcaatgtgagaatggactaatatggaaattggtaccaggagtagggcattgctataaatatacctgaagtagggcattgttataaatatacccgaaaatgtgaaagaaactttggaactaggtaatgag

SEQ ID NO: 58196 - DNA, 821 bp, Homo sapiens
gggcttaaaacctagaagacaggttgatagttgcagcaaaccaccatggcacgtatatacctatgtaacaaacctgcacattcagcacatgtatcccagaacttaaaattaaaaaaaagaaacttgcccaacatcacacagttactcaatagtagacccaggactagaatttcaaggttatctagtccaacccccatcaggtacctgaactcttgtagagaagcccagccaattggcttggcacctcatgctcagaagcttccaggaatttggggattttgtttctcaattgccaggccaaggatcccttttattgctacacatttacctttgtaaacctatctggctaaaataaatgtcaatatgagctggaattcctggaagataaaatgccaaattacataggtagggtgaggcaaggagacaaagtagagaaggtgacctagaagtaaggtgagtgggtgagaggttgagttaaacttgcctggtcttgaacatttgtgaataatgcacagtgtaggccagttagctgcctgcctagttctgactcattccttactctcagtgcagacattacttcttccaagaaatcttctctgacctcccaagcctagactaattgcctctgccttgtatgagttcctatgacagcctattcttctcttgccattatgcatatcatatgttattataaattcttatttatttgtgtctacttcttgacactgaaagttgctctagggtgagaactgtggcatgttcacgatcatatccccaggccctagcacagtgctcacttacagtaggtgccccaacacaaa

SEQ ID NO: 58197 - DNA, 4024 bp, Homo sapiens
gccaggcacccatctcctggtgtggaaatatctttccctgtttctgactcagtgagtgctcttgcgtctgcatgagcttgtgtgtgtccgcggccctaaggcatgccccaggtttacaagtatttcagattcctgggaggaggggttggggtccttctactacagcaagagaggggtgttagcaagccacatgcccagtgtcagctgctgggagagcctccctggctaggggaccaacacacactgctgtagctgatctttctctgctccttctctagggtgcaaagcattcttccatccagcactgactgcctggtctgcctttgtggctccaataccaaggtgcaatgggaagaagtgtttagggtccttccctgggattagtcattgatacacagtgttcccctgtcctgggcttggtaacctcagtactgtgttcctcttggtaggatctgaagccaaagatccaggtccaattctgcctctggcagtttctgaccaagagatccatccagggaagaggtatcgttcaagaaactctctgacctggggcccctcctgtcgcccagcactcaggaaggtgcttcccagtgaatggccagcccaatccagaaagaggaagatgagggtgtcacacatgaagacagagagtgatctcatgaaaggaacttacaggctgggattcaaggaactccctggaaaagacttccccacaaggacaggagcaggaagactagggtgggccccatcccagacccatacctgagggagtcagagaaggcttccacgccatacttggagatgcagtagcctccaccaaaaagtgacacccggcccatgacactggagacgttgaccacacggcccctggccctcctcactaagggcagcaggctcagagtcacatcaatcacccccaacaagttcacgtccagtatggtcacgaagtcctgcttggtgagcaactcattgggagccgtgggcaaggagatgccagcattattcaccaggccccagagtcctgggacagtgggaagatgagagagcatcactgtgttgtgcctgtgcaggtggacagagttagggtgcaaatcacatcccaataaagtgagggcagactgacaggtgtgggatggggaggagggtataacaaacaccacagtatcacaggggtgggggctgagcattcagcagctggtgggccacaaaacccaggtctttctccatttactcttcatggaccagcctactgcctgaaagacaataagctattacccctatttaaggactgcatgaaatcatgttaaagaactattgtccatgcattagtctggaaacatgaagaccaatgtttggttagttaaacatgaatgttgcagacattacagacatacagctgcattttcaggtgtgctaacaccttatatagtgattgtccagcaactatctgttgatggaataagagacaagaaagagggagagtgagggagacaggaaagagagaaagagacagacctgaaatcctaggcttgggggaacttgggaaacatcctgtttcccaagtgtttgaactcagggcactggtcttgaaacatcctgcatcagtaacatttttatagaaagcacaggggaattccaatgcacaggctttgggaagaaagcaaggttgcgtcaccccactcagtacacagactccaccctctgccccagaaaatgtcaccctctcctcctactgcatcagaagcccactcttcatccttccctttagtcccaagttcacccagctctgggaaaatctctctggaagatgcaaatacacaatccccaggacttcaagtcaatagagttttcaacccacagagctagggggcaggagcacagggtcccttgagtccaggcagggggtggcagttgttgatctggaagggttggcccaggcatatgaacctgtcccctgctcaataacaggccctgccctgatgcaaatgcagattcctccacccagacatctcatttttaagaatccaatcaatactcacacttacagagacgttggcaaataaaagtccaccaagatgacatttatgatgaataaaaagcaggaaggaatttcatatccaaccactcagtatggattacataggtaaggctattggaaggatacagtattctaaataattaaatataattttataaaaacagtcattatggtggaaaagtgttcatcttctccagagaatttaaggtgactgaaactaagaacaaaatataaaatcctaattttgtataattgtaaaaaggacttatgtgtggatgacaatttcagggaaacttgttttcatctttattcttttcagtgttttccacaaagatcatattctgatttattgttacataaaataaatccatgtttctttcttcctctataataagacagatgaattagtgtagtgaaaagaagaaagaaagaaaaagtaaccccttactagttctgccttccttaagcagtccttaagctgatactctcctctgaagatggagatgatcgtagctctcagtggacgctgatgggccctagcaaaaacaaggtaaagtgctgggaacataagcctggctccagcacaggcacagcctccgtgcacacttgcagccctgtgctcccttctcaacgatgctccagcaagtctccagatctctaacccaggctcttagcatcaaacaacacatgacttctgcttagacaggagggagaggatagagaggaattctggagagaaaatctcatcagggcaaactctccccaagactagacacctccaatgtcgggagaggttaaggattgaaaagagatggggttcaggcagcctgttaagtgagaaatattagaaagctactgttacttcaacctggaaagacactgtaggaatcttcccagggagcagacaggaggtggtcccttcacacagagggaagacacagacagacttgacaaacctgggtggttacctttgtctctcacgcactccttcacccactgggcggctgcagcaacgctctctgtcttggtaacatccagggtcaccgtctccagcctgtctgaagtctggcccctcagctgctcggctcctttctccgtcagacatgcagccagcacccgcaagcctcgtgcatccagctgtctggccagcagtttcccgaagccagagtcacagcccgtgatgaacacatacttatctctcaggtggctcagcacctgcctctcccggtaccagtgcagaaggtagtacaggcccacgaaaaccgccaggtagagccacatggctttgcagaggacagacacagacaggctgtgggggaaaccagagtctggcctctgttcagacaggaggatttaagaacacagagggctgtggtaggcagggaagccctcaggcattttggcagggaatcctcactttcctccctgatgactgcctttctgcaacatatttattctggccccacctctctgctctttgaactgcttttgcagtactcatgcacacctttgcacacctcaagtcctgcccagtaggaagatactatcttcctactgggcaatgtgcccctagtctcctgatttctctctgccttgctatgcccactacatgcatgctgtgtccatgaaggagcacacacatatattcacacaggaacatacacagaactcacacaggcttacacacagctgcccacacacactctccatggcaaacacacccctctgctctaagtacaggggtcaaaactgtctctacaaagctccgataccaacactcctggtccatgaccttctgaacatagaaaggccttattgggtagctacccatggtttccaggcacattaggtggaaatccctctctgagcctgagtttcctcatcctgctccgcaccccagaatcaatcactcctctgaaaactagggcacggtcaggctgtctaggatgagaaggagaaggcaaagagtgagcaggaacaggttcc

SEQ ID NO: 58198 - DNA, 869 bp, Homo sapiens
ggtggcaggagggcagaacaacctccacgactagacttggcttcctgactcagtggccttctggaagttcacactgtggacgcgagtgcaattactgccaaatccctcagccttaacctgtccacaaagcacctgcctccaccccataagccaggcacgtgggttgatccctgggacagcctgcctcaccccttctgccagggtccaagcacagccctttgcctaacctgaccctggaaagtcgtctgcctttatctctgcctcccaatacctcctccctggtaccttccttcctttctgattgttgatcgcaaaatcttgtctacacttttttggggaaaaaaagtggggcggggaggaaaaagagtaaatttccaggaattgtttcactgctgctgtttctgctgcatagggcaaagctgctggcctgctccttttgcccaggttggcgaggagcctggcctcctgctcctccctctttctcttcctcccagtctctctctttccagctgcaccccaccccctaaaaagccccacatgaaaactgcagagctatcacttatttcttcctgagggaggagctttccctctgagcctctgccagaaggaaccaccatcacttcctctttctacaaatacacattgggtgacaggaataggtgggagaaggcagcaggtagaggtgaggctgcaggggggatgtctccatatgggaaggacaattcagagacccaggagacaggagccactaaagggcagtcttgtgaggaacggaagtggtcacagatgtggccatctggagaggacaaagaccagaccagggccttccttggagggtgcttgatctaggacaggcttcatttgcatgg

SEQ ID NO: 58199 - DNA, 981 bp, Homo sapiens
aaagagatgctgggtaatgtgtatacaaaaacaaaaataaataaatattaatgtccaaaaaggctttgtgagttaatgaaaaccacttgcttgtgaaacagcccggggtgttgctgaatcccaccaggggcagtgccagggctgaggccagggactcccagagctcacctgagcagggtgaggtagtatgagctactgaggtggcacctcacaagtatgcaagatcgagggccctatccctcaagacttctttgggcaaagccccttagaaaaccaagtaagagtggagctaaccagctgcgtgggctgtgccggcacactctgcagccacccacggagggcctgaaccagctgccatccaatagcgccccctggaggtgatggcaacgacagatcaggataaattccagcaggtcaaaggtgagctgacaaagctccggcactgttagcacaaagtaaacaggttacccgactaggacagacagtcagaacgcacaccctgctacacaccaccagttactcaggtccctttaatcctgaagggctcgcggtctgccactccaccacttcatggagtcagctcatctacaccacgggccaaacacttctggacgggagaccagatataaattaaggcaaggctgctgctgtcagatacatccccacctctccaccaagacactcatggccaacagaagtggccaaaacagatgactatatcaaagtggttccctatcctctctgccccacagaaggccggacgtcccgggccatcactccataaaatcctgtttctttggaaatgaggagaaaagagaaacctctcctgtccatccaggctgccacttctggtggcactgcaggacaccccttctggctggcaggggttcatcccaaagctttctgacctaaatagaaagctctgtgcctagtatggatctagctgccaaaagattttcactgttcaatcagcagattagg

SEQ ID NO: 58200 - DNA, 1545 bp, Homo sapiens
acatataaggtggttccgttttttagctttgtcattgctgtgtcttcaacctctcaataatctccaaataaatctcacgttcttgaatccccatctctctctgcctatactacatacccgctctctggcctttcgataacccagagcccctccagatattgctttatcacagtccctgtattctgtgaagttaaaacactcagaatgcacagtaagaaaagtagaacacaactgtggtagtatttaatattactttaatatgttgtattctttttcgccacccttttcggggtttatattttgttgtccctgcactaacagatttacttgatgccgcaagaaagacttctaattatacaggtaagactcctagaggcttgttcactaccactttctgccctttctgactcctgcacgactaaggaagaagagctacttgcatccctgttcagtctcacaactctgcccaacacagcccctttctccatctctccagattctaacaactcccaactttttctggggcccaggaagcgtctaagtattgtggggtaccggccaagcatctcccgggccctggtggccacccctgaacgatgggcgggtcggagcactgggcagccagaggagagggtgggagagggggaagctgggaacttccaaggacaccccaacaatccccgggcgccgcggtctcccctccggagtcgcatctgggagggaagggcgctgcatcggctggggcgctccctctggaggcaacgagcgcctcagtccctccacaaacagcgcggggctcacccgggtgagcctgttgggggcatggggctgaataaggggccaagcgaggggcggcggggccggccggggtcggcgcgcgggcggggaggatgggtccggccgaagggagcgggcaagagggaccccagcaagagcgagataaatgccgggccgaaggtcgggcttcggccaggggcagccctcggcctggccgcgcttacccggctctgcggcgccccgagcaccatcgccgccgccgcttcacacaaaggccccggcccgccgtgcccggcccgacgaggaggcggcgccgccggccgcggccagactctccatccgccgcgcggctcgccgcgacggcccgggccgcccccgccgcccggcccgcagcgccccccgccgtcccggaggaggcagcgccccccgccgcccggccgcagcgccccccgccgcccgggaggaggcagcgcccccccacggcggggccgggtccaggacctgcgcgaggggtgcaggggcttccaagtccccaggctggctttttctaagcgcccatccactgtgcgcgggacttggtgcctgaagagtgaaaaaccctatccaaactctcttcacctcccctgttctacgctcacagttccaaaagcttctcctcagaacatctactatgggcattttacaaaatgttgtaagattgtttgattactatatatctcctccactaggctgtgggcttcctgaaggcagggatctgtggctttgcac

SEQ ID NO: 58201 - DNA, 636 bp, Homo sapiens
tgttttatcagtgcaattcaggggcataacaaaggcccctgtaccacgctaagataaggagcctgaggatttcactggctgttccattagggtacagaaccccccttaggatggcgggtgatagttgacatcatagattagtaaaagacatccatacccatgcataccacatgtaagtgccttacacattctggggactgttaagtcagagctgcaggagctggtaacaggcactttagagaggagtgggagataaatgttttccctttataataactaaggcagccagttaacggtgaagatatctgctcctctctttcttggcctcggtagtaacttccctgtccacatcccatcctagctggatcaagttctgtttgcttgtccacagccctgctaaactgtaaactctgtgtatgagtcatcatttcatccccaggatctgtcacagaacccaggctcagcatttggagacaaaaaaattgtatagggtcatagatttgtcctcctctgtggctgggtctccggacagccttgatccccacctccttctctaattaagtagggtcagattcaggaatgaatatctcccagacccatcctagtaatacaagtcattctgaatattttttttct

SEQ ID NO: 58202 - DNA, 3748 bp, Homo sapiens
tcaccactcccccccccccacacacacacctgtctctttatgtttttctatagtttcccatggtctccgtctttgtctttgcctctttccctttgctacaggctggaaattccttgttctcaacggaagggagtaggaggggagttgggggtggcaggagtgggcgggaagaacagacatctcggcagctctggctgcgggctgcgggggcgctctgggcctctggcgggccctgacaagtcaatgattttttaaataggggctcatacacaaacctagagagagagaggaacacagatatacaagtggatataaagaaacatataaatacataatctcgggtacagagacacaaactggcagtagcgtcttaaatatgcttagcattctacaatttagagagttttcccgtacattctctcatccgaatctcacgacaatcttgagaaacaagggcacaaagacacaaacacccggtagtttcactctcacacacgggttcgcacccggacccccgctggctcccctaggggagtgggcaggccccttctgcggaatttctcttccctcgtccctctctggccgagcaccccctctcccaggacccgggagcggagagctcaaaatcggctcctccctccccctctttcccggatcaggaccgggacccgggcgccccgcgcccagtaggttgccgctcacttgctcacgccctactccgcctcctccttgggcgggcgtctccctccagatcctaaggctcagcgccgccccaagggggccggggtgggagggaggggggcgcctcgagcagaggctgcgtgggcggaggatgtgcgtcacggggagcgtgggctgggggagggagggggcacgtggaaacccggggccagcggctggcagcccgggatccaaaataacctgaggtggggggggaggggtcgcccacaccccgtacggggtcgggagcgtccccaggggagcccgtctagccgcaccctccagttgcggggcgggggactgggagacgggactctgctcgttcccaccacccccactgtgtttggcgcttaataggttggagaagaggacctgagcaactgaaatcctcccaccaacaacgcgctccttctccccggaccccacaaggcggaaaggtctcctcgctaggccacattgtaaaaccagccccggtccacggcctccacgccccgccatgccccaccccagcccctcagaagtgcggacagagaggcggggcggggctgagattccggactaggggaaacctcacctgtggccagtccgctcgctttccccggcccccaccccccctcctttccctggggcttagagtctatgggccgggcccttagagcccccgcctcccccaacagccctcccagccgtgggcgggagtgcaatgcgaaccagatggggctaggagaaaccaaagggggagacggtggtgggttgcagaggcgggggctaagctccttcaaggcgctcctccttccagctccgccgcaggaagtcacgtcgtaggctcccgacctcttactcatcttccactagactctcgggcgaggtccctaatagacggccccaggaagggtatcgtctttgtcacacaaaattcccaggcagggcctcatcctcagcaaacagaggacaagtggaggaatccctgcctgacctacgcgctgacaaaagccgacgcgtctaatcaacacgcgcacctaagtggtggcgtgcagcataaccctcccattcctgtttcccaaactttccaggctagcatggaggcctgggtttctgagagcgaccccctcagattattccattggggctgaggaggggcgcggggatatctaggagatccctgcagagccccacgctctcaggcccgccttaagtgcacactatacgggagtcagatgcacgcacaggagaagccgcacagcccagccttcgctaacttttcccggctcactgctaacattcacacgtccagcaccacaaggcctgagtatgggcaacgggcgtccccgtagttgtttaggcgcgtgtgcacgtccgtgcgcttctgtgtctttgtgtacttgtgcgtggttgtgaaactcctctctcagctcggaggggtgggggagagaaggaatgtcgccggcggggcgctcacgtgggtacgtgggcgccaagagggccggctgtgcatccggcgtgggcggcacagaacgacctcgccccgcccgctgggtccccaagcccgccctgcacagccgggcctcggtcacctcggtccccaattcggcgccccggctctgaatccccgcccccgcctcctgctccacaccccctccccccccgtctccgcctctcccagtctctaagccgcggcgtctccgcggccgagaggccccagcgcccgcctccccggcccccgcccccacccccgcccccggctctgcccacgccctccgcccgccagcccggcagccagcgcagctccgggcctcgctccctgtgcgtcctgcgggggcggaggcgcggagaggcggcaagcgcagccggggagggtgggggggcagaggcacagacagaggcgcggaggctcggagagagaagacgtggagggagggacagagcctggacagcggtggacacggcatcgtgcgcggggaagagggcagcacgcagcaggcgccgagcgccgggcaccgagaagggcagcccgggtgatctccggccgtccatgcacagagcgccttcccccacagccgagcagccgccgggcggaggggacagcgcccgccggaccctgcagcccagactcaagttagtgggcaaagggaggcagcggggagtggagatgggtggagctggacttgggaatggggtccagagggcggaggtcgaggggaggacgtggggaagcaggacgggggtggggggtggagactgatggaaaagggggtgcgtcttcgaattagggggccctgggagcaggcaagcatctgatgaagctggatatgaaagagtagtacccaaatctccattcctggtttactctgtgggctccatctggcctaagagccccctgcaaagaatgtgggagcctccaagcaccaggggatgccctggagctcgagctggcatcagtgcggaaggtggggggacgctcagttgcctcagtccctcgttggcacggagcgcgcgggcccccggtgcctttgagttaaaggagcatcagcgggggaaagggggggtgacgagggaggcagggaggccttaggcgttccttcccatatctgtccctttattcacagagcggggaggggagtttcagtgtgcagccccttcatcaagaggccttgagccgctcccccactccacttgaagatgcgggtggaaaatatgggagaggagagtaggcgggagcccctgggcggttttcgcctacagacgctaccactgtgggagtgtgtgtgggcggaacggccccggagcagaacaattgcgcccctccccctgccacggcccctgagctgaaggaaaaggctgaccgaggaagtggggagtgtcactgctaggagaggggccactgaggagcactgggcagcctggaagggtggagaggttctgaggggagagaggaagcgtgcgttaagaatgcttaaccaggccgggcgggcccggtggctcaggcctgtaatcccagcactttgggaggctgaggcgggtggatcac

SEQ ID NO: 58203 - DNA, 1411 bp, Homo sapiens
gtatgatctcagctcactgcaacctccacctcctgggttcaagcaattctcctgcgtcagcctcccatgtagctgggattacaggcatgtgccaccgcaactggctaatttttgtatttttagtagagatggagtttcaccatgttggccaggctggtctcaaactcctgacctcaggtgatccacccaccccggcatgtcaaagactgggattacaggcatgagccgctgtgcccggccaggaactatttttccaacaggtcaaagtcactttgaatcagagctctgtttacacacaacctgggtgagtcatgcaagtcactggtaaagaggaaggacagatggcccccagaccaaaacctcagggatgtcagagaacgcatctccagagccaacccccaggcctggggtttttcctccctggtccatgacaggccttcctaaaggacctgagggggcactgtggagaatccagtggaaggtccctgcatggaggctgagcaggccctgagtgccccagggatgaagagcttgggggtgggaggtccaaagggcaggagaatgaccttgttgaactgcgaccaggacacagaacggtgctggaaggcctccatactgaggctgttgtcattgaagatcttctgggccaggaagaggaagtgctctgggagcagcccccggttggtccccacctcagccatgaacttcaggttcagagtttcacacatcttctcccagggcacccgctcagccaccacaaagggcacgcggtcctggggagaagggggaagaagagagcactgcaggctaccgtcttgttattcctcgggccggccttcatccctcccacctgcctgtggcctacccctccacagcccctgatatcgctcacaaacatgctgttttttctaggttacagtgctgtggcctgatagttgttaagactggggtgaaaagaggtcagaagcacgaaagcaggcccatgagaaagtgttaaggtcacacccatttaaacatgcccaccaccccatcagcaggcctgcaccactgcccatgttagaacccaccctgcccctgttccctccaactccaggactttcctcaccatctcagagaaggcattgtcccacaggatagtggctttggcattgttgtcttggttgccatggacgatgaccaccaggggcagagacagggcctgaagagggtgaggacaggggtttcttttctttctttctttcctttttttttttttttttttttttttttttttttttttttttttttttttagatagtatctcactctgttgcccaggctggagtgcagtagtgcaatctcagctcactgcagcctcagccttcagggctcaagtgatccttccacctcagcctcctgaatagctggaact

SEQ ID NO: 58204 - DNA, 2615 bp, Homo sapiens
ctctagcccaagagagaaaggtcctctggagtgagtgggcaccgctttcctctgcatccccttgcagagtgaccagcctcctggcatggccctggctagaaatatccaacccctcttcttccccagccatcaggaggacacatttctccccaccccaacccataacaaggctgggtcgattggcttgaccaggacaggggcaccttttgtcttcagccccttgaaggggaagggagggaggagccacggcgtgaggggcggggccagtgttacctcccaaactcagaagggaagcgcaaggtctgggatcctcgtccgcccgcttggtggcctaaactcgcttatctcaacccctatctgcccgagtcctctgattgtgggaccacaggatcgaaagttaaaacagcttctctgagttgcccaatgcgtgaatgtggcggtgggggcaggcggggaggtggagccagttcagcacgaggagggttaactcggcgccgccgctgggaaatctcagcgtctacagcagccaagcgtggagcagttttgagggggaaattccccctcgtctgggccaccatgaggtctacatctggggcttgctcacgccccagccacacccttgaacaggaacctttagtggagggcaggataggggtttaacaaggatccactgccctctggcatcaaccttccagggaggggcggccacttcccccgactcagggcagaggggcactccttcacctcctttccctgactttccatggccctgggggtgcaggggtgaggctgtgaaaacgtgacccatgggggaggggagtactgaggcctggaccctcccagattcctccaggagttcgaaactgctaaaacccagtgccaccagccaccaacactagctgaaaccatctcttggggaccatccacccagccaggggaggatcccgagagctccccccacgaatccacccccatgcactcatagaggcccccgcacccacctcggaggcaacccctcacctcggcaacccctctgctgtcttctccctttctcagcgggcacttccaggccccataggtctgtagctctgtccagcgagttcaaggctggccctgctagcacctccccccttccaccaccaccaccaaaaagaaaaataagataaagcacacacatacatacacacacacacacacacacacacacacactcctctcccgtcctccctcttcagtgtaagcagtggctgccccagcccgctgtttccggcttctccttctacccaggtccctccctggagctctgacgacacagagaagagaaagtgggctggaggaggaagaggaagaaagtggggtgaatatgtgtgcctcctgtgccgagtgggggaacacgtgggggatcaggactggggtccaggccttggagccaggcttggggggaggctgacccccacttactctgtccccctcaaaagcatcagcttttctccagaaagtcacccaatatcaaacagagatttgccacccctaactgcctggctcccaaactcaaactctgccaagggctggggtttggacccacaagggactgggctccccagggcctcaggaaaagtaaatccctctggactctgcgctccctccagtggaggaccctaaaaagccgccagggagctcgatgccagccaactcctaggtccccctcccttccggcagggaacgccttagaggtcggtctcgtgaccactgacgggagggagtgggggaggggaaccctcagctcagaattctggaagactctaggagtcccttggactgaagctggtctttgctctctcctcacagggcacccctcctgagactgtggtgggaaccagcacaagccggagctgctgcctgcagattcacaaggggcaagtttgaatacgaatctgctgtgttcctatctgccaagttcctatatgtttctggggtaaacactgagacacgccaagaaacaaacacacacatgcacaacttccctgaccacaagactacacacacacacacacacacacacacacacacgtgcaggcaggctcacaaacagagcccattgcaatcacaacaccacacacacacacacacacacacacacacacacacacacacagtcttgctcaacttctgagtcatcaacataactagtggagggttctgcagtttttgctgggggaggagctggaggagaccaagggatccagagaggcctttactcccggacacctgagagccccggtgtgtggaagaggtggtgtctgaggggcggtgggaggaagtttctactcccctcctccctcccatagcaggggctgggctgaggggccaaagctaggcctatgctgccccctggtgcctgaattgatttccagaaccagctcctcctcctccatcccttgctaccccgcaggtctgtacatgagtgcacgtgtgtggacccagccaggcagcagagggtttgaacacagcaaaatatagcagttaaaagactggactgtggatacaggctgcttgggttcaaatcctgctaatgctgctaaccacacaaccctgagcaatttactctgtgattc

SEQ ID NO: 58205 - DNA, 5296 bp, Homo sapiens
gaggttgcaagtgagaagtgcatgctgactgaggccaggttttggaaagccatgactgaagaggagttcacatttgactggtctatagacacccactagaggttccccagcaaggaagagacaccgggaaagcagtttttggaagattcacctgacagatgggtagggggagggaggaaagccccttcaagccctcaggctacatgtggttgctccagataccgttttcctctcaaagctgtcaagctgtctaaagtctgtttcgacctgatttcacttggatcccaatactgggaggggccctgggaggaacctcgtaggcatttggtgagtccgcatagtgcgtctcacattgtgttgggccatgggagctggataaaaggagaaataagaccccgttcctgcctggagcaactctctggcagtggaaatggaggaaatctgagatatacttcagaggaaaaaaatgacaagcctggagcacaggctggcaagattggatataggaaggaaaggcccccttgagttggcataaagtctgaggtttctagcccaggagactaaaggcaggtggccaccgcgctgagcaaagccggctggaagaagctaaaggttgagctcactgtcattaggaggcaagtccttcgtgctgctcctgtttctgccaaggacagactggagtggggacttttccgtaactagaacgtaaaagggggaacagtccctcctctccagcgtcaatttttggcagccgacgtcgtctgccccgctccttgaactctgacatgcagacacctagaaagtcagacactaaggtaacagccataaaacgccgcccagaagggggcagtgaccaaaagcacgttcactggcccctgggaaccgcctggcgcctgccttctgcaaagtatcattcccgtgtgggctgagcctggggacaaaggtccggcgctcagcagacacctccttggaacccgaggcctggaaacgaaggtccagagtccctcatcttattccaaatcctggcgctcggaatctaaaaccctaacttgatggcaagccagtcagaaggtattaaaaaaaaaaaaaaaaaaaaaaacagaaaaataaatgagccccgacttcttgggcgaaagggggtggcctttcctcaaccccacccgctggtgactcacctccctccaaaccagggcctgcccctcccgcgcctagggctgggcgagcagggcgggcgggtactaaggtgggctccatccccgagccccacgcgggcggacaagctccggcgtgtcccctcgggtgtccctgtttactccgagcccgggagcgaggtgggggcgggtcctcgcggtccctccccaaccccgccccctccttcgcaggccccaatcccagtccggtcttccaaagtctccaaatcaaagctcagcctttccctgcaccttccccgcggactggcggtccctgtccccaccccgggcagaggaggcaccttcagggttcccctagaaaatcgagcctcggcccagaccactgagtcccggacgcccccggagggagcctgaaatcctagagtatgacactgagtttcaaaggggagccgctcagctctccgcccactgcccaatcccaccctcgaccccttctgctctctggagcaccagggaggagggcccagccaggggagagggcgccccaggccccaaactagccagcgagtccccgggaccctcactcttggaccgctttccagaactccgaaccctgtcgcgggtccgcgtcgccctcccccgggcagcgcgtcaaatcggcgcatgcgcactcactggattgccgcgtagctctttctccccccacccaccaaccttttttctttccccgccccttccctccctccctcctcaacccgtcccctccctctcccccatcagcccccccctcggcacttcagtccggggaacagcggtgcgagctccaggcccatgcactgaggaggcggaaacaaggggagcccccagagctccatcaagccccctccaaaggctcccctacccggtccacgccccccaccccccctccccgcctcctcccaattgtgcatttttgcagccggaggcggctccgagatggggctgtgagcttcgcccggggagggggaaagagcagcgaggagtgaagcgggggggtggggtgaagggtttggatttcggggcagggggcgcacccccgtcagcaggccctccccaaggggctcggaactctacctcttcacccacgcccctggtgcgctttgccgaaggaaagaataagaacagagaaggaggagggggaaaggaggaaaagggggaccccccaactggggggggtgaaggagagaagtagcaggaccagaggggaaggggctgctgcttgcatcagcccacaccatgctgaccccgccgttgctcctgctgctgcccctgctctcagctctggtcgcggcggctatcgacggtgagtgagattccgcgtcccccttggacccctgggggcaccctctccccagcccccactcctgcatacggatggggaagggagacgcgggagggggtgccttttgttatcccagtccagctgacacagcagcggcccgactgggggcggggatggggtccgatttgggggatgggggccctgggcaaatgatgcttccggggccccccagcacaaacaaagaccagaggcctgggtagagagaagagggctccccatttttctgatcctggggaggagaggccttcttttcctatctctgttcggggagggcctccgcctcccctacatcctcacaaccccccaccccccatctgaattgtgaaggaatccggatttgcaatgttcggctgcaaaagggggtgggggtggggggggtggcttttgcactggcctctgtagctcgaaaggggagccaggccaggggtaccctgccgggcagagggcaggcaggcccgggaaggctgtgggtggggagagggagggccccctgcttgggcgtggaatcgaccccagagccccggctggaggcctgggtgctgaagtaggctcttccccctctcagggcctctgtcagtagcctggggtagggctgtgttggggggcagagagggggagctcgccatactatgtgactttgaattttccttcttaattcctgggagctttgagatgaaaaaacgtcagatgtcatcactggggaaggggactggagaatggcctggaatgctggggtaggagggtgggggaggctgccttcttcctgacttctggcttcatcacagtttggattggaaggagagttggaggttggatggggattatggctgtgcccccacactcctttagtaaatctgtttattccctgcacccctccaagcccaaaaccccatacacacacactttgtatattgcagagttaggcttaggctagaactgcatccttttggggaaatggggtgcctctcttccctttttttgtcagctgtttttttctcctacttgtgagtcactggttcaagtcttgcccaagctttaagcattaagctggggtcatggggttgggctgggctaggtccctgatttgagaaggggtgggatctcatcccctcctgtcatcttagccctctcatccaaagacaaaactgggctggataccatcatacaccccctcctctgtcttgccagattgggattgggaaagtttttctctgaaaccagattatctccctccctctccctaacttgcttcaattgggggaggagacttacagggtcaggaagcagctgtgtccccaaaaaacatatttagtgtccctcagttgtgccatcttggggactctctaccccccacccccaccccaccaattagctgccccggaggaggagaggggcttttcctgaatatcctccagatgccgcacagccggcttctgcctataactcctgtcattatcatgtgtttttctcttgttctcagccctgtgaggtgagaagggaaatcgaggcagggagattggggttgcagccgcttctgggaggaatagaaaaaaaatttgagagagagagagacccatcaggagccccttgaaggagggtggctagagttaggcagaagcaagagggtttctgtggagagcagggaaggtcaggaagggaccccagatagcatcactcccagggctctaaaggagttctatttgccacaccaagttagtggaagagagagactggacatgttctccttaactatctccctaccctttcttaaaatgttcacccacgccccctctgtatctccagctcagatcaaactatccaaagccccaggagaggacccctccccaaacacacaccaatatttctgccttgggagtgggaatataaataatcagctccaccccactcttgggtacagggtggtgagaaaggggaattgcatagaaatgtaagttcaactctatccagaggcagcctaggggatcccttatccctaacccctgccctcttgcctcagggtccatcaacattgaactttcttgtttactttccagagaatggagatgacccagctcacctgacttagtatgttaccttcctcctgctatcacagccttgctgctttctctccagggcagcaatcctaggggctttcccacctcttctgctttctcttctatgcctgaaactgcctctggggtcccctgccctttggggagtaacgtcactccccactagcgacaaaattgagtgtacctgctgctggagaggttgcagaaagatggggtggagaatgggactattgagggccctgctgagattggggaacattttctagtggggagggcacccccagacaaatacagctcacagaataaggctgacttcctccctccctttttcctgaccttcctccacacacccccttgagccggcatattaccagttactagagtaggtacagtggaagtgagttatgaagctggggtgttagcttcctggatccctgagagaaagttctaaactcctttctccctgatcagactcacatcctaaacgtctccctttgcctcgttgtcttttaaagcaagaatgtgtaagaaattcattttggggttggagggatattttgatgtttagggctgcttcactagacatctttttcttctgatcttgttctctctcctctcttcattttctcaaccacccttccaccactgagcctcccaaaggatgacagcccaggtcctggccagagtcagtt

SEQ ID NO: 58206 - DNA, 2644 bp, Homo sapiens
ttaccttttgggaagcccttccttactcaagtctatctctctttcctcctgctgcagtgtgagcccttgcacatcagaacccccaagcctaggtttattcccgcccagtactctcttctcagggtcctcctcactcctcagactctttacctttcaggtcctccagctctgcgtgtgggctcattgctcttggggcatctgggtgcagctgaatggtactgcaggaaggcccctgacttggtagtgctgggtatgagcgatagagaacctgcctccctcttctgtcccagatttcagcctggttagcaggatcctgcattgtttggagaaggaagcagttggctttggagtgtttccggtgcaatggcctcaggcaccaatataaaccctccctgggaaagaggtgaggggtatatgtggagagttgtccctcttgctcccctaggggagatgaaagcctctccctctcccaccaggccttagcttccctggctgaagagctccattttcctccctcctttctaccctcctgactccaggggtggtagtggtccctattctgggtctcccttgagtcaggcactgcctagggccgagactctgtctctccaagataggacagatcttgctcccaccctactctaggctcagcggggtagtcattctctgggttcatcccaggacaactgtgtcatccccttggcaatctctggactgagcccccttcctggcttttctggctgtctgtctgtctttctgtctgtctgtcattagtgtgcgctgtcttggctttttagaacctctctgtctctcaccctctcagttcatctcttactgccgaacctttgtgacattctctgccctgctttctgcgtctctgtcacttgtcttatttttctctgcctgtctccatttacccccatccaggcctcttggtatcccaaaagcttcttgggagcaagagtctctctgggctttcccactcaccccctggctccctcccctctgttttggctatttttcccccttcctggccagacccagtgtccagttcagcaccaaaagtttcctctccactttcctccgacttcctctttcttcttccccctccactaatttggggaatgggttttggagagaatgtttctggaagaaaggaacttgataccctttgtgggctaagagggagaaaggaggtatttcagaaggaaggagggaggttagacttctggcagaacttcctcctgaccaggagcctaagaactggagaaagatgtaaggagtgagtcaagaacttggagcttttactctggtgagcataagctgtgtgtgtggctggggtggggggagaaggagaggaggcttagaaatgcctggtgagtgatatggtgacctctggaggccttctgggggtctggcttttatttgtggggaaaggaaaagctggtgggggaggtcacgggtcaggctaatgtcctgctgcatcaatattgactcagaatggaagcggagacccttcccctcccctggctgtccaagccaccctgtctgtctgtctgtccaggccgcaaagcagaggcccagactcaggaatgacaaaaatgtgtctgagcctcaggaaagagccactgggcaacacccaaaatacaaaaaattcagtgaaaacctctcggtttgggtttgggaggcccttgctgccccacccccataaggtcgaaaattcagattcctgcaggctctgtccccgcgccgcccccccaccccaccccccgcaccttgagcatcctcctcccactctgttcccttagctatatcatgtggttccctttagagaacccccctctcacctagctcagaggggagcctatctctccttctgctgtgtccactcttaaaaagggccccaagagtccctgtcatgcttttgcagtccctgagtctccttgtcctttaagaagcacctctaaggtcttagctctcttccttgctctcgctccctcaagggggtatcaaaggatgggttcccctcctctggagaagactccttcagggttggacttcgctgtcaccctctctggccaggcattctcaccccacttccccacccccaaggtcccagaatgggacacagaatgacagccaagggtcaagcagggcagtggggtctgtgttgtgtctggacgcacacccaactctacacctcctgccctggctccagcttggtggccctggggaccgtggctgggctgggtgcctgggtttgggggggtggggcagggtgttggccaagttagcatggcagtcacattcatcttcaggcaaagccgagaacagacggcccctgtgtcctggtgttcttcctccaaactcgctctctctccttcctctctagatctctccttcttcttctcctgcctgtcttccccttcttctgtcccattcttgctcctctctgtctcccctatgcccttccctcctctctgaggagccctgaaggccaccccttaaaatcctctccccactgccagggccagagaacgacagcgttctccctgcaatttcccttccttgttttttgtttttgttttgttttgtttttgagacacagtctcactccatcacccagactgaaatgcaatggcgt

SEQ ID NO: 58207 - DNA, 1991 bp, Homo sapiens
ggtgaaaccccgtctctactaaaaatacaaaaactagctggacatggtgatgcatgtctgtagttccagccactggggaggccgaggcaggagaatcgcctgggcccaggaggtggaggttgcggtgagctgagattgtgccactgcactccagcctgggggacagagtgagaccttgtctcaaaaaaaaaaaaaatagggaatggaaatggaagcaaggctctctaccctgcccattcctgcccagccttgccctcctgtgcctctgctaataccatctccaactactactgtgtgtgccaagggcatccctccccactgctcccatctgggggcctagtgattaggggttgggaaggatggggtgatgggtcaggggaccaggagtgtcccagaaggcagggaagcagagaggttagataagaccagctcggggcctctagtagtaggagttagaggaagacaaagagaaaacatgtcaaggcctaaatgcaccccccttcaccatcactctgtcatcaaagccagggggtgctggtgtctgatgagagtaaccaagaatagcaaaggctttgaccctgactcccaggaacaggcagcctagaggacttggaggggtgcagtaaaatgtgcttctggatcctccccacccccaccgcagatacacagtgtctaggaactacccaaagccaccccctgacacccccaggcacatagaccatggctgagggtctgggccagatggagactgatgctagggaaggaagagcagtactaggggactttgggttcacagagttggcctccatccttcatttatatccccttttctttccttgccctagcccctaagacttgcagccccaagcagtttgcctgcagagatcaaataacctgtatctcaaagggctggcggtgcgacggtgagagggactgcccagacggatctgacgaggcccctgagatttgtaagtaccttttctggattcttctccccaaacccttaacttatccctcttcctttggcagatgtttgggaggaggacagctgatccctagcctgatgtggaccttgctcagtgattgtatttgtccatgacacagctaaaactgtcctttacaccccttcaaaatgcttggcatggtgcctgttgggcttagaaatggcacctcagatttctccctcaagtgctgcaccccaagacagtgttctctgggctgacagctttgctagaagatggcccggcctccctttccttccagctcttcccttattccacctctcagcctccctgacccttgatgattggccccaggtcttgtcggatcctcagatcttcctctgtcctttggctcccaggccagaggccactggcacttgctcagccccataccagaagccccacccctgtgctcttcccgctacccccgccttcccctgcccccagtaagtggtgtaatcggaggcagctgttttaactgggagaaaggtccccgcccagcttttgccctgccaagggaagtggagaacttgttggtgggaccccagagtcctgggtagctggcacagtcctggtggctccacttttagcctctcccctgcttggttaatctgggccagggtcaaagcgcccctgcattcctaggtccgtctctgttctctctcttgggctttatcctgctccagtcccatctggtgtcctgtccccacacccccacccgtaattatcaggggtaattttagggctggaaagggagccactagtgggctctgcctcacccctacactctgccctggagggtgggggccaggggtattcagcaagtatatctacggcatggtgcttcagcctggagtctcttcttgtctggtgccacctgcacccccacacttttgaccctgatgcttgggcgttagaagtaaagaaagccatgcagaagggtcagatctgcctctttttgttcattcttccttcaatttgctgtaaacc

SEQ ID NO: 58208 - DNA, 1904 bp, Homo sapiens
cccagctttgtccagcctcctgccaggctgcccctgggcaggcctggtggtgcagtctaccgaccccagcccagccctgcatttcctaagctgagctcctctgatctgtattcccttcaccttggaggatgccaccactgtagaaagaatgaggcagactgcaagattggggtcctgggaacatgggtgtgtatggtgaggggaggttctgaggttgtaaatagaggccttgaaggaaatcgggtttgctgaagtcactcaggagtttggactgtgtgtgaaaggatggtctgaaggggctctcagaggtctcagggttcccctccctgcaccatgctgcatggggaagaaggaggtggctggggagctcagcaaagggcccctaggctgcaggcagcaaggttgcgaaatgggtcccaggtccagctggccaacttcacttttcccttcctctccctttcttttatttatttatttttttagtgtgtgtgttttcgaaatcacaacaggaaatggggtagtgatttgtctagaggggaggcaaagaaggggcagacagcagtccctctgagtctaatgaactggctgctgctgctggaaggggtgctacctccccactgtgctgggcacccctggaccctctcagcctcccaccctgcctacaaagcacttccagacttcacatgtgaaagctaaccatgcccatccttggcctttctgacccatgggatgccaggctgtttggggaggggtggctctagccaccccactctttggccttaggccccctgcatcctggcacttttgcttcccattcctgttctgagtttcctaatcatttaacagctcactcttgctcctcctctctcctggcccgggccagccctgtgtctcccggcccagatccagccctgtcctctcctcccccgctgtctccttgaaattgcctctccacccagactgctcccagcactccccttgctgttttcaagccaaaggaagtaacttaagcaagagagatgtgttttagagcccggcaaggatttctcaatagagggaagaccctaagatgggctgagtggaatccaggcatcatccctgggatctaggtcgaaatgcctcttggggacctaagccaggcaggggaaggtagcaggacataaccacaggctggaatcacaggcaggagcaggaagagagcccaggagaacgaggtgacacaacacggctaagctccagactggctggtggaaggaagagctgaagtcgggacccagcaggaaacaaggagcatgaggccacatcgtttagcagagcttctgccaggctcgccaggaggtctccttcccaccttcgaagtcctcagactctccgccatctctcccaggcccaggcgagatccctgagtaggattactagacagactgtcctctcccactgtcttggagtgtcccaaggccagagaggcaggatcctggcagtagaagagagggggaaaatgatgtcccagctctagaacaacagactcagtcttcaataaatatttgttcaatggatcaatacatgtgtgtcagacgcctgagacaaagacaaaaggcagcgctctccttacagtatttgcagtcaggtgaagaggccatgatcaaagaagctccagaggcctatggagcctgtaacaggaaaacttccttcttttttttttttttttttttgagatggagtctcactctgtcgcccaggctggagtgcagtgatgcaatcttggctcactgcaagctctgcctcccgggttcacgccattcttctgcctcaggctcccgagtagctaggactacaggtgcccgccaccacgcctggctaattttttgtgtttttagtagagacagagttttaccatgttagcc

SEQ ID NO: 58209 - DNA, 2953 bp, Homo sapiens
tgagccaccatgcccagccaaaaatttttttttaattaaaaaaaaaaacttggcttatcagaatcactgaggagaggtttagttgtgtgacagcataagtgggcaaatgtctactctttgagatccattgaattagaacctctgaagacagaccccacactcatatttatatcatattttctaacccattctgatgctgaggtttgggaacctactcctggaggggttgatgaatcccattcccaagggtttcttccggatgaagtcaggctaaaaggaagatcccttccagtctcaaagatctatagccctggggaaaaaaggagagcccaccgactcctgggacatcaagaggtggacaggtaacaaaatgggacaagtgaacaacaggaggggtgccttcctctgctcccagatgtctgaggagaaagaggagatgccatgtaggaggcaggtctgtgggtcagaggaagaggggaggacaatctgtcacagcgcatgttcacaggaaaagcctcattgaatcctcaccacacagtattttcttgtggctttaccagggaggaaactgaagcccacacaagctaatgcactagtcccagagccggaacttgaattcaggtcttccgacccttctaaaccacggtgctttccagtgttccatagctctttatcttgtgtgggggtctagatctcctggagtctaataatgctagctagatattcagtaggcaccctataaacgtttgtcttgacaacaagcagagagaaaaccctgaaaagcttcaagatagtaaggagagggggcggcactggacctctgtttttgttttttgtttttttccccccaggcaagggcctctaaccctggggctacagacgggaatcataaagaaaaaagcggtgagtgggcgaactacaattcccaaaaggccacaaaggggccaccactacgcatgcgtagatccctcccgttagctttggcgcctcagcgagctcttctcgcgcatgcgttctccgaacggtcttcttccgacagcttgctgccctagaccagagttggtggctggacctcctgcgacttccgagttgcgatgctgtacttctctttgttttgggcggctcgggtaagaatggggctccaaacgctgggtaatcagtggaaaggaagctcttctcctaccttagttcctagtcacaaactctggggttctcttggcttttccatgcacgtggattggggcctcagggagcggacgtgtaactggggaatccccaagacccctgggcgcgcgtggagttaactgcgagcctgtcctcattctggcgatcagacgccccagggcctcgtgaccgcccatttcacgtggcattaggggagaggacagccccggatgccccgcggacccggtgctggcaaatgagcggagttttcggcctggtctcacaagctgagcctttccggccagctctgagccctgcagatgatgcaaccgagcttcactgcttgcatcaggcaggggtcccggcggcagtgagggctggaaggaggtggaacgggtagggggctaagtaaggggaaagggtattggcttactctcgggcagatccccacccccaccactcccacacagctcttcctcacggactgctaaaggtctcccctcccacctgcattgctctacaatctgtggcctcagcccttgccaactctgcctcttcccccgctgactggggtatcagtttatggtgccctgcaggaagaccctcttgttcctgtgggtgggaaggttctggaatctcagttgccctctctggagttggggagacataggcttttggaggacaagctttgcagagtggttcatggagtgaggtggtgggagatttctgaggtgcggtgcggtgaatggagcaaatcagaaccaccccttggacgttgatctcaagcttggctccagaactggcttttgaaggtggaggtgggggtagtgagaactgaaacaggctggctggacaactggcagcttggtgtggccttagaagcatgagtgagggtggccgggagacgatttgtctggactgttgtgatttcaccctgacttttcctgccttcagcctctgcagagatgtgggcagctggtcaggatggccattcgggctcagcacagcaacgcagcccagactcagactggggaagcaaacaggggctggacaggccaggagagcctgtcggacagtgatcctgagatgtgggagttgctgcagagggagaaggacaggcagtgtcgtggcctggagctcattgcctcagaggtgggacctggggagatgggcaggggttgggccaccatgggtacaggaagtaacaaagttatcttaactgatatttctccaaaaccccctttcacactcaggacctttctttgggctttatcttcctttcttatctccctcaagcaaaggcagtgcaagtccagtttatggggttgggacatttagggagcctccagggtccctacagtttcatctgatcccttccttccttcctcctatgaggaaggaggagcctagaagcacaagtttgagtgggtaggtggcattgaggggccactgctcatggcagatgggtttctgagaatgctgcctctggctttgccccaggcctggtgctgagtgaatggagctttctgcagggagtactcccgctttcagctctggctctggcagggagggactgtgggagtccaggggaaggggctcaataccttctgacattgccccccaccaccccagaacttctgcagccgagctgcgctggaggccctggggtcctgtctgaacaacaagtactcggagggttatcctggcaagaggtgagggctggagggcagtgtcagggatggtgctcccagtgggggaacccacctgtaccttcccagtgttcattgag

SEQ ID NO: 58210 - DNA, 2145 bp, Homo sapiens
tggggagccaggacgccggaaggggcgcctggtccttgcgcctttgctcacaggccctcgcctgcttccttgtgccctttgttctgagttccggtgaccccggccaggtcccaaattctccgtcgcgctccttttccagagccgccgctgtccctccggccttgggcctccgccccgctcaccgagatgcaacgttacattattgcctccgctccgcctctccgccactctctgacccttctcctgcttctggtccctgtctctgtgaatttatttctaagcccccttccatctttggttcccgtctctggctcgtggcccatggggccgatctggaatacaggactccttgggttccggatcccatctctcctcgctccccacactttcccaccacgaggactcaggccacgctggcccagcggggtgagggaccgcaggagtcattagccgcagattaggcacggcccgggatcccgctgggactggactccaagcgctaacccgcaccaggatcccaatccgcgcgctggctgcacagagggtcaaaggcagcgggactcagcggatcgagcgtgttgcaggggccgtgggctcgggcgccccctggaggccgagcggcccccaagctcggggaagaggccttgggcaccccctgtcgggcagtgtcgaccctgcactcccggcgttcgggccgctaagttggtgcctggagtgtccgtccacgcccagcccgtcactccgccactcccgcctccaagacagtgggtcctgcagcctccactcttctggtgtgagatgggaccggagggcggagaggggacgcggaagctcctatctctccagccacaatcggcacccagggttcaggcgggttcctcttctggggttgggcatcctcagatgcctgggggccggggaggcgggggcttcatctctgcttctgggctgcagattcgagattgccctaagccctctgacccggcctgtcctagcctctggctgcccttctttctgcctcttgttctttctgccttctgtctgcttcctgtctctgggtatgtccatctctctcttccctattctggctgtgtctgtctgctctccctcttgctgccttccctacctggctttgtccctctgcatcggtttttctgtgtctctttgtgtctcgctccctccctccacatctctccatctcactgtgtctctctttactaatgcctctctttgtctctgtctttatctctgtctctccccaaccccactccccagctctattcctattctctgggttgctgcctctggggactgaagcagcccaacagggcagcccggagacgcctcggggcactgcccggggtcctcatcctggtcacctccacatgcccgtcaactccgcgcagcgttgatcttcccgctgcggctgtgggacgtggaggggcgcccggaaaggaagacacagggcccagcatctgctcgggagccccggggcccctgacccccctctgccattattaagggcgcctggtcccgaggcaccgagatgatcatgattgcatcagccagacagaagcggagccgggagctgcgcggtgagcgaacgagtgagacaaagccgcccgcgccatctgtttatgcaaagcgctctccgccggggaccccggcgtcccggctcctggccgggcttggggcaagggtcataagcccattcccacccggcgcccccaccgcgccttggcttcccctctcctcagcacccagagggccgctgggcgagcggaacggaaagggggcgggggtgttgatgtgattggagcggacgcggctgtttcttcaataatggatggagatgatgcggatggcgaagccgagctggccgggagaggagagaggaatagaaatggggaaaggaaggagtgggggcgggagactcaccccggcgcgcgcacacacacactcgcgcgcgcacgtgcgtcacactgtcattcggatacacgccgccgcgcggctcacacccaggcacacgcctacgcactgtcactgagacacacatacctgcaggcggagacgcgatggcaacacacactccccgctggctcttcctgattttcacacatacacagacctgcaggcggagacgca

SEQ ID NO: 58211 - DNA, 926 bp, Homo sapiens
ggaaacaccaacaaattgtctgtctcctggagggcaattcttattctcttacccttttgtggaagggcctcgtctatccaaagctggcctgccctttgctcctccaccctctgttccacagctgagcctctgatcctactccatctctggatggaggtgggtaacactcaccatcctggggtttgccttcctctggtctggccgactctggctcctcctccatcatggctgctacaggctggagggggcaccagagttagggagacgctgtcttgggaacacatgccctggctgtctataatcaggtcagagaactatagaataatgggatctcagagatctcagagttggaagaggccttggaggaaatatctagttcagccatctgcctaatgcaggaactttttttttttttttgagacgggtctccctccgtcacccaggctggagtgcagtggcgcaatcttggctcagtgccagctccgcctccaggttcacgccattctcctgccacagcctcctgagtagctgggactacaggcgcctgccaccacgcccggctaattttttgtatttttagtagagacggggtttcaccgtgttagccaggatgatctcaatctcctgacctcgtgatccaccagcctcggcctcccaaagtgctgggattacaggcgtgacccactgtgcccggccatgcagggactttccctaaaacatcctatcaggtgggtcacccacattctgcttgaatgtagctaaataacagggaattcactaccagattccaggtccttgactatgctgtcagcctttaaaaatactccagtgtgtaagtaaaaagtgagcagcatggtcaggcgcggtggcttatgcttgtaatcccagcactttgggaggccgaggtgggcggatcacctgaggtc

SEQ ID NO: 58212 - DNA, 3756 bp, Homo sapiens
ttcctgtgtttctccccagaaagtacccaggaaaagacatgtaaaagaggctgctcagtcaatagcaaacattgcgccccgggaagaatacggtcatctccttgccaagacaaggctgagtgctgcactcacctgggggctgctgtcaggactgtacaggtctccaggcttctgcccccgctggtccatgctgtagtatttacaatgactccactggaccatggatgggttctgagggggctggggtccattagggacattcagctgcatgaccactacacctggtccagaaggtgacactcctgaagggcaggaagaaagcagttggttacaaattccaactgtatttttgccttccaactagccctgagtgggaaagcagcaaataaatccacccattgcctcagggtcactcaagctacgtcttgccaggaacctgagatggctgctgatgtggcttctgactccatcttctcaaaccagtagaagtttgagtggaagggatatgagccccagatgccagtgctcccctggccttcacctggtgaggggtactttggtatgcttggcagaaaactactccattctgtcaacgctggctataaccaaatgcccaggtcagattgctcaaatgtctaggcatggtacgggtccaggtctgggccacaggccagggctgcagacacgtgcaggcttttctggtaatggctatagataaggcagtgacctctggttgttctggagaagataaatccacatagtttcactatgccagacccagaaagtacatcttggccaagaatggggtaagctgggaagcattttaagcatttaagcatggagatgtatgtcatattcaggaactgacaaatgattcaaggtgctaagacacaggggccatataggggaagcagtaggagatgagacacgtttatttaacaaactcttattgaacatttgctatgtgctagttcctatgttgggcactgagtgtacaaaaaacaaggctgtccctgccctgatagaatggacagtctattaaagagtcagacattaaacaaatagttggtgtcagagtttgaagcatattctggtaagatgtttggactttatcctgtaggtgttgggagacctatgctttggagagctaactcaaacggccaaatgtaggatagctagggagagagaccagcagcaagaaagaccagtcaggaagctactgaaggtcgggcacagtggctcatggctgtaatcccggcactttgggaagccgaggcaggtggactgattgagcccaggagttcaagagtagcctgggaaacatggtgaaaccccatctctacagaaaatacaaaaatgagctgggcatggtggcaagcacctgtagtctcagcagctcaggaggctgaggtgagaggatcacttgagcctgggaggtcgaggctgcagtgagccgtgattatgccattgcactccagactgggtgacagaatgagaccctgcctcaaaaaaaaaaaaaaaaaaaaaagcctgctgaaacagaatgaagagatttgaaattagggcaatgccagcaggaatggagtgaaagtcagaccctctgaaggttacactgacaggttcaggtgactgactgaatgcgactttgaggttttggcactggcaaccatggatagactcatcctcccacagggtgggagaagggaaagccttaataaggaggaacattaagacctaaatcttcatggtgaaaagcaaggtaaagagtcagggtcaagcagtttgatggacagtccctgctgggagggatgggctggagctctgcttccccgcaagggattgtctagagtgagggtttattcctgacctcccaggctatattcctgttgaggctgagttcacacgtgggtggtggtggagaaatgggaaatttggggttactagcttgaaaacctgctgcaatgctgctgttttcatggctcgatgctccagggctgccactgctgctgtcatcaaattgcttcctatgacgggaaatgttgcagcctctgccctgggcaccagtcatgctgggaagtgagcgtgattgtttttctcaggtagtatcagtcaaaagaaaggaaaagaaatggtgggaggtctaagagaagctcaggagacagcatctgtcatatcatattccccagaccatttgtacccctgaccctctagggttcatccagtcagagagcacaaatactcagtgcaacaggctcagatatccccatctcctgccaaggtggacagagtattcatgggcataggttgtagtagggccataggaaaactgcacagttgtggagtgtcatgcatttaacaactctccccttactgtagttttgctgggtattttatttccccatcctaagaatcgctcacctgcttcaacatcctctaccaacaaaattgcaattgaccttattcaaatacctcattgctacttgagagtctaatgtaaaaataattaaatctattgtttttctagaaggtattcaaatacctcattgctacctgagggtccaatgtaagaataattaaatctattgtttttctagaaagcagctcataatctgagcctaatgccctgggccaggaaaggtggagaagggggtgagtgtgtagaaataagcataagcaaggcagtggaagctctaataccagcaggtagtcataaggagctattagggaggtcacagggagagggaaagaaaacaaagtcctcatattattatctctgctcccaacaaaaacaaagccagggtttttagttgcagcctctgtcctgagctcctccccacactgagtcctcccctgctggcctgaagcattgttccttcacttagctgagaacacagagcactactccactgatgagctgatttttatgcttctcttcctcgagcccaaagcaggtggcatctgttagcagctgaactgtcactacttcttaatagacgtggcaaaaaaaaaaaaaaaaaaaaaccctctgcccagtgacagcacttccatataatcaggttgggggaaggagcatgggttggcagccagtgggaagtgggagggggggttgaataaggaaatcaatttcagcttgaaagctctgaaaggagaggggacgtgtgaatggctttttaagtggcatcattaaacctgggcagaaaggtcgattgggcacagcaaaccgcataaatacaaacagatgacatttatgtctggcagaattgtttttcatttttgtttttttgtttttttaaatcactgaggtagaagactgataggcttcttaccaccagaaatcacatctatggaaaggaattgtttggagaaataaaatccacaggcatctttcccaaattaaaagatagaatccaataatatcttggtatttttcctttttttggtgggggagtaggatatcttcactaaatggaagacgaaagagcagtctcagctttggaaacccctcagctaaacaatgagccagtaaatatgtgagaggctatttctgtatgcatttcactctgtccatgctgctgtgtcactgtgagttgggagtctctgtataggtatcactgccatttcatgtctgtgtgcatcttccccagacaagcacccctgtagaaacctcaagggacctgcaaccatcattttaatgggagaagtctttcctggggttagagttatgtctcatactatagtgaaggaattaaagttcag

SEQ ID NO: 58213 - DNA, 2853 bp, Homo sapiens
acatacaaggacactatgcttcagtagggagcaaggtaaactgaagtgaacgagacttactggggtagatggtggtagaacaagaaagttaggactatagaaagaactgacttagactaagatagaggactgcaatgacttgcatgcaaattacatttagacacaaagtaggatttcctagatcttcactgttctttgtttcagcttcatttcacaatatttgagatagggcaatactgggccattctggggtctttgcactctagtttctagttcatggggtattagtgtttgggacttgcttcttacacctagggaagaaatatatctaaggccaagctggactaataagcagagggatgagggagcctgggaggtaacatgagaatgtaaactacagcagaaaagactgcagacacatgggctttccagctaccagagaatacttcaggataaagtatggggctctcctcaaaaagagctctattcgtgtgagaagggagtaagtgaagatctcagcacagctctgctcggagtattaaggtgacttttttttttttttttttttttgagacagggtcttactctgtcgcccaggctagagagcagtggcgcgatctcggctcgccgcaacctccgcctcatgggttcaagcgattctcctgcctcagcctccctagtagctgggattacaggcacccgccaccatacgtggctaatttttgtatttttagtagggaccgggtttcaccatgttgggcaggctggtcttgaactcctgacctcaggtgattcacccgcctcagcctcccaaagtgctgggattacaggcttgagcaaccatgcctggccttaaggtgacttttaaacatagtcaccttaatgacaatggccaggcatggtggctcatgcctgtaatctcagcactttaggaggccaaggagggaggatcacttgagcccacaagtttgagaccagcctaggcaacataagcaagaccctatctcaaaataataataataacaatacattttttaaaaattaaaagaaagaaataaaacagaatactgaagttctggtttagaacaggactgattcttaggctaatgaccttcctggtctccacagatgcaaaacttcacttaaactctagttggtaccaacatttaccagtccagcaacagaaggagaaggatacagcccttttgagtcatggaaaacaaagacacatttggagtctttgtgtttcgtggcatatgtatggaaggggtcttgagtgttatttcttttttccgcaaaccccaacacataaataggtgtttatgggtccacatagttggtcagatgatggtggaagttataatcttttcaagttccaatatatagatgtaatggaaaaaaatgccttgttaattacacatggacatagagggagatggggtacagtagaaatgtggtatgaaataaaagattctactgacaatgttcaggaagcagaggaagaaatataaagcaaaaaacccccaagctgactcagtagttatttggcaaaacctttgctcaaggttcttctttccctacaactaacaaatgagaaatgggggagagagtggcatgtctccaaaaactgatccttcctgccacccacagcacaagagacatgacggtacatctaaagtttgcttgaatcagagtggagaggactctgacactgagtggtgactcacctgtgagatcatgtgattattcaagggtggctgttgctgaggcgtgggtgggagagcaggaagttgctgctgctgctgctgctgttgctgctgggcagtacaagggagaagcccccggacagactgggatgaggtgacctggttgcacacttctggggcacctagtgccatacctaaggcaaagaagaaacccacaaaaagttgtaagcataagccacgaacacattatccctggaagcttagtcagagggctctactttttctttgcctttcctctttattcccttttgtcccctcccccactgtcttttgaagattcacagatgagcacagatgcatttcagctgccttgctgatgccagtcctcctctttgcaggcttctgctccctagggacaggaaccaccttgactgtcaagtttggttatgaaattgaacaaaatgtgaggctgctgaagcacctcccctgaagtgtctggaatctgtccatcaaacttagatagctgaaaatataaatgcttacttcctgggaaggcacagatttttggtctcttaagagatccgtccttttgctagagagagagagatctgtcttctctttgctttcttctcaatttgcaacatctcttataaaagttgctgagggccgggcgcagtggctcatgcctgtaatcccagcactttgcgaggctgaggcgggtggatcacctgaggtcaggagtttgagaccagcctggccaaccaacatagtgaaactccgtctctactgaaaatataaaaattatccgagcttgagggtgggcgcctgtaatcccagctacctgggaggctgagacaggagaatcgcttgaacccaggaggcagaggttgcagtgagctgagatcgcgccatgacactccagcctgggcgacaagagcgagactcggtctcaaaaaaaaaaaaaaaaaaaatgttgctgagaaaacttcaagcatacacataacctttatccaactcatttccccatttctaggctctccaaggcatgaactcattcaacacaacatactttactatgtgccaagcactgtataatgaactaaagacataaagatgagtgaaacacagtccttgcccttaacagcac

SEQ ID NO: 58214 - DNA, 1107 bp, Homo sapiens
acttggatctactttttaaaaaaaattcaatgtgtatatatatatatttaactttttaagcagaaaatacattttcttagttcaaaaaactccaaactagtccccttccccttcctcttagttaggcctaacacttcaactagcacggtatgtagtaaagaatttaaccttgcccaaagagaggtctggcatttgcccttagctcttaggaagtaatgttaaactctttgaatatcctcttgataatgatttactaggggacttaagccatgacagataagtctaccaatatgatttatggtagggactttaggttacatactatcaactcaacctcaggaagggctggagactgaggtcagccacttggccaattatatctatgtgatggagccccagtaaaaattcacgacatcaaggcttacgtagcctccttggttggcaatactccatgtgtattaccacacaccactgacaggaggagttacactatccatgactccactgggaaaggaaaactggaagctcagcatctgaaaccctcctggactttgcccatatatctcttctcttgggtgattttagtctgtctcccttcactgtaagtataatagctttagtgagttctgtgagtcgttctagtaaactattgaacccgagggtgatcttgcggacccccccaaactctgcagttccaaaagtggggggtggatttgggggctgttctctaactttgcacacagtcagcagggcgagggctgagaatttgtctgtcatggctacggtgggactaagaaggcaacacaagtgatctggagactaatttacatctcctaattctaatatagaaggattaggcaaataagtaacctcagatagttttcctcctagcctttactcaagaactttcttgtcacctacccccactctcccatttcccacttccaacccctaccccagcatcttaacaccatcaaatgatctcaagtgtcaggaaaatcacatgtagctccacctcttaaaaggtgaaggaccctagttctgaattaagatctctggggcaaacataactcttgtgaaaagtgtcataggaatttggaaaatgag

SEQ ID NO: 58215 - DNA, 2929 bp, Homo sapiens
gaggccagaggatcacttgaggccaggagttcaaaaccagcctgggcaacatagcaagatcccatccctacgaaaaaaaaattgtgaagctctactaatcatataatggacacaaagacaaatggaacttcaactctgaaatttaacttgttaggagttcatcaggccttcaagaaaaaagttatcttttctctcaactctctggagaacagcaacagggtaagaaaaatacaactaaaaactgaactgaattaatctaaccggccacttttcaccactatttaaactttttgtctttcccggcgcggtggctcaagcctaccactttgggaggccaaggcaggtggatcacttgagcccaggagttccagaccagcctgggcagcaaggtgaaacccgtctctacaaaaatcagccaggagtggtggctcatgcctgtactcccagctacttgggggactgaggtaggaggacggcttgaggccaggaggcagaggttgcattgagccgaaaaggaaccactacactccattctgggtgacagactgagaccctgtctcaaaaaacaaaatacaaccttttgtcttgataccccagcaacaaaaaggggggcgggggtggggggggaatattggtggaacaacaacaaaaaaaagcattaggaagaagagccacaaataattcaactgcaaatctatctaaaaatacaagaaaatgctaggaatttgtgatattcctgaagtgaaacctgtcactttcctccttccttgagtctccacgtggcttacgcatatcagacaggactcaggcttctcaatcttagttatctatttgaacaacattatgtacaaggatattcatccaactgggatctgaattcaaacttttccacttttctttcttccgttttaacgcagttctgggattgttattcggtcatttctcatcattatccaatgacaattcactctaagtcagtattcctggtagttccgagacttaatggccacaaatgttgaaaaatgttagctctacgggaaaacgaatcgaagcgttttcaggggctcgagtagttatgagcttagtgtaggcccaagttttaagctatagaaacatctccctgtatgtgccaactcaaatccccgtccctgtaagaaacctggacaccagcatgattttaaacacttctacacctctccgtcctatttttccatgctccacgctcgaaggaaaaccgccacccaagaaacacacggagctagccaccccgaagcactggaagggcgcaatagtttttaggtcaccccgcaaaggccacaggtggcgccacccccctgcccccgcaccgccgccctccgccccgcgcccccagcttctctccagcagcgcacacttggagcagtccttcccgcggccatccgaccctgacccatcgtccccgggaccggctgccgggcgcgaggaacccaggccgcggggcctcctcgcgcccgcccgtgcggccgccacgccccctccccacaggccgtccgggccgcccgccccctcggccgggaggtggcctcacctcgcacgggccttggcggggagggcgcccacgtctccgcccgccgcccgggcccacggccgctcggctgcggctcggccccgacggccggcggcggcgcgcttctgggggcgggcttttctcggccggggcttccccggggccgagggctgggaagcaggggggactgggacgggggaggggaaaggggcttgggaaggaggggggagaggggaagaaaaggggggaaccaaacccggaaagggagaaaaggggggaggggaaaatcagaaggggaagaaaagcccagagtccgccccccgctgcggctgcgcgctacgtcactacgtccggcgttgtcgtcacctcgtcctgcgttccggccgtccctgcttcctggcttcccgcgtgcccctcagcagccctgcggggcctaccgcctgccgcacgcactcccgccggcgcgcgcgcactcgcactcgctcgctcgccctctcctccttccgcgttacctgtgtcaggacaccaatccggagtcactgggagcctcggtcctccttaaacccttcaagtctgtcagatagaataccctggatttcaatataatactaatagtgatcattctaaagtaatttccatttacagagcactttcacttagggcagtaactcctgtaccaaaagaacgtacactcggtatttgttgcatacgtggataactatagttgagcaggtaaatgtccattttacgtaaagatgaaaaaaaccgacctaggaggaactcagtctgtcctattaagatcacattcttaccatcatcccctctctaagatacagttctcaaaaatcgtcttaaatgtccagcctcccccgttttgtccattctaggcagaatcaatttagttattgattatgtgtgtgtggataatttactgaccaaactccctcaaagaagcaatgtagtcttttgtagaattcgaccattaaatatttaccttgtgacagaaactgcggtaggcaaaaaaagtcaaataattatagtacaatttaagtgctataatagaaaggtttaaatgtgctatggaaacacaaggaacagcaattcgttcttagcggtaaaagagattgagtaagttacagagaaactacaggtgaaactccagctaatcttgagactataaatagttcactagagaggtaagaatggagattccagcaaagtcatagaggcatgaagttcatctttccttcaaggatgagcaagttccaggttggttggcgttttttgtttgtttgtttgtttgttttatttattttgagatggggtctcgctttgtcacccaggcaactagattgcagtggtgcaatgtcggttcactacaac

SEQ ID NO: 58216 - DNA, 2324 bp, Homo sapiens
tgccatgacacagaatgaaagcctgaaatgtttctgagacaagtgcaagaactgaagaacaacaaccaagaatacctggatttaaaacctatactcctggccaggcacggtggctcacgcctgtaatcccagcatgttgggaggccgaggcgggtggatcacaaggtcaggagttcaagaccagcctgaacaacatggtgaaaccccgtctctactaaaaatacaaaaattaaccaggcatggtggcacgcacctgtaatcccagctacttaggaggctgaggcaggagaactgctagaacccgggaggcagaggttgcagtgagctgaaattatgccactgcactccagcctgggcgacagagtgagacgccatctcaaaagaaaaaaaaaaaaagggaatctcaaaacttcttttccaagacagaaaaaaaccccaaagggtgagcaaatctggaactcaagccctttccccaccttaggagttccctctgagagcatcaaagacatggctagaacactgtgcctcccttcccttaaccttcagacttcatagttttgagacctcttgggcaaaactcaaccagggctaacaaataaggctggattgagaaccccaggagggaggatggagggatggggatgggctttgagaaacaccaggcaaaaaagaatgcaactctcaattgttcatgcgtgacagtgagctaaagtgccttgccaatgaccccttcttgtttgagagtctccctttaacattctttcccaaaacctgtgatctgtccctttccaccatccccaggattcccagcaagggtagagatctgaggaggaatttaatctctcacctttgaaccccaggcctggcagctcacatggataacaactgtctcccaacattggcccagggacgtgtctttccctaaacaaaccaacctctcctcacatcccccactctgtactttcactgactatgcgttggcagattctgccaagttctacctgtaactggcttcattttcaagtcagacgtttggctgctgctctgtcccctgcaacaaggagccatgccagctggacacacacttcttccagggcctctggcagccaggacagagttgagaccacagctgttgagaccctgagccctgagtctgtattgctcaagaagggccttccccagcaatgacctcctcattgcttctggcctttctcctcctggctccaaccacagtggccactcccagagctggcggtcagtgtccagcatgtggggggcccaccttggaactggagagccagcgggagctgcttcttgatctggccaagagaagcatcttggacaagctgcacctcacccagcgcccaacactgaaccgccctgtgtccagagctgctttgaggactgcactgcagcacctccacggggtcccacagggggcacttctagaggacaacagggaacaggaatgtgaaatcatcagctttgctgagacaggtgggttcctgatctgtagctcttccccagaacttgacccctcaaggaaaggaaaagtttcctcgccagacttacctctgactccttccccaaaaaccatccaacccctgcttcccacaggctataatctccttacccaggtgtcccgacaacccccacatccctctggggtcactctggtagctcagacctgaccaataggcagctggaaagctggtaaatttcacttcttttgagattggctgccgtcatctcctccggctcctctctctgcaggccccacaaacccacaggctgtggtgtgagcccatccacttcctgggcctgtacacagcgactgggaggtgggagtctctcctttctctggccccaggatctagcccctcccttcccctctcctccagatgcctcatttgagtaaaagaagaaaaaataaaacaccaggactgcaatacctcaccatatgtcatgttcccatatatacctcaggtccccatatcacagagaacagggtcaaaatgggactcagaaagatggataaaggggctgggcacagtggctcctgcctgtaatcccagctactcagaaggcaggaggatcacttgaagccaggagttcgagaccagcctgagcaacatagcaagacccttttttttttttttcctgagacggagtcttgctctgtcacccaggctggagtgcagtggcgtgatctcggctcactgcaacctccacctcctgagttcaaggaattctcctgccccagcctcttgagtagccaggattacaggtgcccgccaccacacccagctaatttttgtattttt

SEQ ID NO: 58217 - DNA, 1771 bp, Homo sapiens
taaattattctcaaacttctacatacaccctgcttgctaatgtcccattgacaaagcaagtcattgtagccaagcctagaatctatcactgtgagatggaactagacgaaggcatgaaagccatgaggtagtgtttactggggactaccaatctagcagcctactaaagtctgccctctgacccctaacaatttatatctctcccacaagcaaaatacaatcatcctctcccagctacccacatcaaaatttcatccctttatggcatcaggatcgggctaaagttcagcatctcatcacctgaattaggtgcaaatataggtgaggctcctctggtacatttcttcaggtgcaggggccttcagtgatgtcctagcgctggcttattcagacttatgaaagctgattgtgaacatcttctcccaactcagcattcagtgatgtcacattagcagctagaaatcagccatggtgggcgaatttgtagtcttatagaaattgacaaagactacaaatcagggcttttgatttttttccctggagaccagttattaaacatttaccagcataccactgtctgcgtcctaaaaatacaagttctctacctcccacgcacttaacatacaatgctgagacagggacaggataaacataatagatattcctgttcaaaatggggtatgggagaataggagacacagagcagtcactgatccataaaacttcttatattcagccaggcaaatatctaggtccactccaaacccagaattcccttggttagttagggcctggttctgctccctggtatttcccattgctcaccactgctctcctggacttccaaatccaccctctcagcccttggcctctacctgctgaggtgtctttccttttaaataggaaataatctgtgtttgtggctgagtagttttctcagcctactttctgcccagagttgggggcccagagacccctttttattttgaattgtcccttttagtccaaactggtgctgctttcagtattaaacttctctttaaaactctgtggaccctgtaaataataaattgtagtctactcagttacacagaaggcaccacattctatcaagacagacacttctttaggctacaagtctgtgtcatgggatgacacctttaagatgtttagaagtgcatttgtctagttgtgagggttgacagaacatcgtcttaaattttagatctcaaaaaaaaatgttagatcttaacaagcaaagcgtttttttggtttgtgttttagagttggtcttgctatgttgcccaggctggagtatagtggctatttgcagcctcaataatattgccttatagcctcaaactcctggcctcaagggatcctcctgcttcagcgtcctgagtagctggggctataggcatgtgttcccatgaccagctaacaaaaggttttatagctgaccctttatttgttttgatcttcactctgagtccctgtattactggaaatgccctggatttgatttttgccctgaggtaatttcttactttaagaaccttttgtcagagagaaagaatgaaaaagaatttttgtcattatttttcttttctttcctctacatgtacaacatgaagtaaaaggttttgttttgttttgttttctgaaaaattagcaacatagagtaagcggttctattttttaatttagcaagtccttttagaaatattttctctaaattctgtttgaaaattgaacagtgcctttttttttt

SEQ ID NO: 58218 - DNA, 3357 bp, Homo sapiens
ggttgcatgggaaaacacgcccctacagaagtgcacttccttgagaggagggaatgacctcattctctgtccagaatgtggactccctcttcctgagcatcttatggaaattaccccacctttgacttgaagaaaccttcatctaaagcaagtcactgtgccatcttcctgaccactaccctctttcctagggcatagtccatcccgctagtccatcccgctagccccactccagggactcagacccatctccaaccatgagcaatgccatctggttcccaggcaaagacacccttagctcacctttaatagaccccataacccactatgccttcctgtcctttctactcaatggtccccactccaagatgagttgacacaaccccttcccccaatttttgtggatctccagagaggcccttctttggattcaccaaagtttagatcactgctgcccaaaatagaggcttacctacccccctctttgttgtgagcccctgtccttcttagttgtccaggtgaactactaaagctctctttgcataccttcatccattttttgtccttctctgcctttctctatgcccttaagggctgacttgcctgagctctatcacctgagctcccctgccctctggcttcctgctgaggtcagggcatttcttatccctgttccctctctgtctaggtgtcatggttctgtgtaactgtggctattctgtgtccctacactacctggctacccccttccatggccccagctctgcctacattctgatataactgcttcaacactagggggtcctaaaggctttctatcttgctagtccctggggcctcaacatctcatactggttcccttaactctgcctatacctctgtaaataattccttcactaagttctcttgatgaagcaaaaacagacagctgaaaagtcctctatctcctacaagggccctaactggcaccccagatgacacagagcctgcctgcttatgctgtagtctgcctactctgctgtctcttcacatggtctcctcagaactgaactattgtatccatctcacactttatgcctcttctttcttaggcaccccgtccctccatccttccagaaccatctttgaggtctcatggctaataaaaacctaggctttacctgttccctctgtaatccctccaaaagatgagacagatctatgcttggtcatccagtaaactgaccagctgtgggcacgcaagtgtgggaggcagaggcatgctcagagctggctgccaggacctctgacttgccttcctttcacccacccccagtgctccacccaggagtcctgcctggaagctggaatgggcaagggctgctggagtgggacagggagaagaggaaggcctggatgaggagagggtggcatttgctctgagactgggtcctttttagacctttgcccgtcctcccccacatctcctccctttggctggacagtcctgaaccatgaggtcgataatgtctgcagcccaaggccgagtttgcgcaaaacccatgtgttctttggtaaacgtgatgtctgtgtttgctcagtttatgaccccctcctatgagggtaagaggtccctgaaataggaaccctagaggagaaagtctgaaaaggactgcctgggggactgtaaatctgagcttgagggcttcctgagcaacccatggaagttatcccacctttgacttgaggagaccttcatctaaggagaatctaaggaggccttctggtgtctcccccacacatccccgacccccagatctaacctccttcccaattacagcttagtctccagggctaggactggggtaaagcaaagtgagtcattcacctgggggggctaaattttaagggggtggtgaacaatttattaatcaagataggactttaatgcaatattattttaaagtcaaaattaatgcaaaaaatccatgatgaacaaaatagcctacttttaaataaaaacaggatcagcattattccctttcttttttggctctgtcttttgtaataaggggagagagtgggtctgtcttcttctaaacattttcttctagagcttcctagctcctacctctggaccccttcaggcttttctcatttgagcaagataaccactcccacttcttctacttccttacccacccccaagcctgtcgctatcccccagcccccaaccaggttggtggtagggcaggcagtgaggcagatggctggggtatttataacccaggagcacttcttgggaaaagtgactaagatgctaagagcgtatttatagctgagctctgacgtaagtgtcagtggggaggtagggccaggccaggcacagcagcaagcgggtgggaagagctggaaactgggggcatctgacagtgagggtggggagaggtggggtcagtgactcctgcagccacttcttgtcacttcccctgactgcctactgataccaacaggtaagccgtctgaggcaccaccatggatagatacctccactttgctgaccaatgttccagacccgagggggtagagggctgtcatttcccagcccaaccaacagaatggttgctgggagctggggagaacactggacagagctcttgaatgtgtttcagagcttggggagaaatgcagggtggacaggagggtctaatcgtctcagtgcgcccccaccccactccacccccaccaaagagtgccctgaggttctaggaagagcctggtacatcaccaagctccattgccacgtgtttgtgtgatgaggtccaaaaccaaaggtagcagtgatgtggatcctgaagacagtctctcttctctggcagtgtgatggggaaagaacaaaggaaccagcttgtccctgtctcttgtgggggaggcagcgtccccagagtgagaggtcgaggggcactcctcatcactccattccccagagctgccccttccctgtccctgggaagctccagccagctacaagccagctgctgtccagaggcacggcactgccacatggtggacactggtggtactgaggtccagccttccaattaggaaccctgtcgcctagatctaatagtctctcttgacagcccccatcatctaaacagaggggagatgagcaaagtggagtaaagacacatttccaaatcacacccacttcccccacagctttctccccatcaagcttcttggagaaattggggcataaggagaaaagctagcatgaggcccaccttcatgaattcaatgtggaggggtctgggtccccccccatttaaagccagtgaggactgggtgtggtggctcatgtctataatcctagcg

SEQ ID NO: 58219 - DNA, 9117 bp, Homo sapiens
ctcagcctcaaaaaataaaataaaataaaataaaataaagacagtgagaaaatgtggtcaggagggctgagactgggaaccaagactgctgtatttgccttgctttgttgtcaaaagctcttagagctcccattttctacccccattaacaggcctgaagggtggtgcggtggctcacgcctgtaacctcagcactttaggaggctgaggcaagtggattgcttgagcccaggagttcaagaccagcctgggcaacatagcgagaccctgtctctgtgggaaatttaaaaattagccaggtgtggtggtgcgcacctgtagtcccaactactaaggaggctgaggcagaaggattgtctgagcccaggaattcaaggctgcagtgagctatgattgtgccactacactccagcctgaacaacagattgagaccttacctcagtaaaataaaataaaatttaaattttaaaaatgtaagaaaaaaaggaggcctggcactacttctaggatgccccaaatttaggcaactctcacagtcccttgaaagagaagtggcagctgggtataggccctcccaagtgtcatgccccctgacagtcctgatggactctgccctgtgtaagattgcatcaccaccaccaccacctctctgggcttccccagacatcacaggaacacgttccccgccccaacccccgccggctctggccctcctccacatcatgctccacatcatgctccaggccaactggactctgggcggccagcacaggcagggtcagggggtgacttctgtgcctcgtggcactgccacctgggcctgagcaagagggctccattctcctacccgcccaaaccctcatccctgtcctagccccagtgctagaaataaagagaccagaattttccttctggcctaagggccccagaggaatacccactggaactcacagctgcctcatggaaactgctgcagcagtggtgaagctagaaagactagaggtatgagggaaaattgcccttccccacctggctcataaggcgttccctcccccaagtcccagaccttggggactgagcatgtgaaatcatcctctttcttgcatcatgcgtgtccacattgcacccccccacccccatacccctacttcaggcccagtcaccatggccagatggtgaaacctgagctgatggggaggaggacctccaccccctgcaggggcctgatgggcagcacagctggccaatcctgggactcagagggtaggtcggctggctgaccactaggtttggaagacccaggcagctggctctaaagaggccccaggtcagtagccagacatgagctgtgagggtcaagcacagctatccatcagatgatctactttcagccttcctgagtcccagacaatagaagacaggtggctgtacccttggccaagggtaggtgtggcagtggtgtctgctgtcactgtgccctcattggcccccagcaatcagactcaacagacggagcaactgccatccgaggctcctgaaccagggccattcaccaggagcatgcggctccctgatgtccagctctggctggtgctgctgtgggcactggtgcgagcacaggggacagggtctgtgtgtccctcctgtgggggctccaaactggcaccccaagcagaacgagctctggtgctggagctagccaagcagcaaatcctggatgggttgcacctgaccagtcgtcccagaataactcatcctccaccccaggcagcgctgaccagagccctccggagactacagccagggagtgtggctccagggaatggggaggaggtcatcagctttgctactgtcacaggtgggtgagggagagagcaacaggcaaagagcagacagggaaagggaggcagaaggggagcctggcaggagcagcagagggagtggggtgtggcaggagaaggaggagctggggcagggactggttgcagaggacacaaagcagtctctacttttctagaggtaggttcgagggagagcagtgggcagggcttggggagtctcagaggagagcttcatctctactcacattttctttcccttttctgtctttcgggcagactccacttcagcctacagctccctgctcacttttcacctgtccactcctcggtcccaccacctgtaccatgcccgcctgtggctgcacgtgctccccacccttcctggcactctttgcttgaggatcttccgatggggaccaaggaggaggcgccaagggtcccgcactctcctggctgagcaccacatcaccaacctgggctggcataccttaactctgccctctagtggcttgaggggtgagaagtctggtgtcctgaaactgcaactagactgcagacccctagaaggcaacagcacagttactggacaaccgaggcggctcttggacacagcaggacaccagcagcccttcctagagcttaagatccgagccaatgagcctggagcaggccgggccaggaggaggacccccacctgtgagcctgcgacccccttatgttgcaggcgagaccattacgtagacttccaggaactgggatggcgggactggatactgcagcccgaggggtaccagctgaattactgcagtgggcagtgccctccccacctggctggcagcccaggcattgctgcctctttccattctgccgtcttcagcctcctcaaagccaacaatccttggcctgccagtacctcctgttgtgtccctactgcccgaaggcccctctctctcctctacctggatcataatggcaatgtggtcaagacggatgtgccagatatggtggtggaggcctgtggctgcagctagcaagaggacctggggctttggagtgaagagaccaagatgaagtttcccaggcacagggcatctgtgactggaggcatcagattcctgatccacaccccaacccaacaaccacctggcaatatgactcacttgacccctatgggacccaaatgggcactttcttgtctgagactctggcttattccaggttggctgatgtgttgggagatgggtaaagcgtttcttctaaaggggtctacccagaaagcatgatttcctgccctaagtcctgtgagaagatgtcagggactagggagggagggagggaaggcagagaaaaattacttagcctctcccaagatgagaaagtcctcaagtgaggggaggaggaagcagatagatggtccagcaggcttgaagcagggtaagcaggctggcccagggtaagggctgttgaggtaccttaagggaaggtcaagagggagatgggcaaggcgctgagggaggatgcttaggggacccccagaaacaggagtcaggaaaatgaggcactaagcctaagaagttccctggtttttcccaggggacaggacccactgggagacaagcatttatactttctttcttcttttttatttttttgagatcgagtctcgctctgtcaccaggctggagtgcagtgacacgatcttggctcactgcaacctccgtctcctgggttcaagtgattcttctgcctcagcctcccgagcagctgggattacaggcgcccactaatttttgtattcttagtagaaacgaggtttcaacatgttggccaggatggtctcaatctcttgacctcttgatccacccgacttggcctcccgaagtgatgagattataggcgtgagccaccgcgcctggcttatactttcttaataaaaaggagaaagaaaatcaacaaatgtgagtcataaagaagggttagggtgatggtccagagcaacagttcttcaagtgtactctgtaggcttctgggaggtcccttttcaggggtgtccacaaagtcaaagctattttcataataatactaacatgttatttgccttttgaattctcattatcttaaaattgtattgtggagttttccagaggccgtgtgacatgtgattacatcatctttctgacatcattgttaatggaatgtgtgcttgtatggtcttgtgttacagtctttttcagttttaatttctaatgtggtgaattgatagatgtaaatcatatgaacaaaagctcaatgatttttttttttttgagacggagtctcgctctgtcgcccaggctggagtgcagtggcacaatctcggctcactgcaacctccacctcccaggttcaagcgattctcctgcctcagcctcctgagtagctgggactacaggcctgcgccaccatgcccagctattttttgtatttttagtagagatggggtttcaccatgttggccaggctggtctcggactcctgacttgaggtgatccgcctgccttggcctcccaaagtgctgggattacaggtctgagccactgtgcctaacctaatgacttttaagagtatagaggaaaccaaaaagtttgagactcactggtctatagaactgggtggggagaagaaagtaaggtgttctaagagagctcttcttgctgggcaccggtggtcccagctacttaggaggctaaggccggaagaccgcttaaacccaggagttcgaggctatgatcacacttgtgaatagcctctgcactccagcctgggcaaatagtgaggccccgtcccaaataaaaataaataaatacataaatacataaatagctcctctggaagaaggggctcgaggctgggacaggagcatgtgtggggtgcctttttttcagtgcccattagtctggtctgactgagctgggtctctgaccctctggggataactagcctgggtcaaagtcccagatctccccctaccttcaccttttcttttcccccttgaccctcagactgaacagttaacccactgaccttccacacccaagggggtggttcttggaagcagagctaggatgtgggaggtctgcctgtggggttgaaaaaaaggggagagggtgccctttttccttgtcatgcttcctcctctttctcataaaaatcagagactgaaatgctgcccctcccttatatccggtcacgatggcaatgcaaatctaaagaggcagggcacttccctgtcaggcagtaccgctgggcatagcaacctctgcctctccgtttctcagagctcacatatccacctcctgggcttttaagtgggctttagtgaggggctcctccttcaactgggctcctccttcagttccccagctcttctgcttcgactccgagcgggtgtcatgtgtgagaacggccagcagagggagcagaaagcctggaagagcagctagagcctgcagtgacgtggtgcggaggggcggcaccctccagaacttcgagacgtagagccggggttctagggaaaggggcttcagtcccagggctccttggtgacctcgtgaaccacaccctgcacccagagcctcagccgctgctccttgcttttatgctccatagactcctcaccttcttccagagcccccaacccaacttgatttgccccaaaccgcaactctgtcccggccgctgcaagttccatccaaagggtgaggcctgcagataaaccacaggatggcagaatgctcagttagcaccaaccaaaggcgactaccctacctccactattatcgttctcggttgaacttctccccctgccccgcaatattttcctcaatctggttgtcggggcctctttggggccagccgatccagaaatccaagccgggatttagtactcaccaacagcagcgtgttcagccggggcgggggggggggcgtaagcagtatagggtccctcaagggagggggaggatcctgggggtcctgggggtgcaataagcccggcaccccttctcttgcttccagctaccccgcctcatcctccagaacggcaagagggagggaaatagaagggaggtgaggggcgagcgggaagagcggcggcgcgccagcggctggagagagaaaaagtttttgcaaaagggaaaaaaaaagtttgcgcttctcgcgggtggtccgggcttgcggcccggcgggctgggccggcgggagggctgggggccaggttgggggggtgggggtggcatcgaggctgcgctgccgtggccctctccgccccccctccccaccgcacaccccccagcccagactccagccctggaccgcgcatcccgagcccagcgcccagacagaggtgagaagggggggcaggcgggggaccacctgggagcagtgggggagggggcctgaggggatgctcagcttcttagggactcatcccagacccgggacatagaggcaaaataggggtgggagagcctggggtgagacattagaaactccagatttttcacttgtgtctttctctgtatcttctttttcttccctttttttcttctgtcagtctgtgtatctctgtctcagggaaccgtgggtctttgtctccgcctctcccatatattagaaatatcttactttcatgcggttaagtttaagaggctggagggatggctagctggaggtctgcgttgtagagaggtaaccccaggtgtgtgtctgcgcgtggggtaggaagatgtcagtgtttctgaaaggtggggactgcaaaggagggagctccaggtggggtggggacgggtgtgtgggaggcaacagagccactaggggccagccaggcttgaacctttgacctgtcttgtgacagatgtgccagtggatgcttgtgctttaggggaaaggagtgtcttctggacttggaagggggctggggcgggggggggctgtccaaggtctagtgaaggccctagaatgaccccatgcaatttggactcctgagtcccaagggctgtgggcaaggagctcaggaggagccggggagaccttgtcttgaccctctgacctcaggaccaccggggcagcgggagccagccgcagggagacccctaccggggctgggcgggaccactggccactgccagcctgtgtatccccgttggcaccccgcccaaacgggagctggggatcgaggcccctcctctggctcagaccaccctgcctgcccttgctccccgctctgaatcctctttcaggtcccatgaccccgaaacaatcagcactgggcagctagctttcgggacaggattacggaaaggggaccccgtagagcctggggactgagggttttaggggtctggagagctggggtcttctaggataggtctttacgttccagtagagggagaaggcgggcggtttcccgggggatatgtaagggtcggaataagtgtggttttccctagggggcggggtccagagacctctccccctccaccattatctccctggcatccccgcccttgacgtcaccagggggttcccgggggtctggaggggttaacccttgggaagccggctgctataaccagcaacctaaggtgtccgggcccctcctcctccccatacacacctaattttattgacccagtcactttctctgctttctctcccctatactttctggattcttctccctttctaaccccaccaacggggacccccactctccagtagtgcccccctgggcgccactgcctgctttccggatgtgctgagaggaggagggaagaatgtggcccgcccctcagcccccacccctatggctcgctctactgggctcccggggcgggtggggggagcggagccgtctgcagccagtgcctgcggcggcgacttgggtgggccgaggaggcacgggggcggggaaggcgggaccgggagtaggggggcggagccgactcctgggagttggggagcgggggtgcgagggggacgctggaaaacagggagacaccgaagatggtttagggctccggcaggggaaccctagagctccctgtcccatcccgaactctcacaccccagaaaaactttaccgaagctaaaaaagttggcgacattttccttttactagcctgaaggggagatatgggtgggctgtggaacgcgtgggcgaggaggggtgtagccccatttccttggaggctcttcggcagctaggcagtggggcagaaagatgactgagtaggcaagtttgggggagtctctagtgtttgggggatcatttgcaaacttccctccttcccctgggtgagtcatagagggaaggaggcgggagaattgtccccccatccagctgccaaccagctgtgccccccgccccccaacattagttccaaggtcgagttgggaggtcttggatgcgggatccgcacctcggttggaaaaggaggagttagaaaagggtacagcccaggctgccgggccgggctgggtcgcggggtccgggttccgctccccatctcaccccgccctcaccctaaatcccagcatcccgggatcacccaccgcgccggccggcccggcccgctcccggtggttctccaccccatcccgccccaccccaccctcattcccgggagactggaaaacccgggatggagtcaaaactggagtttgaaaagaaaaacggacagcagcaccttcttcctcgctacgcttttataaggatcacattgtttttttcattctctcagagtctcccctcatacttcctttcctgttcccccaaaacagagaccaaaaagattaggtgggcctgatttaaactaccccagaataacaccagctttcacctttgtgcccaacagacccagaagactcccctcaggaaccttacctcctcctccacactgttttctgtctaagagggcagatggcttgtgctccctcctggccccacctggctctgtgtcgggactgtggctagggctccctctgctggacactgcagagattgtacacgggctgtccctggggaggggcacgagaaggaagggggaacgggctctagcagagccgcccagtgcttgaagtcagatccatcacacgagttctcccatcccaccctcaaagccggcccagggttacagcaagaagaattagagggtccatgttactaaaatcacttgaagttaatataggcacaattagtccaaaacatgccttctacacacagaccacacaggca

SEQ ID NO: 58220 - DNA, 1827 bp, Homo sapiens
ccatttcattctccacaacaagagaagcagccgcggcttcagtcaccgccctccagcagcgtaagaggataaaagtgcgacttgccctaaaacctaaacgtctcttctggatctccagaaaaaaagtgctgctctaggccgggcgcagtggctcacgcctgtaatcctagcactttggcaggccgaggcgggcggatcatctgaggtgaggacttcgagaccagcctagccaaaatggtcaaagcccgcctctactaaaaatacaaaaattagccgagcgtggtggcacgtgcctgtagtcccagctgcatgggaggctgaggccggagaatcacttgaaccctggaggcagaggttgcagcgagccaagaccgtgccactgcacttcagcccaggtgacagagggagacgccctctcacaaaaaaaaaaaaaaaaaaaaaaaagtgcagtctagcccgcatctgcggcctcttcatctcgatgatagtcttttcctgtgtcttagcgttgcatgatgggagaaatagtctactttccggtagcggtgccagggcagtggcctaatacggaactccatttcccggcgtgcctcgcggaggccgctgaactcagaagcgggaggccggttccggttgcatcagcgagggattcacggcgaaatgagactgttcgtgagtgatggcgtcccgggttgcttgccggtgctggccgccgccgggagagcccggggcagagcagaggtgctcatcagcactgtaggcccggaaggtactcgtgctggtgctggtgggcggtggatgggggggcgggaccgaaacacgccagattctctgcagctgtctttgccaaacccctagccctcgccacacaccccaatcgaccacttctcctattatccttgatcactccacgccttcttccctcccagtcacatctttcacttcctttaattaccctcaatataatacccttcccttatctctctcctcccctcttccgtcttcccggtccccgcctcaccccagtaaactgctcttcccttcccaaccttctcctacacctatcaggcatccccctctgctctttagttactagcatgacagcccccaggcacccttttgtgttcttaggaaatccctctctcccctcctaacacacacacacgttcctttctgtttacctcttctcattctcagccgattgtttgggtgactcttaggaggttctcttgtaagtcttctcagttcttttaattttgttctcccactgtgaccttcagataattatgaagatatcccagttactttcagtcgttaagttcttggctgcagcactatcccaataccaccacctcctctgcagtccccatctgttgcttccagctggcagtttcagctgaacacctgctggcctctccagcccattccggaccaccccctttcagtggtcctatcctggaacttctgggttgagactgcccatctttctttttttactcactgaacaatgcaaggttatcctaagttgacaaagtatttcttttcttttccttttttttttttaacccattttccattcttgcatcagattgtgtggtcccgttcctgacccggcctaaggtccctgtcttgcagctggatagcggcaactacctcttctccactagtgcaatctgccggtcagtattggtccttggtgtagggaggtggctgaatcaaatcaggcctcactgtcatttgtgtggctttatttgcagccattgtttccctgtgtgatgagaaatgggctaaatgggcccctctaagtccatcatctgttgctctctc

SEQ ID NO: 58221 - DNA, 5079 bp, Homo sapiens
ctccggagtagctgggattacaggcatgcactgccatgcccggctaatttttgtatttttagtaaagatgggatttcaccatgttggccaggctggtcttgaactcctgacctcaggtgatccacccacctctggtctcccaaagtgctgggattacaggtgtgagccaccatgcccggcccttaactcattctttaaaaatgagtttttaaaacctttgcttagaagaatctaaacacttctaattccattgtttccaatctagatcaattcactaccatctctaaattactgcagaaactttctgactgcagaaggtcttcccatttcttctcttgccacccctccgcaactctattcaccatacagcagcctgagtgagccttttaaaacaggtcattcctctgctcaaaccctccaatgacttcctatttcatgtcatggaagtcactgaagggttttgagtggaggaattacctaaggtaattcctgaccacctgatgtaacactctgacctccatcctgaacattctccattcctttctctgctttagctttctccgtggcacttatattttgtttactgtaggcctcccactgagatgattttttcctcttgctcaaggatgtaccctgagccccaaactgtgtggcacacagtaggtcctcattaagtatttgttaagaatgaatggataaactccccccagtctctcttatagggaaggggcagaagcagagtggcagctgctgatccctaggggctagagatgcaatattgcccgaagtatttctctgcagggctgtcctccctggggaaccctcccttgccttccagtgtgtgggacttggctttcatcagcagtagagcctcaggtcagaaggctgcagagccaaacggggctggcctgatgcaatggttacacagagattagctgggagacaggaccgggttaaagaggcagggactaatcccgagggaaggacaataccctggggagaccccaaatggcctcctacacttaagagatccaggctgctctcttgtgcaggaggcccagagacctctacggcaaaaggaaaacacaccactccctgtccatcggcacccctcccaaaggcttgtgtctcctcaaggttcccctatccgctgcagggtccagtagccccagctaccaaggtggccatgctgacaccagaggcactgagactgagacagaattgggggtggggtagggagaaggcccgctggtggcgaagcggcggaaacggcctgagcgatggtcacccagtcttagagcgggggtgtgtcctgctgacctgcctccccgcggacaggcctaacgatgaggcctgaagttggctacgggaaagaatgaatttcccaagggcaaccgaggtccctttgcccagcagcacagagcagggcccgtgttccggctccgggcaggggtggagagacgccgtcgtccgaagcaataggggtttgtaagcaccaccccagaataagggactctccccattcctctctcggacggtccctaacttcactgtggaggagtgaggccgatcctaaagagcggacgccccaactttgaggagacgggagggtaaaaggtagatgggaatcagtactcgcctctctcctcaggttccagctctgattttggctctgtcgctgccacccgctcatctttaacatgatacgctcagtgccttagacttaagtctctgacctcgggagcgcctggctgtaatcttttaccatggccttgccctcctctcaggggcgggaccccaaaacctaccaatcagaaagtggcacgccggcattggccccgccccgtccctcgcatccgccactcaggagccccgcggcaccgcccccgtcgctccctctcgctagggggtcgacgtagtgtcggacccggaagtggctttgggtcacgaggcttcacggaggaggtgggtgagtcatgcgcgcgcgcggaggggagtgtagcggggggggaggggaggaaaggggggcggggatgatgcaatgtttggcaaccggtgtctgcacgcgcacgcgcaggggacaccgagggtggtgggaggtgcggagggtgggggagaggagagagggcggggcgccagctcccggcgcccaacggccccaacggctatcagccttggtcgcccctagtcggtcgtgagcctctttgccgcttgtctcccccagaagctgctgttccgcccacctagctttacccgccgttttacccccactataagggactcccatatttcttggcccctcccagctaatgggcacataggccttttgaacttttctttttaaagttggtatccatccactgggattgtcgacatctcgagtcttcttaaagaggtctcctggccgggctcagtggcttacgcctgtaatcccagcactttgggaggctgaggagagcggatcacttgaggtcaggagttcgagatcagcctgaccaacatggtgaaaccccgtctctactaaaaatacaaaaattagccgggtgtggtgatgcgcgcctgtaatcccagctactctggaggcagaggcagaagaatcgcttgaaccctggaggcggatgttgcagtgaccgagatcgcgccactgcactccagcctgggtgacagagcgagactacgtttcaccaaaaacaaaaaacaaaacaaacaaacaaaaaaacgggggtggtctcctgttctagccccgtaaatctcccaaaaggggccgaggtactggaatcccttggtagtcattttccgcttctctcagaacagcgcccttgacttttaccttgtagttggtaagccctcagcctgccagaagtcatgtattttgcccagtggacccgattctgtttggccacctattttcccccacggtactcctatggctttctccaagaccctctcttgctgtaccagacagcaagtcctgtgactccctgtgtgaggagcgcggcacaggcctgcctcctaggtgttcgggtcgagatttacagcggagtctcatcccgggacgtgtgagtgcacttcagcgcaggactgccctggactggggagaccggagccgcgattttagactcaactccccatcacttgccaagggatcttaccgtccttgtttgtaaattaaagataaaagttgtgaaggtaaaatgagaaccatgaacttggaggcaacttgaccaaaagtaaaacgcaccacccagaatgcaaagtatttttcttgtgccttgaaaacagaggccatgtggtggcctgttacatatcctgtcataccctcatgggggcagccagagtttaagtagaaactgtcacaaggccggttgtgactggagtggtgtggcaatgacaggtctttggttaggctgctccgctgctccacacctccatttcctctctgaaaatgggggtagtgtggagggtggaccagatggtctcccctggcctaaagacagaccaggttgtcagtgacaggcagaggtcatgtgacttgacaggctgaggtcgtgttgtgacatgttgacctggggaggcgggtcaagtcccagcacactacccgggaagcctttggggcggggcagggcaagtcgcgactttcatctttcggggcctggcccctcccggacctggcattcctggttcccgcaacagactgtggctttggaaggggcccctccctgaggagggctgggattggccaccagtggcctgggaagaggcgcagatccttccgcggagggcgggggggccgcgtggggtgtttgttctcttggggattaatggggggttgtgggggaggggtaggcgcgctcccgcatgcgcactgcagcccctccagttggctcgtcgctgtccgctgggcgggggcccggccccgcccctctcccgtccgggcagcggcggaggcggcggctcctgcggcggcggctgcggcagcgacggcggcggcggcagcggcagcagcctgcgcagtgccttctgggaacggaatccccagggctgcccctggcccccatggcgcatgcgcgggaggccgctcggtgatccgcggcggcggcagcggcgcttcctgctaggaccggccggggccgtaccggaggctcgggctccaccgaccctcctcccaccccctcccactcaccctctgggccgcgactgcgcagggcggggccggccgaaccatgggccgcggtgagtgcggggcccggccccccccaccctgcccctccccctcccgtccctaccctctgccccctccgcgtcctctcggcccctttccccggccccatccccactcccccgccctcacctgcccccgccgcttctccctctcactgccagacttctgccttcctcaccgccctcccctcagtgcttcgcccaccctccgcccgccctctccccaagttccttcctacttcgtgcgccttcccctcctcctcaagctgagggaagcagtctgggtgacagggcgccttgttgtgagagggaaagtttggaagccgccagtgtggggtgggagcaatggtgaggctggggaggatacctgcaggttggaggggcttccccttctatcggaggacaggctctcttggagataatcggaagccagtggaataggaggttctgaatccctttgccgtaggcttgagggaaaatcaggagcttcccaggatcctgggagaagactgagctgtgatcctcacctcttaagacccgaatgaactatatcagcgattgtctgatggagcaggcatggggggagttctgctggtaccaccccagcgggcagttgggcaattgcctggtgacctgtggggcaatctgtactttttatatcatcttcctgggtagagaacaacaggagccagacactctgggaaacttcctagtggcctagcattatgggaatgtgcccatactcctggttgaagtcttctactccgaatggagggaggccttgcccttcatatgcctaagaattgggctagactttcttggtcccagggagctgaggttctgaccctctggtcccta

SEQ ID NO: 58222 - DNA, 1689 bp, Homo sapiens
caagcccagcaaggtctttgcaagccctgcaacctatataccacccaggctggggttggcatacccgcttattgctgtagctcccccgagaaagggaaggacctgtctaggggagaaaggtcagagtccggaggagtctgtggcagcacacattcttaccgcatcgaactccgcttgatcatcctcaggtaggtcgctagtttcataaacatctggctcattcctggcctgcaggtagaagcagtgaccacccaacctcactacccagcatccaacaacaccccttcccccactccatttgaataagctaacagagaaggcggggtgtgatgtcagggttctgtcctttctcctccacctgccccgtgagtcaacagtatgtcagttcccatgtctcaaggggtagggatgacagcggaaacaattgggacctgacagtaaacggtgagtgtaagtgatagcaacgatgttaccctaaatctagaggcgggcaggtccttggcaatcactattgccaaagaaggtgaaggctatcctccaattaggccccgtacaccaccaccctggcacaaggattgagagtgactcaggaccttagtactcaaggtcctgtgtcccaaccctcaccttgagaagcaggcagggcagcacaaaaggaaggtacacgccaggattgtcatgggagtgggggctgggggagggcataggttccctcaaggatagagctccccatctggcacaagagggttctgccagatggcagaacctcttccttggcaggatgaaggccatcgttaagtggtctggtgtgtgtgtctggggtagcgatggggtcttatggagagatttgggggggacatgggaggcgttgacacggatggtggaaaaactcaggcacaagaggtcagtacccggagtcgatttctgggccgagctaccggcgactgccggaaagggggcctggtgcgccgtccggcggcccggcccagtcgggtcagaagagttcggggggtgctgaggccgatcggagaacgagcggcgggagcccttgggcggaggatgggctgcaggcgggaggggtcgcgggctggtttctgctgggggtccttgggaggtcgggggcgcggtcctggggagccggggccggtcctgtactcacaatgccgggaaggtcggcgtatttagggtccgccatggcggcggcgagacgggctgggggacccgggcctcggtggagccggggccggtgttcgggtaggggagaggctgggttcgggtcccgggctaaggcggcggcaaagggagcggcagatgagcaggaagtctcgcgacagcagtagcacagcagaagggtaaagcaaaagtcgcgagaacagccctgctgccacacccctggagaggccgggattggggagaacgaggccagggaatgaggtaatggccaggggacgccgcctaggattgtgggatgtgtagttttggtgtactggagcttgggcggggagcgacaataacgaaccttggggagctatttcatacagccttttctctcacttttacagcaagtcagtgaaagaacatttataattcctgtttggggctcccaggaataaaatgactagattaaatgatacaggtagtcatactgtgacacagccggggtttcaaaaacaagaagtttgcttgata

SEQ ID NO: 58223 - DNA, 1417 bp, Homo sapiens
gttctctttgtctagacagccttttaacctctattcctgaactccacccacccttccaaactcagtaaagtctctatcctctttgaagccttccctgaccagctacacttcctttctttgtatcattgtctttgcttcatacacagttctaggatagctcatactttgcatactgcaaacttgatctccattggccagccagtgccattagactcccaactacttcggggcagtcactgtcctataccctgcttcaataaaaggaaaatcagcccctagaacaggacctagtacaactaagtgcacaataaatacttgttaaatgaatgaatgaatttcaagacgcttgagaccactggtaagaattttgggtttccaaaaccctccccttcccaacccccattcggtaagaatgctttcgcattagcatcaggtccgaggttactcattagaaactgggcaaagccggaaggcggccactttgcagcaaagaagccctagaccttgggagtcaatcaggccagcccaggccgcaccacggtctcctagttgacagttcgaggggcctcgcgggccgcttgcttcgtcagcttacagggatcccgcacgccaggtgagcccacacactgagcggacattggggcaggcaggcaggcgccggggggcggggccagcgtcgccccgccccgtcctgcctcgccctgttcgcgcgtccgctgtccggcctccggtcacgtgacagcagcgcaggtgagcgccgcttccggggtcgggcgcctggatagctgccggctccggcttccacttggtcggttgcgcgggagactatggcgtcctcctcggtcccaccagccacggtatcggcggcgacagcaggccccggcccaggtttcggcttcgcctccaagaccaagaagaagcatttcgtgcagcagaaggtgaaggtgttccgggcggccgacccgctggtgggtgtgttcctgtggggcgtagcccactcggtgagaaccagccctagacccccgcagccctgtccaaacccctcggctccgaggcgtccctgtttccaggctccagcctccggagccccacgcagtgccactcccctcccccgggttgtcttggtccctgcccaccaaccccaggtgttcccccagcaggttttctgactgtggacttttttctccccaacagttctttactgctccactctagttccaccttccccccgtgaaatccagctccctgtgctttgactccttcctgccatgtctagcttcagcctcaggctacgcggactggccaggaccgggcgcaagcggggaggacattagggggagtggctttttctcgggtggttgttggtgagagtgtaggtggagggtgaggggccgaggggagtagatggatgaaaagg

SEQ ID NO: 58224 - DNA, 1016 bp, Homo sapiens
tctcgccctctcctgcatctcggtttcctcacacacccgaggcctggcatcttaatgctgaagacatttggatgccgcggtttcgacgcggccgtgcgtaagcggaaaagccccgctctatcagggcagtggcagtccccaagcccgccgcccgccctggccggcgcgcccccgactcctcagtctgagcatcacctgggccggggtgggctgcggagggcggctccacacctagcctgtcaggaaaaaatgcagaatcatgcccgtgctggcgggcgcccccggcggaggtgacccgatgagtggcctcggcaagcggcgcgggggacagagtggaccgggaagcgcgcctcctcccgcctcctcccgcctcctcctcctcccctcaccaaccaatcccacccccacccacccccgggcactgacctgtctaacgctctaaggcagcggcaaaatttcggtccgggctgtgccgggctctcgccccggcctgagggtcctcatggggctgggggctgcccgatgggggagctgggcatgagcctgagggtgtgggggaccctcctgcctctggagcgcgcccgatccctcccgtcttggaactcccggggcttttgtggagcgcggcgcggtggtggttctgggcgtttcctgcccgggggcggttggcggggcgcgaggaccaagttaagagtctgttgcaccccagccccggggcaaagccggggatccctggctccgcgtcccactggcagcgcggggagggctctggccgccgcccggctcttcgcaccgcagcgcagcgcggctcagctcccggctcgttgcggctgcttcggctccgcgcggggaatgcgagcgccccggcgccttctagtgggcgcggaggaaactgcgggggcgcggagcaaacgcgggaaggtcctcgctcacagcccccagtccttagcctccaaacactggcatctcaaccgcctgctcccacgacatccattccattgcctgctcgttctgag

SEQ ID NO: 58225 - DNA, 1684 bp, Homo sapiens
gttgatcagcctacccccaagtgaaaaggtggaggctccttccacttatatttatgtaaatgagactcttcctcttgcctgccgtttttttgcaagccctagatcaggcgtgtactctgaaaatgctgagcacacccctctgtgcacttgtggcaatgccacatacaggaatgcgctggcctgaggccgctatttccacactgaatttctggtatattcacacccctttaggaggagatatggaacaggacatgggtactagaggacacacaaacgtgtgatgatttgctgggtgttgctgtgtccaacccgcggactctgcggccgggctaaataagctcaatatgtggctcctttgggtgttcccgagcgtgacgcaataacaaaacaatggcgtcatcgtgaggtcactgcagaacagggggaagggggtggggaagggccctccttctacgggcggagccctttttgcccagctctcagagcggccccctacccgcccctcccgccgtctccccttcacctaagttcctccagagccgtctccctgggaattagccctctcctaactccgaccacagaaagctcagctttcaacctaagcttttggagtttaggctgtagtccctaagagagtctctagaaaccctgcccctagttttaagtttcgcccaatgaaaaaacaaaaggagagggacagaaggcgggtcggtgacgtaatgcgggttgattggcatgcaggccttggacgtccaggattagccacgcatttcgccaatccagaggcaggggagggacggtgcaggcgcagagtattgggtttggctggcctcgatttaaagagacagaagctgtcggggtcctggaagacggtccccaataccctccccccaagtccttgggaccacttgggtccccagagctggggagatggtttgtggcggctttgcctgctccaagaatgcgctttgcgctctcaacgtggtctacatggtgaggttttggaggtgggggaagcttcaaggcggaaaggccccgtggggagaatctctagggtacttccggtggggagaggggtgtatgggggttccgggaagattcccaggaacttccggcgacgagggaattcctggggacttccgtgggagagaggagacttccggttgattaagggggtttgtctgagggtgggggaatgaactgaaggccgtgggcgtaagttccatacctccttcctgtgaacctcagtttcttccaaactggaagtgataggatgatcctgagggttcatcttttgcattcatactaccatccctgccaccccctccccgccatcctagccattctaacctttgggagtgcctagggatgctcccggtgcggatagcaccatccccagctcccattcacacactattccattattccttccccctgccccgctcccaagtcctcttgtatggccttgggctgtgccgcatgctagaattgttgagatgtatcctgctctttcttcgtagctggtgagcttgttgctcattggagtggctgcttggggcaagggcctgggtctggtgtccagcatccacatcatcggcggagtcattgctgtgggagtcttccttctccttattgcagtggctggactggtgggtgctgtcaaccaccaccaagtcctgctgtt

SEQ ID NO: 58226 - DNA, 1633 bp, Homo sapiens
aggttctactacaaaggtcccaatccacctctcaatgcctaccaaccccactcaccttgatcgtttcggctggcaagcctggtgggggtgccttgtccagatatgtccttaggtcctggtctacatgctcaaacaccagggttaccttgatctcccggtcagttcgggatgtggcacagacgtccatcagcctgaccagagtaaatgctcacttttcaatcccctttaacccaacatggcctctcattatttcctcagggtccccacttctctacagatcatcacaccccacctataggctgtcttttccctttactccccacgcccaaccctccaccaccttctcaccggacaacattgggatgctcaaaagcctccagtcgcctcagtaaagccacctcacgaactgtgctgatgggaaggcctcctccacctcctcctccattggggactctcacactcttgagggccacaaagtggccactgtggggatcacgggccttgtacactgtcccataggcaccgacaccaatttcagccactggctcatatcgagaggtagccattctcagatcaagggagaccctacaatcacagactcctatcaccaaaagtcgcttacagagttaggatggtatgagcctgcagcaacaaagggactcccaaaaaaaaagcgcaaagaacaccaccagcatcccatcccccgctcccagtcttccttggggccggccccagagataacacaatgactcaataccaacccctccagccacgtgaggccctgcaatagaaaacgctttttcctttgggacaatcgcgccccgcacaaagatcacacatgacacatgccttgcatcgaagatcctacacctcagtccctaaaattatactttcccatgaccacaaaggccccacttcccgcccttgagcgacccttccataaccagctcgcgaaacgaacgcgtggaaagctgtgaggggggcgggcactggttctcattcctgggaagggactgcacttacctcacgccagcccggggtgctgtgggggcggcccgttatcggggccccggagccggttcctacggccccatacacccgagctcggtccggagcagctggacgcagagggcccgaccatagacacaggccgcaagctagagaggccccctcacccccaccctcaccatgtgaccagctgccaaagaggcgcgcggaaactgggagggcggggcgaacgccggacgttctgggcacgtgaccgccacccatgcgctgaggggcggacaggaggtgcttcgactgggaggagggcgaagagtgtaagggggcggaggggcgatggcagccacgtgatctgttgctatcacacgtgaccgcttgacattgctctgaggagcagaggtgtggctacgcggcgggcacgtgactggctgccacaacccccgctgcagggggggagcggtgagggggacaagagagggtggagcccgaggcggtgccatggcaacctaggccacccagagcccaactcccggctgaaggattgtctcactaccggtctgaaggctgaactccagtctcactaccggtctttcagcctgtctgcattggggagggggtgggagttggg

SEQ ID NO: 58227 - DNA, 1979 bp, Homo sapiens
ccctggccgggtaactgccctttctggggcacaagttccccttctcccgagactggctgcctaatgcactgggatcctactttgtgtttgtgctctgcggggagggaaggtaaggtaaggtgcgggcaggattgtgtatatgtttgcctttttattaaatccaacaaacaaaagcaaaagatggaaacgacattctgcctctatcacttcagtctcagtaacaatttatttctcttcccaaacttagcaccgctacccagacttaggcccgaacgccacgcccactctcaacccgccaactcctctctcggtcgaatctcccggtcccacccccaaaaactgacgtcacccatctgatcctcccgggtctaccccaaatcctcccagcagttgcagcacaactgctctcccggctgctttgagaatcccgccctcctctctctccctctgcccactcctcactagcgcagcgtgtggtccgccatggggttggagtgagcacgttgccggtagtagcgcttctggggcggtggggcctctgctccggccacgttccgagtctcggctgccatgatcccagtccggggtttctctaccaaatccacgtggaggcgcaggccagaggcgcaagttaatgacgcagccatgcgcgttggtggcagttcccgccccttaaagacccaagagcaaattcagctgggctgggctgggctgggctgggctaggtggggagggctgtaaggagcgagtgctggagggaacctccgcaccgttagcctccaactgggagggcgaggccaggcccagggacccaacgttttctcttagcttgcttctgcctggtctgggttaccatcctggttgcaggcacctgtgcaccccacaggtgagaggggtctagagacctcgccttctacagtggcatcagtcctcgctcctgtccccttactcctggtctcggaccagtccgcccggtctgactcttgtggtcccgtgtgggtttcgtcgagtgtgcgctcggggccggggcgggaggggcagctcctcattccacctccaggaaatcgaactggaggaaggagggcaaactcagggaggcggggctcgttccacagggacaccacgacggctcgcggcccccagcctctaccccgctccggatccgggatctgagcgccggccgcggtgcccaggcactcccttggcgggccggatggcggaccccggcccagatcccgaatctgagtcggaatcggtgttcccgcgggaggtcgggctctttgcagactcttactcggagaagagccagttctgtttctgtgggcatgtgctgaccatcacgcagaactttgggtcccgcctcggggtggcggcgcgcgtgtgggacgcggtgaggaatgggctgcgccgggtgagggtccgtgggaggtccagatcccggactccgcctctcccatatggagccatcctcacgactgtctttttctctgtcttttctcccgtaggccctgagcctgtgcaattatttcgagagtcaaaatgtggatttccgaggcaagaaggtgatcgaactgggtgcggggacaggcatcgtggggatcttggcagcgctgcagggtgcgtgagctggctttttacgggagagagtggggacccaggggcgcggagaaatggtcacttcgtggatctttgggggagaggggagaactttgggcccagtctaaccccttctttttaacaaatttttttttaaaatttgtttttgtttttattttggcgtctgcttctgcgtgccagacagcgcgaattgcctgtcaaagcacctagggtgggtgattggggagggcaggaaataaaactcaggcaggcctataagaaggagttgtttctatcgtgttgctttttttttgtttttaattttttttgtttttttgagacggagtctcactgtgtcgcccaggctggagtgcagtggctgc

SEQ ID NO: 58228 - DNA, 1200 bp, Homo sapiens
aagtttgttgtgagtcataaatggataatgaatataaatgcgcattgaaaataaacataaaatgttacccacatttcttgtgttgttgttttgtgacgactttatttcttggtttctgttattttacctggggtgggaggtggggggtaattcccgtatgaaatgtgtcgtctcaagaaatcaagtagaggcgaggactgtgttcctccggccagcaggtggcaccatactcgtttggtgcgttccgctggagaattctggcccttccgccgcgccgtaggtttgttgcctcaccagtgcgcccgccggagggtgtttatcgcggctagagagatgtcgctgctgcggtcgctgcgcgtgtttctggtcgcgcggaccgggagctacccggtgagaagtcctggtgctggtaccgacctgctgtccctgcagctctcctgtgcgcctgtacctttcccttcctcccaacctcgtttgactccatctcaccttccccgacagcattgcctctgcccagtccagccccggtgcacccccctttgcacactgtccgctccctaaggtcgcttccctgcccgtgtacccttcaccctctggagtttgctgcttcctgctcctcatccctttcttatctcatctaggctgggtctcttctgcgtcagtcgccccagccaaggcacacattttatgctgggccccgtctgtctgcctcggcctccagcaaggagctcctcatgaagctgcggcggaaaacaggctactcctttgtaaattgcaagaaagctctggagacttgtggcggggacctcaaacaggtgtgtgtgtggaggggtgcagggcggagtactagagctcgacctcagactcttggggcggtcacgctggggagcataaagttagactgctcttcagtgaccataatggcacagtcctaagtggaaatctggcttaaatgacaaccttggccttgactttgtcttatttgaaagcagttgagtatcccaggattaacaaaccagactgttacggtgtttcttgttgcctggagctgaaagggtttgtgtgagctttggagtcagattgttcaggagtcaaattgtggggcccccacactgtctgactttagactttttttttttttttcagacggagtcttgctctgtggcccaggccggcgtgcaatggcacgatgttggctca

SEQ ID NO: 58229 - DNA, 1084 bp, Homo sapiens
aaaaggtggcaggacaattgaggagcattgtttttaggaatttgatctttcttttcaaaaaatctggttgtgaatttgtaaagatacattcttttagagcctgttggctataggaaccacatctggatcattgtggtgggactagcatcttgctttcttcctaagtatccttgatggagggtgggtggtagggaagggttggagcttgctgggaatttactaatctgaagtttccagtcaaggcatcagttccgtttttatcaggtcatcttgtattatctatgatgtttcaatgagtcatgggtgagaaaccaggcagacagctatgtatgaggcttattaagaaattctggaagagctgggtgtttcagccttgtcagtttctgggaattaactattgggtatatgctttgagctattttaaaatttgttttggtttctggattctcctttttcatgacttttagatatgactatggctaatccaggcatacttatacagacccttttgtttattctcctacccctttttaccttttggcttatttggacttctgttagaagagaataacatcctgagagaaaggggaaaaataagttaaaatctgtttctggttctcataaataactcttgacaatgttatcttttctgtttttgatgagaggaaattgaaactatccgatgacatggtgctttgagctgtggactttttccggatagaagggatgatcaggagttgtctgtgtcagttatggagtattcaggatggtgggaaaaagcacctaattgctttggagtcagatctgagttttaattctaactctgccttgtgttactaggtgggttacctaagttctctaagcctaagcttattgtaatagtagctagcatttgagtgctatgtgccagatactatagttaatgctttatttatttatttatttttgagacggagtcttgctctgttgcccaggctggagtgcagtggcacaatctcggctcactgcaagctctgcctcccgggctcacgccattctcctgccttagcctcctgagtagctgggactgtaggtgcccgccagc

SEQ ID NO: 58230 - DNA, 2858 bp, Homo sapiens
tcatcaccactgccccctcttgaatccccccacatctaggtttcttcccctctggctagctcttagggtcttttcctgggataaaaagggagtgggaagagtcaggagtgagctataaacacacgcaggctcccttcctttttcagccatcagcacagttgagcagccagcagaggcggtgaagttgctgcctgggtcacagcctggttagtgatgcagccaggagagcagaaatcatggcaacaccgaggtcagggaggccggagccttctcgggggttgggatctgagtaggcaaggccatcccttctcagggcaggcttatttaaagtccggccagtgatgcaagaggaacacactgcctccctccccccacccttcccccctcccagctcctctcgttccactgagggaatttgggagaggctgacaccaccaactcagcggatttgcccctagggaagttgggggagctccttggaacgtgaaccccaggaattagtgacctgctgactaatgttgccaaacggggagacgtggggcgcacgaggccccgaagctggccgcccaccaggctctaggcctcagtgtgttcaactgcagcaccggcccttcgcgctcggtggagaaggggagggagcgctccggcttcggccccaggagccagctcccgccccagcctccggggccaggtggccccggtcggggggctctctagagaaacgccacactcgtccttacaccccgcggaaaatctgccgctattttggacacattcctcaaggccaaaagaagaacgtggcggagggggaaagagtttcgagtctcccactgtgaccaaactaagaggttccaccctcgggccccagctttctcccgccccgggagaggcctcggcctccgcctcacccccgcgagggcctgcgggccccctcgcgcctccacctgacgctctggaaggcgggggccgccagccgctgcccacagagaactcgcactttttcgctgcgcgattcagaaccacgccgggtctgatgccatccggcgaattatgtaaccagggacaccgctcccgggctaaacaaacgcggctctgtgtgtgcagcgccggccccgggggagcgcaccgggcagggaggggctctggccgggcctcagggtcgggcttgtttgctcagcgaaactggtcagaggcagccgggagggagcccgacgccgccaaggtcccggggcctgcgctgagccgggaacccgccacgtctggtgcgccagggcccgggcccctcccccaccgcgaccgcccccgcctccaagaggtgaacttggtcccaagtcccgccggacgccgtcaccgccagctagctgcccgaacgacctcgggcttgggggggcctgcaagtgctggactccagtctcggttccgttccacctggggctccctctgtcaccttcctaacccctccccgcgatcccggggcagccgcgcgcggcggtgaaggaaagtgacgaccccacccccaactccggaggcggtggacgcggagtggcccagtgcttcgagagctacccctccgtctctcagccccgagggggaggggttgcgggacagggtgacagctgcgccgaagacgccctttccgctcgggcgccgggatccccgtgcaacccccacggaggtctgagtgccagccgggatgcgggggcggatggaccggaggggtccagtcgggatcgctggctctaagccctggaggtcaagggccgagacctgggttcggggctgtgctagccccctccgcgcccgggggcgacgcaaagttttgggaagttgctgcccctaccttgcttggtgagcaccagggcgtcttccctccgcgcctgggtgatgatggagccgtgttccatctaacaatcccgcgggcccgggctggctgggcgggaggacgggcgggcgcgcgggctgggctgggctggggggcctgggcgggggcccgctccggctcccgagactccgacttccacagctgttcacatcccccctctcgtttcctccccggaccgggaagggaggcggcctgtacaaagggcgggcggcccgggcagcggctcccccgggtgcccccggccccgatcccccagcggcagctccgggctcctcagtttgggtccaacatggagaatccggagcgaaaacaagaggaggaaatgggacacggggcggtttccaggctcccccctcccctccgtactccagataaacaacccgcggctgcagcgcccacccccgcgcgcctcccggctctcgactcggcctcttcacggccagctggagcttcccgctgggggctgcgtcctaggccctgggaccctccatctgtgagcggccggggctgcggacagtcgggagctttgctattttgttacggaaaaagcgaatcctcaaggggggtggggtggcgggcgggcaggctggcgggggagacttgaaaccgttccggtgctccgattggctctcttggagaaaaggggcgtggcccctccttactatgcggtgagaggacctaacaacattccaggcgccacggccacgcccccgggccactccccccgcgccagactgcggcctcccagtctcctcggccacacccccttcccaactatttaaaaggccgctccgaagctcacgttctggtgctctgtgctggggtgttcttttctcggagggcgcactcggggaaggtggaaaggtttcccccttcaggggtgaccaagacaagccgctaagcctaacctgactccagcaggggatggggcggatcggaagttaccttacccccctgcttagccctagaatcaagg

SEQ ID NO: 58231 - DNA, 1347 bp, Homo sapiens
aacagctcctctttgcctccctggattcttttccaaaatgctgtcagcactgccagttggaaaatatttttctccctccctttgtcttctttcttattaagaaaaaaaaaaaagccatctggtgtcaaattcactcctggcacatcataaagggtagcactaaaaatgtccccgaaaaactaaaagcaaaaccacagtagtacacatgggatttaatctcagcatcctagaatttcagagttgatagggccctctgagatcaaacccttcctgtagacgggaggaaactgaggccgggagggattatgttattctttcaaaaatgtttactgagcgcctactatgttcaagacactcttcaggcgccgcagatgaatcacgaacacaacagtgaggcagaaatccccgcctccttggagctttccgtgggaggttcttgcctcggccctcgggcctgcgtctgccgccgtttttaaacggccccgaagttgggagctctggctgggccacctccgggctgggggcccggcctggggccgcccctcttttcccgcccggagccgcagtgtccagaggggcgaagtttgcggccaccgccggccgtgcagtctcccgcgcttcccccgccggagcgccggccccgcattcctccgggttgagcaacagcttttcctccgagggcggctggccgggcaaggcggggccgccagcgctggggccctcgcggggcgcggcccgagtgtccggggcctctggcagcgccccgggtttaagtggagcgcggccgccagaccctccccggggagccgagctcggagaggggggccgcagagcccaggccccagcctgcccttcctgcagcgccggcgggattgccgaaagaccaagcgggtgccaggcctcacccgaccttgatgttggcgttagtccgggttgaccgcccactctgacgctctatacagagagctcctttgcttccatttttactccaatcctggaaattctttgtcgatgaaaaggggacagtttatagtgaactccaaaagaggggtcctaacctaacccagctctttgaatttaaacacttacaataatcatatgtgtgtgtgtgtatgtgtgtgtatatatatatgtacacatacatctgtgtacacagacgtatgtgtatacatacatatatatgtatgcatacatgtatgtatgcatacatgtatgtatgcatagatgtatgtgtatatatgtatgtatacatatatacactcacacacacatatatacatacatatttgagacagagtcttgttctgtcccccagcctggagtgcagtggcatgatctcggctcact

SEQ ID NO: 58232 - DNA, 1631 bp, Homo sapiens
tgagaagccatgggtttccttccttggacaatttcagagcccatcattatggtttatggaaaggaagtggcactgagagagacccttgcttctcctggcagctcttctcccttgagaaagctcctcaacttctcctgagcttagtttcagaagtgattgttcatcctctcccactgggagtcctgggatgggctccgtatattttactccagccacaggcggatgagtgagatgaccttttcaggtcactcaggagatcctccagtttctcaggataatctaagcatctccctttcctttagaagctgtcagagctaactcagcgtgggtgtgggctctttgcagctacaccacctcccctccaatatttagaagttctttgctggttcttagggtctcctaatcacaggtctttttttctgggctctgcctgaaaggccacatccgttttttccctgaaagctagctaggtcctctgggctaaacaccaccgcccctcagctctagaaatggctgattttcatgacgccctttgccaaccagattatttcttaaattgctctcccccctgctgggtgttctgggacacagacgccagtgtgtggggtccccggctttcctttctcccagagcagctggaggagagcctcagtttctccaccgcacaccctggcctgagggtagcagccgacccagtcgggggagtgggcctcctgcgccctcggaggcacaggaccgcggggccccaccgaggaccccctgaacggcagcccgccgcgaggcagcgtggggaccaaactgccgcgccccagagcccgccgccgcctgtccccgcgtctgaggtccgcaaggaagagctgcgggaatgcacgcccggggaagaggctttgtgaaccgaggctcggcgcgccccccacccgcgcccctcatgggcagccgggcccagcccgccgcccgggcccctctgggaagggcttggaggcgacgcggggggtcgggggaggagggagcgttcctgcaaatcacatgattttcccgcttatataaatcacagcttgtttttctcaaccagctgcagacttaaaggtgcagtgtcttctttctctcccaagggcagaggttccccagggtgcttttgacgacccctgagctggggtggggtggtttcaccaagcaggggtcagggttcagggttcaggaaccccccaccccatcccccatccccgggatgtttccttttagctcgggaccagggaggggcatggaaatccggtcgccaaatcagcaggcagagccgagctggggcggcctccagcgcctcgcctcggtcagcgatcactctggagaccagcgatccccgtgggggaccctgagctgaggggttacaatgaaactggccggtggcagatttgcggtggccaagagcagacttctaagggtgatgcttactgttctgaccagccctggttatttgtttgaggctaagttatgtgagaagaaaaacgagctcaacacatatatccagcacctatcatctacctattaggcactgtagggagaaaccaagaccttttagacagtcgtcaccttcaagtggtttataggatttaggtgatgagatatgtagatat

SEQ ID NO: 58233 - DNA, 721 bp, Homo sapiens
ggcctgtccaggactttttgaaggggttttgtttgttttgcttttaggtatgtctatttgttattttcttaataaaaacaccactagcggccaggtgcggtggctaacgcctgcactccagcctgggtgacagagaccctgtcacgaaaaaaaaaaaaaatctaaagaaagcctctctttctagccaatgtttaaaagctctcagtgttgctcctctctcttcctacatttcctcttcctaagcaaagtaacataaaaactctagacaattggcaggtatttgtgtgttcacctgtgggagagagttcacttttcagggagcgggaataaaggaaaacgattgtcgagtgcacgtgatttaaattaagtcctggcctccatcaaagtggtgttgggaaccatctggtggccagaaaggttttaacacaggccagggctccctgctgtcctctcgtggcaagaggtggtatgacgccctaggtaggaatccttgccctgcgttgttcaggattacagaaaagatacagatcaggaaggaaggcagttaaagtcaacgtttacttaatgccctaaagcagatggggctccgggaggagccaggacagcaccgacgctggcatggtatctgcagttactgcctgctgcccacaggagattgacaaaaaccccaaatatgacaatcccaattcataattttgggtggagcggggtggagttttat

SEQ ID NO: 58234 - DNA, 1418 bp, Homo sapiens
tggcaggctacgatgaaaatgattaacaggtacaaagtgctttgtacattgggagatcaggagacattaattttgattaaggtatctgggaatgccctgtggagtaggcagatttgacctgggccccaatcataggggctgaggcaaggagcttaaagatggaaatgacagtatgagttaaggctgagaggtagaagtaaacagggtgcgctttgttatcagggagttattggtggggggtggggcagaagagtagggtaaacgaatgggtacaggtgggaagaaaaaatgtagttggttcctacattttgaggattttgatgtgactagtcattctttatagttttaaaacgtttctgaaaaacactgctttcaatatggccagaggcatctttgggcagagtggatctgagggatggcaggggtcgggaaagtggcgggccagaaatgacaactggcttgccccggaagaaggcagggagtgggaggatggccgagaccttcggcggcacaagagcagttagtggccaatattcgccccgaggtgaggaaggagtgtctgcgaggaggcgggacacccttagagctcagcaggcagcaggaagctgcagaacaacgcttataaagacatgtcacccacactgggagggcagcagcgaaatccgcggcagccgggttgttacagcctttgagggaagtcgcaagacccagctccgcccaacagcatcgggccccgcgccccgccccatgccctcgccccgcccctcatccctcgccccgcccctcgcctctcgccccgcccctcgcctctcgccccgcctcccgcgctccccgtcaggttcaaagccccctcccgcctaacgtcttcagcccagccaggctgcccttcttccctgcggagggagggcctgggcggtcgcgttggcgggagggaggttacctttcccagtctcgctctggccgcctgagccaggaggaagcagcggcgaggtctgcgggaggcatggcgggagctccggacgagcgccggcggggccccgcggcaggggagcagctgcagcagcaacacgtctcttgccaggtcttccccgagcgtctggcccaggggaatccccagcaagggttcttctccagcttcttcaccagcaaccagaagtgccagcttaggctcctgaagacgctggagacaagtaggagccatgacctggaggctgtggttccacagaatgggtctgagaccgggtgggcgaggaagggcctgggcaacacctggccaggggcttcaggttcagcacagagtctagacagactgggcatcatgggggctgggttgggagcctgaggctcagtttccccactagaggtggcgctgagacccttttcgtcgctgtttttggcttgtggaatgaatttgtctg

SEQ ID NO: 58235 - DNA, 1849 bp, Homo sapiens
agtaatgtgcccaagggtgcacaatgggattcatctctgtcatcacccagtctgatgcctcttcacaagcctgctcctgcctctccgtcatgcctcactacctcaccaccccacacaaacagcctcaagaggttaaggaaccaacccgtctcagaattatctgacagttgaatgaagaattctgactttggcctctatctacttttaaagactgtgttggttattatgtgctaactgaaagcaatattcgactattatttttaatggtagattaaaatagaggatggaaataaataagaagtaaacactttggtaaattttgcttgccaacatttattctgagctgagaatttcacgcgcaattgatgtctaataatatacacattcaaaagaaataaatgaaataaggaataaatgaaaagagcaaaatgcgcatttaaccctgcccagccattcttttggacaccggtggtgcggatgcaaatatggatctacatgtttcagtggagttacatttagggttcacttattatttaatttagtatatattagaattgagcacatatttcataaatcacattacataaacatgtgaggctaggacccctgtatgactcatcattgtagttactagaatgcccagcagagaaccttgcaggcttgtataataatgagtgaagaagaatgcatcttcaactttctaaatcctggctcagtttttttgttacatttagttatacatgcggtgtaaaggagacatttgagataattatcaaaaaataaataataattgtttctactcccaattttttgtaacatctacattattaaagcaaaaaattatttcaggtttttagtttttaatagaagaaaatgttcttagggttctgctttggttttatttagtcattgtgaaaattgcctcatgtttactttgtgtagatgtcccagataattgtgaatatttctttaaccaggtcatctggccagtggtaatgttgagtcataaggagaggtcatgaaagttaaagaatgctgagtcattgtcttttttgcaatccagtgaatatgttcttaaggattattattattttttgaacctatgttgaaagcagtaatataagacctctagctatttcttgctctgaatcatgtttggcaaagccagacattgtgaggataaacactatgctctatttgtggctttcagttctcatctgaaaaattattgaggattccagtcacggcacatcccagagcagaaattgtcagacacactgttgtcaatgtgccaaatattcctaggaagtctgcaagttttttatgccggaaaattacattgtgaagaacaaattcatctttttttttcctacggtggacaatagttgaattgaaccaagagaatcttgtcagggatttcttgataaagggctgcactgcttccacatctaggcttaaccccttggagaacatccttgatagatttatgcagaaaatgcaggcatgctaatgaggtgaaactgcaagacacactcaatagaaacacaatgaattcttgagctaattgctaccagtctgacttaagtaagttaagtgagaagcatggtaggtgctcttctaccctgaaaatcctgtttgctcttccgaaaaatgccaaagtcacgagattacaatttttttaaagccccagcagtgtgtctcaaaacaggagggagagttctaattggaataattttttcttttaaaataattttatttcaggtgccatgttaatgactttccagtagtaaaatcccaaaacaatgaataaaatttcagtaagattattctaactctatccccttttgca

SEQ ID NO: 58236 - DNA, 3101 bp, Homo sapiens
taataatgttaggcttactcaaaagttgtctatgaacagcagatagtttgaattgggttgtgcaaaaaggcacatgtggataattttggaagactacaatttgtctcttacaaaggtagcttttacgtagggctttaccccctttattcctgtctctgcttaatcattatcccaggataacaaccaaaggacaattgccagcttattttagtctattcacctaggcagcttaatctatttttcttactataaattagtatcttatttttctgattattaatacattcctataaaacagtcaaataatgtagaaatgaataaaacatcagttgtaagtctccattaattggcagaaaggttaggatgagttgaaattcagggatgtctgttgcatgcatattacttatactacgtccaacaaaagaatgaagcattttgttaaaaagaaaattgaaactaggaggaagagtttgtacggtgtctattttccatatatggtcattcaaacagtaaagaagcatttctgaaatacaaagacaaccatgaaaagaatgagccatagtacatcaaatattttgtgaatgatcctagttttccatttcattttgtaacagaacacaatatttaacctgtcctttcgtggtcaaaacagtagaatgcaacacagcaagacagtctgtctagtactctgaaaccagatttaataatcaatagaagcaacagaacatgaatcaagcatgcatgtgaataaaatgaagacataacaaaagactgatttttctttgggaggcaaaggtgggaggatagcctgaggccaggaggtcaagaccagcctggtcagtgtagcaagatcctgtctctacaaaagaaaaaaaagattagccaggcatggcacagaactgtagtctcaggtactcaggaggctgaggtggaagagtcccttgagcccaggaagttgaagctgcagtgaaccatgatcacaccgctgcactccagcttgggtaacagagcgagaccctgtcacacacacacacaaagacagactttttagtacttttacatgaaagaagtgtgaataattgatgacaacaatgtcttttctttcttctaaaataaatgatcttataagcagagaatgaaaagctgaagtaaatatcataattaaccacgaaacactagaggcattattattgcaatctcttaaataataaaacaaagattaggctgcagaatttgaagtaaggatataaagtaaacactaaattcatgttaatcctggcttcttttatcttcattcagtaacaatcaacatttaagaaatatttattaggctccattgatgtgccaggaaattggtgaggccttgagaattttagtgatgagtaagcacggttgttatatttagggagttcctattctagaggggatatagataaatagacaagcaaaattagatggttatgacacctacggtgataaaggtaaagaactggttgctagggaaccatttaagaagggaacacactgcaagaaggagtggcctctctactaaatcttaacaagctagtaggaatcacacaggagagtagattgaagaggaggtgcagcctataaataaaaggagagggatatgtaaaacattggcatacaaggcagcacaatatatttaaagaactgcaaatatttagggtaattttcaagaaagtaatttcaacagttcctaataagtcaagttccactaacttttggatttttatatattttgaaaatcaaaatattatattattgaatctcctacagatatgagttggcattaattattattgcaggaaagcctttctctatcactaatttgacttgattcctaattgtaggagagacttcatatatgccaattcgtgaattgttcattgcttttataattcatttactcaaacatcaacgtctaatctctgagtttatatttaatatctgccccaagaaagtccataatattcccaggtttctcaataccatgggactagccacataggattgtattgggaaaccttagacaattcattatttgtagaagtacttgtttaggtcatgactggaagccagataagactcacagcaatctggaaattatcttcataaagttgtacttttttcccacatttttacatctttcaagtctttaaaactcttgggaattttctatgtgttctgctgagatgaaaccttgtgtctataaataagttctcacatttcatttcggaaagatatctttgttgacctttgaaatgagcttcatcttttgtttgcagtttgaaatccattttgagtgagagtagagtttccattgcagctggaaagcttgcaatctttgtctattgactttagcaactaacccctgtagcctggcaactatgtctaggacacattgagcagtcaataaatacacactgagtaaataaaggaatgttcatggatctgcattcacactactgactaggtagtctttaagggccattttagctctaaatttttaggattctatagaaaaagaacaatatgtaaggaagaacatgtcttcttagaaatgttcagaagaggaagaagaagaaagaggaggtggcagaggcagggaaagagaagatgggcaggtggggaggacgagagaaaacatgcaggtaggaaatataacacagagtgtggagtcttttcagatggtctggagggtccatgtcatgcagattcagtcagcactgttcaaatcatctgctccctcaggcaggaattcgatccataacaagtagagtaatgttaaagtctgtttaatccatttggagtacacatcccagggaatacaagtatcttgagcagccaaaaagaggttttgaaaattccaaagctgctttatttagttgagcaacggtacataccattggaagaagcagcttgggaaattcattaaaaggtaaagatttcttttaatgaaatacagtagcttggcagttaaacaaaaattgatatacgccttgggaacttttacttccttggtatgcccttcatagcacatgcacagagaatagtgatgctagttttccaagaaacat

SEQ ID NO: 58237 - DNA, 695 bp, Homo sapiens
caacaagacatacaactactgcagagagtaaaccttatcattaaagggctgttcctggttctccatcactatcttatgaaggagttagaaatattttagtcagtgacttggattttatctcacagccacaggataccctgatgtcattttaacaaaaagtattaatctttaaacatcagctttatttggggctggagttttttagcgaatcatatttctgcagcttgaaacaaatgagtcacccttctgagatgaactcagactgcaagacacacgttctagaagtatttgcagaaccacaaatacacatgactccggtgacctgtgccaagcttctgtttacacacctgtgttggtaatgctgcaatcttcattcctccgccttgtgtggtatatgatgaccacccacacgagtgacgtgcccaccacacagcaaaccacggctatgatcacgacacccacagtggcccatccgtcatcgtctaacgatggggctgtcatctgaggggagtcgcaggttggagtggggatcacactgaggcgcacgtttcctctctcagtgccaagggtgttagacatctcacatgtgtatttcccagcatcactgacatctgagtccacaataatcagaagctgattgcctgctgcaaaaaagtgcctctcggttaccaccaatgggctatcatctttggtcc

SEQ ID NO: 58238 - DNA, 1554 bp, Homo sapiens
ctcaaaataatagaaaactctttttctccaacttacctcttacaccctgcctgattccctcaacaacattttaagtttttccctaaaatccgaaaaagctgacactggccctattaattcctctatcaaaatgactacattctgaatgatccgaacagtctgaaaaatacattaaactttaaaaccactcttccaaccacgcatgcagaagttcgccaaagcatacagtatgtctttcaattacgtaatgcttcaaatagcgaacagagcaaaagtttctgacagagcaaaaatcaaaagcccattgcacaaccttaaattaccatttgagaaatttttcaaaggtcaattaatttaactcccttttctttctcttaggacagagatcaggttgaggatataactggcatgataaacagtatcttccttgccctttgtagacctttttgctctaagtaatttttaatctgtattttacaaagaaaaacttagtggacttaaaattgtttccctcttaagcagttaccaatttcctggagatcctgagaaggttcactgtaatcaccaaaacaaactgatcactgtcctttttaatccctatacgaaacacatatggatgaaatggatccattgtaatcaaactgatctgggaaagattaagatactacttctgaggctgtatgcatttccttgacaacaaaggaaatctgctaggagaaaagtgggcatatttaggaaccaattacgttcgagtactgacagcaaaacgtgtaacttacaaagtctttaaactggaaagcccccggaaggcacaatcagcaatgtagctgactctgttgttcccaatgtgcagtgtatttagtaagcttaggccaaggaagcttgaatcatctaaccttgataagtgattgaaagttaggtccctgtaaagaaaaaagagaaaagcaatagcttttatttttcaattcaacacaatgatttgttttccaaaagacaggtactgtatgagctacactaatccttatttttaaattctgccttaataatatccaagtaaatatttctaatatcagtaattaaaaaaatacgttctctttacttgaaaataaccatcattgcttttgccaacgtgacatagaactgcaacagtagaactggcttcaacttatcacaacaaaaataagactaggttgcatgtgaaaaaagctgtcaccttggaaactttgttatgaaaatttcacagatcagtggtaagaagctcatgccctggcatgatccctgctctcaaacctgaggagaataaataaaaggcaactcacagctcactgagcttctggcagaactcccaggcatcagggctgatcctgttgatggcattttggctgagatgaagttcctgcagcatcagcaagccgtaaagccagcctttggtaatctctgttaggttgttatggtccagctgcctacatttacagtaagaatcaaaagcaggatcaaaacttcattatctagtctcttcaaaggggacatatgattacaacctattacagattc

SEQ ID NO: 58239 - DNA, 919 bp, Homo sapiens
atctggaaagctgaaaaacaaaaagccaggctatagctgttttaagacactgatccaaagtgactcataaatcagcctgctatattcaagttttagtctggaaaatacagaaaaacagctgtgaaaaccataaggactattacccccaccccacccccaactgtggtccggaccataagatttataacaggtcaacactaaagaagtcacaccagcagaaactacctttgggactttcgcctgggtcctgttgagaactcaaacatttctacataagacaaataattctgaaatgccagtgagaatttaataatactggaagttctcattggcaatttagcaacttttccgtctctgggctaaataacattctaacaagcattcctctttaggttgagaactgtttaagcgcaaactcttgacataaactctagcttgcctttaatggcagttgtgagcaaggcttggcgtagttactgggttgtttttttttagacaaagtctcgctcacatagttactctttaagagccactttcattaaagcattagaggttattttctaaaaggagtactgatacagtattattattttacagctcaaactattcgacttttcacacatgggactcctatagtaataaatcacaaccaaataaagtggaaaaaatacatacacacgtaatttttcttaaacttgcaaattcaacaaatgaaacaaaagatagacactgaactttttctgaaaagtgctttcataagccagtccaaagacaaactcctactattttgattacccaaggaaagggaaggtaagatatggggaacaaaaacatgcatttttctatttatatctgaactcggaaatcatctccttaagacgatttttctaattacgaaaaactttagtagctttttaga

SEQ ID NO: 58240 - DNA, 2069 bp, Homo sapiens
aaagttatttagattagcacaataattttaaaatataaattcttaaacacctgaccaaacctcctaccacattagggcattggaatagttcactagaattgttttaaaaacttaaaattttcattgcaattctgctaagtcaaaatataagattacgtatgaagtgcacttttattttaaacagaacaactactttaaaaaatacaaattttgattgtttactttttacagcactccaattttaaaactgggactgaggaagaaaagagatgacatttggaaaagatcagcatttccaactaaattacattttcttccttgttcttcacgcagttggcagtgatttcaggttttcagacttcgcagctaaaaatccaaaaacttgcataagagctccctgcgctctcccctaaaccgtctgggcgttctgaggagctacagaaatcacgcccttgattctggataatcgagttccgccctttccatagctaccgaccagtctttacaatctggttgaggagtgggaacttacggtctgctaatgtgaaaaagcaagcagagggagaacaacagaagtacgtccaccataacttggagaatgaccgaattctgttgagggggcttcccaaatgaaaagcctgacttcagttactgggtgggaacaggaaaaggagtctgacgcagctagaaactaaaactgaaccagactcataactcagcgagaactgcaaactcctgatgtgtgcaggttgccgcttatctcccctgggcctggcaggagcaagcatttgaaccccttggctagcttagggcgcaggacttcatccccaatctctggcgtcgttactggcccccaaccctggtctacctgcagccagttaggacgcgccaagagcccacctgcgccgcccgcaaagcacgtgggagggaaactgaggcccggacagttctttttccacgcccacggagcgccgatcgcggcctgggccagaaggagctatacggcaaaaaggggactgcacgccgaaccccattccccgccggctcctgttttctcgaatctccagcggcccgggccccctccccccgcgggaagaatacttacagccgagcgacccaggacgggagtggctcgggaagacgcgctagccgcttacgactgcagtccagcaggtccccgaggcagcggcaggtagtggggcatgggcgctcggcggctaccccagagggctgcccgagttccccgcgaccgccgctgtctgaccggccagcgcgccccagcaccgcgcacagcagcagccccaaccccgcggcgcgcgcacggaggctcggcgcgctcatcgcggtccagcggcctaggtctctacccgaagctcccagccggcgcgcgctcggggcccggcacaaacttccagccgagggtgcacgcccgccctcgcggtcgcgtgcgcgctcctccctcgcgctgcccggtcaattccttcttttactcccggcggcgaagccctttcatgcccccaaacagcaggagggaaaccgaaaagaactgccaactgcaacagagttgcagcttgagcagcgtcggctcgccgaagccccttcttgtctgcaaaagaaactttttcgcctccaccccgcggcactgcgccaagtccccgcgcggcggagtagcaaggcgggcgggtagaggccgacgcgcgcccattggccgactcggctgcgggcgtccccgtggccacgtgacaataacaccgctccagccgggggcctacgcgcgggagaaagtggagctgagattgtaggaaattcagagttatattttccagcctctccagccagaagtctccactacgtcgtgggaaacatatatcaaatggagttgaaaggcaaaaggaagtgagcaaatactgggctagttctcggagttggaggtatttaggagaacttcagggaagtaaagtttaattagcagtgttttcaggaaacttttcaattccaaattaaagacactgataaattatcctaccatccacagatgaaagagtggtttcaatgaaaacagctctttc

SEQ ID NO: 58241 - DNA, 1064 bp, Homo sapiens
agagtgacagcaaagatagttgtaatagaggaagaagaggtacataaaattctgtttaatctcccaaaatgtatcagggaataacagtgacctagaaacaggattaatgtatcactgaattctctgatactcttatgatgtcattttcttgtatacacacacacacacacacacacacacacacacagaggacacagtgctatcaaatgttgaatctcagtttttgtggataatggcttacaaataagaatttagtatgagaaagtcaaattcattttgaccagaggtcttttaacatttgaaataaaatgagataagatgttggatttctctactccttcagaggtttacactggttaaccaggtagttggaagttagctttccattggaaattgctgagatcacaccagacagtttctcgtttccagctgtgtcccagtgaatggcaagtttcatccattttcaaaagggtctcctaccacccattttgtggtgagcataacccaatcccagtgctctttttagttttcctggtcttttttctttctctggcaagtgtgagactttcttatcttgagtgctggcaaggccagtgactcaccgataaaaagtaatagaggtgctaaactgtcagttttaacatccaaggacaagaatgaaagctaaacactcagtacttgctttatcattacaatgaatgacacagtttgtgtaagtgggagctgtgaaaagggaaaagagataaggcaaaggaggaagaaaagcacaaaaatccccagataatgatgccaaaagcaaatgttgctgtactttgtaacttaaccatatcttttcccattcattaaggcattttagaagaaatagataaccttcctttctctctctctctctcacacacacatacaaacacacaaaatgcacagcttcacttagagagcagattactttacacaacccctgctatgaacatgtcttaactttcagaaaatatttagaaaaataaagatagccacccatctgtttttctcaagttggccaactgtgtgatattatttgaattgaa

SEQ ID NO: 58242 - DNA, 936 bp, Homo sapiens
caagacctcacaccacagcctaccatcatgcctgatacctaagtagctgccttcacagctaacaaaagacaaagaaaacacagatgcagattattctaaaggagtaagttaaagaaatgaaaggggcttcctttttaagttcaaatagcaaaagcaactaatatactttggaaagcacacgcgataacacaacacccaaattcacttggagaggttccctgtgacatgctctaacaagtcagaaattcagtaagtgtagttatatcctgcaagtgattttgaaaaggtgtagagaataaccctttctagatgcatactctatgttttacttggcccagacaacagtgtttgatggaatgataattggatgttgatgaaaaacatcaatcatcattgcattgtgacttgagttatatttgtttaatgttaaactttcagttgtgaaataaaccattccggctggggaacagatgattttgtttctaaaacttcattctttcacttattaggcaagagtgagtcattccttataacaactgggcttattgaaaattccagaattactcacacaggtttgaagcatttttcatgtaaagaaaacatccttttttttttttggttgctgactgtaactatcctttctaaagctcatggttctggtacagccctattgctaatactgttattgtccaggcatgctttatgtatatttgtattcttccaaaacaggtcatctatactgttctgggatcaactacctttgtattcatttcttagtggccaatgtcagcctcacaaacatacatctctacatgcaaacaactggttgcactcagctccctcccaggtttagccacaatgtaggagaaacactatctcctcaccatttcattctttcccttcctgagtcattccctgtggggaagcaccaacaaa

SEQ ID NO: 58243 - DNA, 1609 bp, Homo sapiens
gttaaggatttccagatgaaataatcctggatttacggtgggccttaaatccagtggctcacggtgtccttaggggagagagcacagacacatatgcacagggacgaaggccacaggaagaaggagacaaaggctggaggtagactgccaaaggcaaggaaagactggaccattagaagctgggagaggcaaggaatcatctcccctaagccttcagaggggagcaaggccctgctggcaacttgattttggacttttaggctccagagctgtgagagaataaatgtctgttgtttcaaggctccttttcgtggtactctgctgcagcatccctaagaaactaatccagcggggtcctggtcacagtggatttcctctgacattgactcttgtctttagtaaccagggagaataatccaagaaatatttttctctccatgtaccctaacaattcttgtatcaacatgatggaaccccattataagtgcatttgatttaatcaaattcaatttctcaaaaaaaaggaaaaaaaaaagaagagaaaactgataatttcaagtgttaacaaataatgtatttaccatttcagtgagcatgtatcccattcagaatgaactctgggtttgaaacacaaatctgtgctcctttatcagtcatgtttcctcatcctctcacactgtaagcatctctctttctttctctgactctctctctcttttatcacctttatatctaataaaaccttcttcccaagttcaaacacattaatatacctgtgcttaaccaaagagaaagtaatctgttccaatcctaaaggaaatgactcagctgcactgaaattagtcactgctatgtaacctaggaacaagatgtcattactatgtatgcagtctgggagctgaatatcaagctctagacctacctgtgaacattcaaacactcatttccaaactgagtaaaatggtatctgcctctgatgttgctcaattcgttaaccattattgccatattctcactgtattgtgataataaataaaatatatagttgtgattctcaaaagtttcttgaaactattcttaggccataatgtttacagggaaaaattatgagaagaaatacactcataaatgtttgaaaaatcttgcaccatataaaactttataaatttgtcttgtaatacttaggctatgttttaacttccttattttttccagggtgggagaaggaatgttctctggagaaatctgtatgatagaatagtgaaggtaactggcctgaactacagctcttgagccatctggtttcaccttcagggaggtaagtgcactgagaagtactagctaagtgtgggcacggacattggaacctcaagatgcaaaagaagagatattttcttcacatttgtaggcagactcaacagtatctttaacaggttctttgaaaaaatatttcattgaaaatagcatgttatctgctgggtgtggtggctcacgcctgtaatcccagcacttggaggggccgaggcagatggatcacctgaggtcaggagtttgagatcagcctggccaacacggtgaaaccttgtctttactaataataccacaatta

SEQ ID NO: 58244 - DNA, 2527 bp, Homo sapiens
ttggtgctgttttctatgtccttcctcctatggtgtcaattatatttttttccgtgaagtgatttggttggtgagtctaatctccaacagtgccctacctctttctcccaaaaaggcctcagttgaaaaatggctcaacactttccctgcaagctcacaatgaggatctcctattctccctgcattcggccagactcttctttttttgcatgctttcctctcccatgcttgggttgcacagagctaccgcacatctgtcttctaggtcaggctacagagtacttcggatacagcaagttacgacccatctggaaagacagatctacctgccttttggctttcttccttggtcaaaactaaaatccgaagtggagtgccccgagcgatagagaaagtgcctatagctttgacagccgcttggagcatgctcagtcggtctccaggcaccgggaggcggctcccccccaccaccccccgggccggcctccaccgcagcctgtccggcccccacccctggcgcgcgctcctccgcacccacaagggcgttcagcagccgcgcctccccttcccgccaccgcctccttctccgctggctgtggcgggcgaggacacgtcaggggccataaataaataaataattccattcacccgttgacagcgaggcgaatcggctgcggtttgctgggaacggagggctgcagcgcccaccctgcgccagagaccagataaagtaagtacagctggggagggaggggagaggaggaggaggaggaggaggtgccggctaagaggagggcgagcctgcgtctgcgacccgagctgcccgcggagccgcacgcgtgtgtgcaaataatggccagcctgtgacaaacgtgccaacgcagagttggccagcgagcccttatatagacaaaaaaatcccgaagcggccgcgggagcagagctcgcgtcagccagtgcgcgccgacagctgcccgggaactgagggggcgcgcggggtcctgggcaaggagcgcctcgcgtgctttcggccaggaggtgctcacgctctcggcttttacaccgagactcagcgtggcgcggtgcaccccagtctccctggctcacgggactccgagggctgcttccagtgcggcgtgtctctagtgcgcgccccgccagcatccggcccccgagccccctagggtggcgtggcttcattgccgcagaaggtggaggcgggggtggagtgtgtggagagaacgtcttctctttgagcagatgatcaggacaggaagaggctgtgaggggaagacgaaataccgggggatgggggggttgtctttcttcatttttggtccccaggaaggatggcaggggtggaagcagatggaaaactatatgcgggcgaggcctgagcccaggcagaaagggacctctgacttggcaagggttcaggagggcctgagccttctggtcttgctgggccactgcaccacattgggggcgccaggcccggtcaggtggcgccacaggctgcgagcccgctcacgtgcgaactgcctgttttctcagcggatgctgcatcgcggcgcccttctccacccccttttctcctctacttccgcgaaaaggattgcagactgccttggaaagggcggtcgtgcccagtgccactttcccggtagggctgaggagggacttctgtagttccaattccagggaaattaaaattttacacacacacacacacacacacacacacacacacacacacacacacacgagacatagaagaggaaacgaggagtggtttctctacaattgttttttgatttcctttcctgtattatttcgtgtcctccttccctcttgggtcccaaaggagatgcggcagaggaataaaatagcggacaatgatgaaagtgatgggaaaaagactggacccagaggaaagagtgactactggatgccatttcctgtcaccccatgcttcatggctaaccccagtctgaactcagagggttgcaaactttccacagacaggttagcttgaatgtgttgtgttactggaaccacaagcactaagtatgcatttggtggagtgtggctgaaaaatgagagttgggtggggacagcagagggcaaatgagggttgagcaaagtgactaatatttagctctggtgaagcaatcctaactccaggttctacttctgactgagcagattacatttaaagcaatccaagtgagggactgaatgatctcagtggaaaggaaagattacaaccgtaagaaactcagtgtattgtgtaacaacttacaaactcagaaactattttttgcaaatacaacaacagtttgcagttacatattacttttttccccccaaggcatgtttgaataataagtgatctgaaattttaacatctgtttcccgatgttcaaattagtgtatccttctataaatgctcagtttatttctagacattcatttgctctttgataatgtctggcttatatttttggctttgagctcttttaaaggg

SEQ ID NO: 58245 - DNA, 2358 bp, Homo sapiens
actagagtgcccattttacttttagatatctttgactatgaggtcatacttatactgaacaaaaatctatctctctgtagttcagtgaatatatctattcacatatagttatgtcccaggaatggatctgctttggtatccctgctgtgctcaggcgtgggttgggaggtgcctgtgggaagggtggactccatgcaaattcagcaatggatttcagagctcagaagcttgagcccttggtcagttatactccctctagttgtaggtctttgaggcacatgcttaaaagcaccacatcatatttgtctatcttaattgtatgtaaaaataaaattgctaaaagctctagtgtactatttgctttatagagtgaaagataaatgtaaattttgctatggggagatggtagctaaaagaagctactatttttgcttctctcttactcccatgcagagcccttctcaaaaccacccatgcttccctcagagtaaggtgataaactgagcatggcaacattccaagacaagctcggtacaatttgcctttgcagtgtgtcttggctttgctcctcttcgtggttaattttcaatacaccactaaacaaattatattttttcaatgtttattgatttttctttcatctttgacttcctcaattaggaaaagggtaggctatgaatgtctctataacaaagaagtgagaacaagattagtgaactcaataattttgttaaagttttgagatcaaagcttattgtcctagtgtttttcttactcattttcagtatatgatgatgtaggccatttccttagattccattcatgtaactgtattacccttgcttagagattttaagttatgctacttattaaggagtaccatagaatttcttatgtcagccatgaaaacagctgtatactgtagctgtaaatagtgtttacagttatatacatgtagctgtttgtaacatggctttttagaatctgtctccagtgactttcaaacatcacctttgctggttatgtaaacttaaaacaatggatttgcttttggacatctaagagtatgatgtggtgtctcatgcctgtcatttaccagcaaaagaaatgttactcttcagctttgccacaatgccctcacattcttcaaccttgagttagtcagccacttatcagctgatgtgattttacatttttgccttgatcattaatcattcactctaagttctccatttatagcgtttgctagttgtttccaaacaaacatgctttctgggcttgaggaagggaaaagcaaaaaagatttaaaagaagatagtagatggtttcacagttattttggctttattactaatgctaactactgtcataaggtatagaactaagcttgaggtattaataaatattttattcaaggaacttttttttcagccctaatgagaatttataaacatgattggatggtgctgttgagttaaagggagaaactctccttatagagtagattgtttgctgattttctgaaaatttgaccttggatttacatagttttaaatattccttttagatttactgtggtttctaaaacagtctcttatttttggaggacatttatttattttgtgaaataagttaataaaattacatatgtcagctgacataatttttcacttttattattctgtagataataatcaaccaggtgtaaacatgagtaacatatttcccctattatatcatacattcctagccctttgaatgagcacctttgcaaaaatatatttcatttctgttttgattaaaatttgtttcatgagttggaagagatcatgaaccctgggtaatgcatttcgttgtaactaaaattcttaagtcaattaattatgagttacaccagacatggaactttatgacacccagagtattctattaaaatagcagtattgaaatagctgctggccctttctaaaaagtatgaccatttaaatcacctaaataatgatctctgaaattatagaattaaaaataccatactatttcctacctgataattggatgagaaattagacattaacctagccttccaaaggcctagagattcctttttttttctttcctgttccttcttatatgtgttaattttatattcagtaaaacagatcaaggaatttctcttagtttatgaacctttctagaaaagtaagtatagcatatacttttgctgttggttttatattaaagaaattatgaaaaagttgccttttaatataaataaaagtctttgtagaacttatctgtgatttacacatgcatgcttcagaaggtcaggtattctaacttttgtacaaggtgaaggtt

SEQ ID NO: 58246 - DNA, 1079 bp, Homo sapiens
aactataagaaaagtacttattacaatagcttataatattgagataagaatctaaacagtcctgaatttttatgaaataatttatagaatattaactagggaaatattgttaaaactgattatgcaactatttatgattttaaagaaatccaaataaatgagatattcaaatcttagaactgtacttctatatagcacatttttattaaatttatatacataaatatatacacacattgaatatacatatatacaggtaaatatttactgcatttgttgtttcttcaattctaagaagcacatatttcacattttaacatctttgaaatgaagatgtcttacactggatggcatcttatgatcattgttgctaaggtggcaggaatggcagagtcatggcctatgcctattaattgtttctgatcatgattgtacagtttcagtcttttgatatttcagtcaataaaccgtttgtggaccattagaggaaggaatataagttccgttgttcactgaatatcttctgttgatattttctggtaagatgaagaacatcagtgtcaaaatttaaaatggcataagcagcttgaaagaaattcctagagacagtaatggagtactctgtagaaatgccaaaccatggatgctctttataggccagaggaggatattgtgtaagaaaacacagctattgcaaactgtgattcaaaaagtgattcagaagaatcataatccgattgtgaaaatatttagcaatacctaatgagttagaagttgttttcttttagtacatatttatacacgtaattttgatataacttaaaattgttgtcattttcaattggataaaatgtattatgtaaacatgtataactgaagctatagcagagtattcaccagtatgtttacatagtttactctagtgttaggattgtgggtgatttgcatgtttttctttacgtatttttttatttttaaaattttaaattactaattagtatttatatctttggcaaatgataaatagttattgattttaatctttaagtgaaaatttattttaaatgtgtagggtaatt

SEQ ID NO: 58247 - DNA, 813 bp, Homo sapiens
agaggaaagtacaggaatgttcataggagtataatgacatctaactggagacagtccaaatctctatacatagttatgggttacatatagatatagatacatacacatgtatattcagaaatgacatatggtcaatccttattatgagtggttccatatttgtaaatttgcatatccacagaaatttgtgattcacagcacttttgcaatcatttgctgacatgcacagaacagcaaaaaaatttgttatgcaacacttacattcccagctgaagtcaaacaaggcaagaccctgccttctggttttagttttctctcatactgtaaaccagtattctttttatagtctaataccatgtttttcacattttgtgctttttgctggtgatcttgctgtttaaaatggtccctaagagtaatgctgaagtgctttctagcattcctcagtacaagaaaactgtgaagtgttttatagaaaaaatacttgtgttagataagcttcatccagacatgagttacagcgctattcgctgtaagttcaatgtcagtgaatcagcaatatgtattaagtaaggtgtctttaaacagaaacacacataaaacaaggttttgtattgattggttgatgaaaatgtgatcagagtctcacagaaacctatccttgtttttctactatgtgcagcggttcagcatttggtaattcagtgttcatggtgactttacagaacacagcttccatgaataatgagaatcaactgtactctgtgacatcagatttataagtctatgtgcatcatgtctgaatctaaaatt

SEQ ID NO: 58248 - DNA, 1400 bp, Homo sapiens
tctcagcctctcgagtagctaggattacaggtgcccaccaccatgcccagcaaatttttgtatttttagtagatatggggtttcgccacattggcaagactggtcttgaactcctgacctcaggtgatccacccgcctcggcctcccaaagtgctgggattacaggcatgagccaacatgcccggcctctctctcttcttataaggaaactagtcatagtggattatggcccaacttaatatttcttatgaccttatttaaccttaattacctcctcaatggtcttaactccacagacagatacattaagtgttagggcttcaacatgaattttggagggatataatttagttcgtaacaggtactaggatcataactctgagtactctcctcccttttaatcaattttaagagcaaatgcataatccagaatgtgttaaaatacaggtggttgtcattatttgtggtagttatgctctataaagttgccacaaacactgaatgaaaaaataccaaattgctgcttctaggggagatttagggttacaggcccctgaacctctgatcataaaattttaattcaccaagcaatccatgactttgttttctatgtgtttccatttaaagacattgtattcaatatatttcactgactgacattgaattttggccaaaggtgctataatttattcctgaattaagcttattaaacacatacctttcctccataagtcatatcacagccgtcttgtgcctaggaacaccaaacagcacttcagcattatgctttgaggccattttaaacagaagaattaccaactaaaagcacaaaaatgcagaaaatgtggtattatatagaccctgaaaaggacagttgtttacactctgggagctggaccaagaaagcagttcatcatcttgtttgacctccgctgggaaggtgagggcacacaatgcatgtcaggtgatccaaatttttcaccactctgcacatagccaccagtgactgcaaaagaactgagagtattgattttaaggttacaaatcaattttagtaagtagataaatatgtaaatatagaatctgcaaataatgaaggttgaatatacctattccctttctctggtgaaattaccgcatttcttatactttataaaggtgtttgtaattacccaatgtttttattacagtttgtttatctgttgtttataagaattggataagcctgcacaaccacaaagctaatttacattagcgtttttgtaggtaggcattggttatcatcctggagtttactgaagttctttttaaaggaacacaactttcttaagctataaaagcaataataattacacttagaatagtactaatcactagaagggtgttaagtgtaaagcttt

SEQ ID NO: 58249 - DNA, 632 bp, Homo sapiens
cttctgttagatcttcagcagaatacaggttttgtgtgtgtgtctcattctactgctgaggattaagtgacagtggaataaaaattactggtaatgtgataaagcagggcaacttttcacctttcacaccagccaaaggacatattgggtatctcccctgaaagctaagcttgttgtcatagtttaatacaacttttcaggtgtatactaaagaaagaagaaaataaattagtctgtaggtttttatgtcaatatagataataaaaaagaatgataattgaacttgctaatctgctgtattacttcaaagtaaaaacatgttgcaacatatatttctaagtaaatacatgttgcaaagtgcaaagtgcaacatgtatttacttggaagtaataccacagattagcaaattcaattataattctaagtaactattactacaggacttgctggaaccagttgggtgcttatgtatgagatatttgccaagctgcataaaagaaaagggctagagtttaaaacataaatgtgactttgtatttaattttacagagcatgattaactagtttatgatgtcactcggaatattatcattaaaattagatttaaagaaatggagggtttttatgtatt

SEQ ID NO: 58250 - DNA, 556 bp, Homo sapiens
agcaggggttgcaatcctagtctctgataaaacagactattcttccttttctccttccatctttatcccgttttctgtacaatgtcccactctggcttctctttctattttctttctaatcttgctctgcacatgctacctttgcagagccaatttgtttcccagaatggaagggactgcttatctctaggagaagaactttgtcccatggagctgttatggtcagataagcagccagctgctgtttggacagggcaaggttggctgttgtccctcctggactaaactaagcagcaggaaaagagccaccttatgatggatcagatagccacagacaaagctgatagtagggaatgtttggggtaggatttcagagactctaaacctaaatatgttttgcctgagttcgtcattttgtcacaggtttctctctttggctgctagttagcatattcctagtggatttacaatggcagctaaccaagtgttgtctcatgaacctgaattttgaaaaaataaatcttcttccacaggtcctcatgaaatatccctctat

SEQ ID NO: 58251 - DNA, 1226 bp, Homo sapiens
caggattttaaaaatataactcaaataccattatcacacctaagagatttaatattaatatactactattaccctctactcaatattcaaatttctccaatttttctcaaaatggcacagctttttttttttttatctttttgtccaggatccagtgactcatcatgggttgcattttgttatgttcttttaatctcctttaactcagaaaagttctctggggcttttgtcttttattaacttgacattgttcaatattccatgtcagttttcttacaaattgttatacaattctaatttgtctgataatttttttcattattaggttcaaatttaaacttttattaggaatactgtattgattatattatttactttctattgtttcatattgccaagtacataatgtcagtttgatccatttatagtgatgttaagtttaataatttggttaaggtagtgactgtccactgctaaatgttacttcctttaaaaaaaattattcctacaagtatatatatattaactccttcagaactgtttgaaattgagactctctctcttcaacttgtctcataaacaaaagtttttccataaacatggcaatttttggcattcttagctcaaaattttctctcacattaatttgtgatgacaaacatgtccagaaaagttcacagtgccaataattgacccaggtaagggactgtttgctttattactcagagagcaaagttctcctttaaagaactatgttttacagttagatgttttactatctgtaggtgatgacttcaatcaccccatttggagcttattttatctcatatattttgtttcaaggttacagatgtctataattttttctaacttgtacttttttaaaaaaatttcttacagcagatttccaaaaggagaggaaagcagaaatactgtaactctaatattttaaaaccacaaatgtcttagctcattttctgttgctataacagaacacctcagatagggtaatttattacaaaaaaagaaaaaagtttatttagctcatggttatacaggctgagaagttcaagagcctggcactggcatctggtaggaggccttcacggtgtaacaccccatggtggaagggcaagcaagcatttgagacagaggaaaaatgaagaccaaatgtcatccatttatcagggttccattcacatgataactaaccaattcccacaata

SEQ ID NO: 58252 - DNA, 792 bp, Homo sapiens
tcagagtctctactgctagtgcaaggaatgcatataagttgcgtgatttgttgagagcagaattaatgcaacttaattgagtctattattctgtggatattaataggggacactgctgagaagtgaacattgagagacaaacggaaaaaaagaaaggatatagacctgggttttagaaagttataagtgagggcttgatgtgacagctcgtagttccattatatctgtgagtaactcagtggtgcctgtccatatcaaatttcttcacctggcatgattacccagtggggaaaaaaaaggagttaatgtgttactaaattgtgtctggcttacttaattccattcagcaacgtttggagattgcatcagcatgtacctaggattaccaccatcctaaaattttattgaaaaagggaaatataaaatacattatattaaaatactgttctgtagcagggtgcggaggctcatgcctgtaattccagaactttgggaagctgaggtgggtggatcatctgaggccaggagtttgagactagcttagccaacatggtgaaatcccctctctactaaaaatacaaaaattagccgggcatggtggcagagacctgtaatcctagctactcgggaggctgaggcatgagagttacttgaacccgggaggcggaggtggcagtgagccgaaattgcgccattgcactccagcctgggggaaaagagcgagactccatctcaaaaaaaaaattaaaaaattgttttgtaaaagatattgggaaagtgttggataatctt

SEQ ID NO: 58253 - DNA, 820 bp, Homo sapiens
cacaatttttaaaatgtcttcacattatttgagaaaatatgtaagatctctttctccctaaaagaatgtctttccttgtcagtttctgctcctaaactattcatgtttaaattattttggttgaaatttgtgatcattgttttcaagtgtcaacttgactgggttaagagatactcaaacagctggtaaagcattatttctggatatgtctattagggtgtttctggaagagactggcattcgaatcagtgaactaagatctgtcctcacccaatgtggacacaccccatctagttggctgagggcctggatagaacacaaagggagaggaaaggtaaattgactctctgtctctcttttccagagtggggacacctttcttctcctacatcttgtacaacagaactccaagttctctggcctttggactctggaatttgcaccagctcttccccaaggttctcctgcctttggcctcagcctgcgagttacatcattagcttcactgattctgatactttaagagttggactgagcaacgttacaagtttcactggtatttcagcttttggatggcttttggtcagacttctcagcctccataattgcataatccaattccctttataaagccccattatatctatctatctatctatctgtctgtctgtctgtctgtctgtctaactatcatctatctatctatctatacaatgtgtatgcatagcctattggttctgtctacctggagaactctaatacaaaagtattttaaggtaaaatatatttcaatcaaatagttaaatttatgaaaattaaa

SEQ ID NO: 58254 - DNA, 899 bp, Homo sapiens
tttgataagttaacaaactataaaacttggttttgtataatgtatcaagtgataagatattaagctagatattctctactcatggattccatgcctagatacttgttgctcaggtcttacctgagagaagcagaatatacagtaaagctaatagaatgtctgggttcaaatacagacatacagttgatgtgattgaatgactcaattcctgtgaaccttggtttagtcatctgtggagtcagcatacagtgtattgtaccaaccaaccaaccaagacatttttgtaagtgagccaacattactaataataattgtgtcaagataatgagcatagccatatatcactttttgtgtgatgtaccatgcacaacatctctgctacccatacaaaatgtgatgtatggttctccttttcatttataaaattaaaatttttttaacagtgaatgccacaaagaattgttgtacagaaaacaaatgagagaatgagtttaagagaagtaatatggttagacatagggtttggacttcagaaggccctttatcgcaaacacaagagtacaaaatgctaatccttctgctccttggactctggcatcattcctggcatgaagcaacccagaaacgaaaacatccactttcctgacagtctttagccatcatggaatcattcccctttatctagccctgtgcctaggaaagaaaaggcacctgcttctctgatctgtgaagatttgtgggctgtatcgttgctcagatggagaaagtactctggtgtaagagtacaggaagaattaaagcagtaaaagagcttaagtaaaattaaaaaaagcggtaattggctttcagattgcttgaatgcaatagatacttataataaaactaaatatttcctagtt

SEQ ID NO: 58255 - DNA, 1491 bp, Homo sapiens
acaccctctcttttcaaatgaatgtgcttcttccatctccaaatattaaataatatatatctttatttatactcttattacaaaatttatttacctacctgtatgtgtttctatgtgcatgtgctttatgttcctgtgatactgtaatcctcataggcagaatctgtgatttgtttaccttcttcagaaaaacaagactggaagatctgaaagaaataacatagtgatggccagaggcattgcatataagaaatgcctcagatgagagccactccacatttttctagcatcataattgctataattgtttttacttcatatagcatatttagacatgcataccatctcttatctcttaccacagttctgagttatcttgaaaaatttctcctattgagcctcaaaaatttacaataaacatttgtatgtttattttaagatgattagcatcatgcttaatatttattataatccatgctatatctattacagaagcccaaaaaattctaatgaaatcatcataaatgatgctgatcattctttaatgtatcaaatcaaatgacaagtgaaaaactatagtttggttgacttcacattggaaatggttaggaggggatacaatgtcatgttttgctgaattggtttttgtttttctattaaatatactcttctttctaaaatgtaaacaagaaaagtcaattaaatattaccctaaactagcaaagtataagcataatgacgccccaaagcgttttcacagtttacaggcctcagaattgagagagcatttcaaaatgttgagtgaggtaatttctgtaaataatttctaaaagtcagtgctttacaaatatttgttttagaacatggaatttaagcttacactactagcaaaaacatagaataaaccttagaaaattctattttttgacaataggcaagagaagagaaaggatcaaggaaatggcttaacagcaaaatgggaaaaatatttttaaaaactttaaatatttaaaaaatcaacatcttaaagctaaaaagtgtttttattttttgaagagtacagaaagattcctagggaaaagtggtaacctaagtaaaaacataaacatgatttgggcctctgctttatcttcaccccagaatcatcctcctaaactttaaaataggagatactttgcacaagctctgttggcagtagagcccaatgactaccaagagcaacaactcctacgtgccgaagtcagtctgattaattttatttgcaatcaacagagttctgaatgacacagtcagctacactagacaaggggtgaatgacaatgaaggaggaagtgacagtaatgcagtggatagaaaggcatgattaacaaagaaagcgcaattcttcattgaccagaagataggaattgctgtccagtaacgttagacaagcaactacaatggcagttttaatagtgaaggtaaagcaaatctatcattattagcatatgg

SEQ ID NO: 58256 - DNA, 663 bp, Homo sapiens
ttatattttccaccttcactgcttttgaatagtatttatcttagtttccctatatgaaccctttatttttcatgaatatgggaagtataaaatagttacaacaccaaagttgaggtttttctaaatacaaattagacattcctaaataacatttctcttcactgtgccataacgtacatcattaaatataaaagttttgctaatacaaagtgaaagttaatactgccaaactccagagaaacaaaggtcagttgctgtgggaaccaacctttggacctcttgacctttgcatgtgttgcattaatgtggatatttgcattggatctactccaaaatataaatcaggtattcactaatacagttataaatgcagattagcagcaaagagacagtgctacatttggggagcacaaagacaaacagtaaagacaattgtttaaaaatagatatagtatctttaaaacatttctctcagtgtcatgcagtcatctgtcacttaacctgaagtcctggtgatattcatacatgaacacaattatcccattatacttaatgttcttgttaacaaaagagtgatagtgtggtaaacagaattccctggtttattaaaggataattattgcccacatggttcttgtaattttcaactcaaagctcaaagct

SEQ ID NO: 58257 - DNA, 493 bp, Homo sapiens
atgctcagatttaaaaatatcatagaaactatctcctgtgctagagttaactttgctgtctgcctcttcctggcctctctgtaacatgaacacagttgagcatacccttattttttaacactttcctctcttctgggagtgaggctttgaacactctcacaatcttggctctcctattgccttactggcctctcactgtcagggtgttttgctggcatttgctcttccggctgacctctgatggttattgcagcacctcaggccctgttagagccttctctgtttacaattttgacccagatgatctcatgtctttaatacaacctcttcactgttcattcacaacatttttctccagccttgatatcctatctgtgccaaacctgcacattcaattgacaatttggcaccaccagttaggtagctaacaggcatctcaaacctaacatatcctgagtagagtgatgcattttcatccttctaccctgtctac

SEQ ID NO: 58258 - DNA, 959 bp, Homo sapiens
ggaggttgtggtgagccaagatcgtgccactgctctccagcccgggcaacagagcgagactccatctcaaaataaaaattaaataaaaggaaagaaagtgatgtggcgtagtctagacatgacttgtaactttctttacaattctctttcgattaatagagtttaaggtttggaaggatccacaaaaatacgtaatccatatattcatccaatcatctctacaagctccccaccaaggggccatcccatatattccagaaatcctttgatgacaaggaacactctttctccaatttattggtacaaactctttttcccagtagatcctggttctgagccatgtgtattagccaaagttctcaagagaaactgaaccaataagctatatagagagatatttaaaaacggggatttattatgagtattggcttactcagtcatagcggccaagaggtctcacaatatgtcatctgaaagctgaagaactaggaactagtgttgtaattcagtctgagtccaaaggcctgagaagcagggaagccaattgtgtaactctcagtccaaggccaaaggtctgagaactgtgagaggggaagtttaagtcccagactccgaaagcctgatagtctgcagctctgatgtctgaggagatggatgtcccagctcaagaagagagagcacatctgcccttccttcacctttttgttctatccaggtcctcaatggattggatgatgcccatccacattggtgagcatgagtctgctttactcagtctaccaatcccaattctaatctcttccagaaacagcctcacagacatacccagaaacaatgttttaccaactagctcagtgtgacacataaaatcaaccatcacaccatgtaaatcaagtcagagtttccatccataaaaggtattttcaaatactagaggacatgggttactttgtccctga

SEQ ID NO: 58259 - DNA, 2470 bp, Homo sapiens
tttaacctgtcaggagaaaagccagaaatagcagtcactgaaagttgttttaaaactctcaattcaaggttggcatgataatgcaaaatagtattattacgcagaaataagcaatcataatcataatactgatatacacaaatcataatgccaatatacactactttcacttggattcagcacttcctactagcataactacacctacctttatcgcattctcaccaaatgagttagggtttaaaatgggcaaacgagaaatgatgtggggattccggcccatcttttagacttttcacatcaatatggtatgttaaaatcacacccctggacatcatgctcgggaatacttaagtaattttgccacaattcatttactaaacaaatatttaggtaatttttacatgtccatcagtactgtgctaaccaccaggtgtacaaaggctaaaacaaaagatgaacccagttccagctcttaaagagtttacattttagttcaggctttcagaaggagaggcagtgagtgtgctatactgtatagcatgtgggctcttgaaccagcctctccactcacctctccacctgctgtgtgaccttggcatttgatttttaagcgactcgattttctattttgtaacataatcgttgacttcaaattaaagacatatctagtttcatttcaggtgtacggcaccatacgaagatggggctaagaaaatgttactatcctgtataaacaagagggtttctcgcacgttttcttcctttagtatctggcattattcaatactgtccatattctactccctgttcaccgatgaactgggacatgtttttcactgcagcttagtcgtctgggtgtgcctggggaggcgtcacaaagagcctataaagggtccccacctacaacgggagtaagagcgctggaaggaacccaggaagggcatggagaccaagcgttcggtttcggagtgttttttgtgtgtgcccatattcaccgagcttgggttctcccactcgtaacgaaaagcccagtcactgagctgctacattttctgccatatcttagccgtccccacgcccccacaccaccgccccaccctacctcaccctcaagcgtgagtgaatgcgcaaataagggttttcaaggcgtcagtgggaaagagggaggggaaggcaacgctgaggacgggaggacagggcggtggcatccctctagcgagagagagccagagccctcggcggcgaggaaagctaaaacccggcagtcccgggccagaggaggccaaggcaagatgctggacgggcggggaccgatggggggcagcagaccatggccgcgcacccagtgcgcccccggggcctcctcttgtcccgaggagcacccccgctcccggtgtcttttggtttcgaccggccgactgggaggggccgtgggacgccattcccataatgctctggggcgtgccgccgccgtcgctgccacctcccctaccgctagtggaagaagatggcggaaggcggagcggcggatctggacacccagcggtctgacatcgcgacgctgctcaaaacctcgctccggaaaggggacacctggtaagagaaaggggttgagatgcccgcggttgcccgaggatagtggagaagtgggcgggagccgcgagctggttctttcgctagtgacaggtgcgggcaggtccggcggcggccgccggggcagcgggattttggccgcttctgaaatgttggggcaaaggttggactctagatgagggtcagggttcttggcttgccagggcatgctgaaaggtatccggggagcggcggcggcggcggttctgactcgtgcggttctcttcgtcctccttccttccgtagtgccgctcccacctcaggccttcccgaatgataggttatagtggtttggtttgagtcttatatacgccgttttgacaggtcccggtgccgcggcttatcacgatctcaccggctttacttctctgttcatttcctttcctagaattgtcggcgtccaagttcccttttattctgattcttggtcttccgggaggcaggctgcaggatgtttgcggtctgtactacacaggtggcatgtcagggctccacataagagaaagaaaccctagtttccagttccttgtcaaaggagggagaggagtagggaaccttgggcttatgagagaccacgtggtcttgtgctttagtggtggcttgatagaagccggcagcgtttctgttagacgtgcagcccttcccttctgtttgaaagataatgtaggcctgcaaaaagtagataagtccacttgaggcttaactaactgctaatattcaaacttgtaaaataccaaaggttatacatttaaaatactgaaggatgtatgtggacattttcacacttgtcgaccatatcaagtggcatctacaataacttaaatatgtgaatatg

SEQ ID NO: 58260 - DNA, 514 bp, Homo sapiens
gttttagatagcctttggtggctttctcaaacatcaggtgtgatagtggtatacttggcttgtgagcaggctcacagcctcctgtaagtcagggtagcagaggtctcaagaagtgtatcttgttcccaaattgtgtgcatttatgttaccagattgggttgtgcagttcatctccaggccaataagtagcatttgcaggtatgagtcagcttcagtggtaacagtggggtttacgcttgacctttgtttgccagggaaagctcagatattctgatgactggcagaggcaccagccctgacaagggtggcaggggagaggggagtcattgggccactggtaaaatgcactgaggtctcttgtggagaggggtgggatgggggggtgtgggccaggtgatgagctgtcttagcaccctggcctcagcaggcaggaatgtgatgtttccctctcacactcctattctggtgctcaggttgttcagttctcttagacactgctgtttatctccaagct

SEQ ID NO: 58261 - DNA, 1862 bp, Homo sapiens
gcagcccaactcgcgaaactctccttttagctgggagcatctgccagtaaaggggccgggacagatctcgtagcgcctggtaggtgattggaggaattttggcttttactttgagtgagatgggaggccagcggaatgcgtggagcagagggtagtctcattttagagattaggaaaataagaggctaccccacagtaagtgcaccagttgcgtttaaagaaaaaaaatgtatattaacaggaggtagccactgatttggggccactagtccagagattcgaaatgaagcgggaggagacacgttaagattaatctacagggaaacaaattatttacaccgaaatacaatttaacacaaacatacgcaaagagatatgccaaggagtactcgggggctctgttcaggcacttgttaatgaaaacgaagcgaatcttgacgccttaaaccctgtctagcctacttgattccgggggtggggctgtgggaatcgctgcccacccggaatcccgcctgccccgagcatggccaagccccagccccgccccgccgacggcctgccgccggggttggccgcggcggtggcggaggccacggtacccggaagtgcggctgacgtgtcccggcagcgctcggaattgtgggcgactcggctaatggcgtcggcgagtcttaggggcctggggagctggcgctgaagcttcttgccaggttggctggtgacacccggtgtggctgggccccgcggcagcggagggacctgcccgccttgtgggtttctcggccagagtcggcggagcctagcgggacggtgcgactgcggggggcgcctccgagaaaagccagaggtgttgcggggaagctgctgggggacgctcgagcaggctccgggttcgcagcccagggcccaagaagcgggctgctgaaggaccagagacaccgggagggagctgcctgtggccctaaggagctgaccgtgccagagcttgtttgtacctctcggaaattggctgggaccttggaggatcatgtccggcaccagcagccccgaggcggtgaagaagctgctggagaatatgcagagcgacttgcgcgccttgtcactggagtgcaagaagaaattcccacctgtcaaagaggtaagcttcaggtgacgtcaggagaaggcactgtgagcatgcctggtcctgttagactcagtgcttcaccccagtttccagtcctaattttcattcaggcctcacctttccagatttgtgagtcggtgggttgttccacaagggctttttatagtttccactggagagggctgaggcactttgattttctcccctctcctgtcctcccagtttaggagtgaagttcatgaagtgagcctattcagttaatccagctaggtgtactgtgcactagcctattctggcctttttcttacttgaaactggccaaaccaaaattgaaaaacttgtttgttgctccccgaaacgagtatccacccatcttgttgaaacctgtactcctcacgtttatggcatatcactgaattggaaacaattttccttctggtatatatcattcagcttaactctgtatcaatcctttgacgtgttaataaactatccagagccacctaatttatgaagaatattgaagatccacataatcatgttaaaccttgttatgagcagtactgtagtgggaagttgggcttgcagtcagagcgaatacacctgaatttagttccagcaataaatcttaacctctttgagcttcgggtttttttttccagctgtaaaatagggttaaaggatggttttatattatgtatgggaaagatgtcagagcagaagggtattattaaag

SEQ ID NO: 58262 - DNA, 1110 bp, Homo sapiens
ttgagtttgtgttgtgttccttcataattacattcagcttattcatttttgacaggactggcacagaaatgttgctgtgctgtacttactgtatcattacattaggaagcatactacagtatcaatttgtgtcattattggagatgctcacttctatgagttggttaatacaatgtcagcctggtttcttcagtgtacagttaattattaactttttgtggaaaaatactttcagattgctactacaaaagagtgctttcccttctgcatttttttattttttaaaaattattcacttatattagtgtagattcatggattcctattttattcagaggattatagtctttattattatttggtttgatgctcagattgttcccaacatggccaatgggacctctttcaagatgacccgtgtgtcctttggacatgtcccatgcccttttgacattctctgagcacttcctatttgatagaacaagatgttccaggctgatcttggatgattcttgtccatcccaggtgtcagtcatttctccaggaagtcctggttccttttagtggagaatagtattgaaacgaacacaggtatactaggtatgcttttcaccacttggataggaaatacatagccacatacacacacccccacacacaagcacacgtctctgtacatttctaaaatgtctgtttctctatattgaattaccatgacatcacactagtttcttcagttccagttcagtaccacaaggtttatttttaactttctgtatttgtaattcccttctccaacagtgttggaacctgctcacattttgctcagtgtatttacttatttgcttgattctcagtgtatgtaatcagtctcctggctgagccagtttgttacactgcgccctgccctcactccaactggtcacacaggctgagaaagtttgggttgatgaaggcaaagggaaaggaaaggatatcagctgggcatagtggcatgtgcctataatcccagctacctgggaggctgaggcaggaggattgcttgtgcccaggagtttgagtccagtctgagtaacataacaagaccctgtctcttaaaaaaaaaaatgg

SEQ ID NO: 58263 - DNA, 2800 bp, Homo sapiens
ctataccatgtagaatagaaacaaaaagccagttatttaatttttaatttgcaattaaactcttggccaagaggatctgttgtccaaaattacatcgtgatagcttaagaaaaaaaaaatcttactttgccagaaagggaattatacaaggatatctttatgagttgctgccaaattttgttctagaccacggccctctggcctccatgaaggatcaaagtctgggcaaagacaattctaagttgtaggtaaacatgcttttcatttccctccattccttacttttgtcataagcagtctggattttcaggggtaaaggctgatagggttgccagatacagtcattaaaaattgagaatgtgcagttaaattggaatatcagataaacaattttaaaaatatatgtaacacacatatgccaaaacactggttatctgaaattccaatttaactgggcgtcctgtattttatctgacaagccctaactacttctttaaaataatttgttaacttcctacaaaaaatctctaaatgggaggaaaaaaaaaatcccgtaagttgtctgggccaaaagcagaagtggctccatggcagtcagccttctccctaacttggcttaaaaagaaaaagccaaaaccagaagtcccaaaagcttgcgtttaaagcgggctgtgccgcagctttcccgcctgttttctgcggaatgtagcacggcagccaccccgcgtgggtggggctcgtatggttgtgtccttgctggttgggaaaggaggtgccggaaacttcaaaccacggccagggtacaacgtgtccgcttaggcggcgatatgcgccgccatcttctttgcgggcaaaggccgaaaaaagtttgggactccactcccccccgctgagccgatggagggcatcgcccgctgcctcagcactctggtgacgtggaatcggggtcccctctttcagggctgatttctggtagcacgctgacgcctgccaaggcagggaaaggggacgccgcctctgtcccggatgtaagatggcggcgcggggggcggcctggcggggcggtcacgtggtgaggagtagcgcgcgagcctccttaagtgatctctaaggttcgtccggacgcacaggagcagcggagcgcgagacgggtcttgtgtccgcacgcgtcgagtcgtcgcagtcgccacccgggccatcgccgggcccggtttcactgttaaggggttttcgtttgttccgttttcgcctcctgtagagctgaacgggaattccccgaagggtgctggggaacgggtggcctggggacttcccggctatgccttggctgctgtttggcggagccggcggcagcctctgcgggatgcccgccggcgattatcggcgccgagagcgggccggcggcgggttcgacagcgcggcgcgggtgggggcccgggtaccggactcggccgcagcccagcccccaccggggactcggagcagggaggggcgcgagcggcgcagctcgggacgtggcggcagctcctagcgggcgaagcgcgggagcgctgctcgctgcctctcgggggcagtccagaaccagttggtgtctgactgcgcttttgccgcccatttcctgctttcgagcggctgaggcgacgcgctcccctcgggcagtggagggagcggctctctccgcaggacaccgccgcttttctctcttcagagcggtggctgacgtacagaacgccggctgtatcacccgggcgccggcgccgcctctcatccccgtagctctcggggcgcgccgggagtagccgagccgctgggtgctgggcggggtctccgggcgcggcgcggggggaaggcaaaggaaaagaaggggcggcgggccgacgtcggcggcgaggaaggacggaggagcgccggagccgctttgctgccctccgcgtggtcccgtgcctccccgacaccatggccctggctgaggtagtagtttgtgctgttggtcgggttgtgacattgcccgctgtggagataactgcgcaagctactgccttgctagtgctggtgatgctcagcgccgcggaggacaatggctgggaatcccctttgttttccggggcgctgcctggggacagcccgcgaagcctcggcgcccggccggcgcggccaccacggaaaccgttagtttcacattttcctagaaggaattgaggggagtggggtggaccgcgatgcattttaaaggttgggaaagagctaagccattggattccttttcttgaaggaaggagtggaattgtgtaagataattgatacagataactttttcaccctaaaaaattctaacacttctttcagcagttaaatgccaaatttagtgtgtacctgttttacttcattctttagctgtaggttggagtggtgtgagcgatctgcagaactggcattagaggggcagaagaagtagacctgataattaaagtttatgccttaacattttagatctggtttctgatatgctctcttagtaaatctgagtgtgtctttaaaaacgtaaacccaaagcaatttaaagtttctctttaaactttgcaactcgcgaatgagaagattgaaattatttgtaggtaattgcactattccgattttttaatgtatgaggcaaacaaataaattctatgtacagtgtgctgtgaatggttttgttttttgttttttctttttagtttaaccttggggctcagattctgctggtgtggtgggttggttttttggtttttatggcctttgattctaatgttatgtggtactt

SEQ ID NO: 58264 - DNA, 1078 bp, Homo sapiens
aggctgttgccaagttgatttttctggctcagccgggaggctgctccctggctctgttctaaattaataaggccaatcagaaatgcacaaagcctggacggccaatcattcttctcgaggcttttgccatctcctccgcggtcagataaatcatgttaaagccattccaccgatgaccataaattagggggcctggccgccgtccctcccaaggacaccgcagactgagattattctgtcggccgcactcggcccccaaggagtagcactgcgagggtggagggtcctccagcgcgggggcgggggtgtaggccccgagtgatttcctgccacagtgccggagcgggactggcgctgcctcccgggtccaggttccagccgctcccagctgttggcggcgctgctgagatgatggcctggatcccccaggttccgggactccccaggtggctccccgaggctatttacagctgaggttcggccggtgattgctgggacggaaaactcatttctcagcctggcttttatttacactcttattaaggaggctttcattcgtgttggaatggcagcgagaggctgcgggccaggcggccgaatgggtcgtgcccgagcgacagcggccgcctgcgccgcgaccttgagggcagaggagcgtgggcggcgtgcggggacaaaggcgcgcggggagcctgggtcacggctctgcagcagacacgggacctccacgtttctaccaccccggaaagttgagcgccttgggggctgcatttctccctttattggtagctggttcggctcgcccctttgcccgaccacacgctctttgtaaatacagaataggacaaaacggaaagagtgatgtgctgtcccctccgtctaaaaccctaagtaaatacccagtcctcccccagactcttctccacctgtggttcaggtgtctgggaagaaggccctgcacgcccgtccgcgcctcccctgcccgggggagccccgggtaggcagtggccaaagactctgtagaacaactcccgggagggcaggctcgcggctgctcctcccgttggcagcgcctcaa

SEQ ID NO: 58265 - DNA, 393 bp, Homo sapiens
caactgctctcatcatttttcaactctgaatcatgtatgttcataattttccacacagaagtgttgtgtgtttcatgagagcaccggtgacgcagcattttttaattaatccacaacagcactggaagcctcaaagctaagggtgcagaagttcttaagccagctttgcaatcctctagagccagcttacttctgactcccacttcaggaatgtggctaagcaagtctgagtcacacctcctcaaactcctccgcacaattagttggatccagtgatgcttaacaagcccttcacttttctctgcaggatgttcttccaagctgctggacacccatcccacaaaagtttggtgtgttgggactcaggacattctaccccaaaaaatggcacct

SEQ ID NO: 58266 - DNA, 878 bp, Homo sapiens
cctctgctcccccaccctataacccttctattacctcccctcacacccagtctggtttacagtttcattctgcaactagctctcccccacctgctcaacaatttccgcttagagaggtggctggagctgaaggcatagtcagggtacatgtgcctttttctctatcagacctttcccaaatcagccagtgtttaggctctttctcatcagaccccactaaatatatacaggaattccaatatctaactctgtcctacaatttaacctggagcgacttaaatgtcatcctaatagttaggccaattcccagaatgactaaagaaaaataacttttcctataaaaggtgagtaaatggccaaatgacctagactagctctgaagggtaagcactgagtcccaggttaaagattacattctaaccacacaccagtcatactctgctccgggaaaaaccttaagtacttgtgaccttctgtccctaacttagatgttgtttactttcagtttacatacagtgcaaacaccagggtgtacatgattttcaagtcaaaaaagataaggactaatccagaaaggagaaggaattctgtttcatgcaggctccttgacagcagcaagagataacaaaaccacaacacaggaggctttagaaaaaaactaaataaaaagccgtaatctcaaagaagactacagccaacaataaatattaatactataaagtaaggtcctaaggactccacagttacggaggaataagggatcagaagttcatatccattatttggaagcattaagaaatgtttagattattttccattactctgtatttgaggaggaaggggaaaagctgtttcaaacctgtatgcagagtgtaatt

SEQ ID NO: 58267 - DNA, 2361 bp, Homo sapiens
aaagaaaaaggcagcagaaggcaagaaggggaagagagggagagacaaagaggagaagagtacatatttgtgagaagagtacatgttggaaatagaatctcaacagagtccctagttctaggtgttcccaagacccatttgtctttggaatatctgggtaaccccaatattctctaataaatttcccttgaatggctgtcaattgcaagctagagtatagcaagacccaactctcaatacaccctcactatactatcattattaaactgcaagggccgtgaaggtaggggtagaaacttatttaattctgtattctcagagattagcatagtgcctgatatactgcaggcagtcaagtacctactaaatgaaaggtttgttgacttcaggggagaaattataattcagggttaaaatttatatcacaagctcaaggatctctacctaacatcctgtgctaagaggtaaaagacaacaagaagtagcaaatttttgccagttatgaccagagcaagccagtgaggtaaacatctgacagccactgatcaggcatatttaatcttctgaatatctttgatttattatcaattgagtaaatcaaagtttattttaaggattcaaaaaaaaagctgttaaacttacatagataactattactgaagcttaccaagagtagacagtaagctgttcagaaatctagcaactgaaaaaaaaacaaatcatcactcccatggcctgggatgcggaaggactcagaaattgttggaaattccacagactcaaaatgaggtaactgtttaccttccttattgcattttaatctagagattaaaatagatctcattgttccagaatcctgcctatggtaagaaatgagttctcaatggctgagaataaattttaatagcggaaccagaagcataagagaggaaatcatgaggaaaaatttttcttcataaaaaggaccatgaggttaattttcatttcattacatttctaaattgcatatatttttgtatgctggttgcaaaatatcctttctgtattgacatgaagtataaattaatcagtaaatacataaaattcttacatcctacattttcaaaatagctcctaactcattaatttattccaaaaataactaaggtgcaaaagttcattaataagatgactgataaacttgatatatgaattaaccaaaaccaacaccaaatcaccgttagattcaggcttacctgaaaattttattaaaccacaacttaataaaacacaatactaaatgactacaaatgcaatctaggacactttccatggcaagctatatttagaattccaagctctgttgggtagaatggttctcagattttcatgtgcctatgagtcatctggaggacttcttaaaacattgattttagggccccactctcagagattcaaactcagtagatctaaggtaggatctgagcaaagctcccaagtggtggtgacactttgggtttactgatgatgactgagttgcactggcctggatgaatcatggtcgttttaatttcaccaagcactggaattcccctgcaacctcagcctcattccactgagctagagaattgtacgtgatatacccttagtttataatccactggtggtggctggtactaccagagtcagaagctcaagagactcctagagatggaaaggggatcctagtgaggcattgaattatggtaataggaacataaacctggtggggttgggggggcagtcactgggagtgggacaagggggactggggactaggataatggggactcccaaaaaagttgggaacaaaaatactggcaggtcattagctgcaggggaagggagtgggaatagtggtgagtgagagactacctcacatggaattcctgttaggaaatggttgggaatagaaaagaaatggtaacagagggtgggagagggcaggggacacacaggaagcttgtttcccaaggcggaagtggctgccatacaaaggggtacagggcatctggattgctcagcacatccaacctgaaaggtgaataaccatctgggacaactctttttatatcaaagataatgatacactatctaaattatcaattacaacacacttttactagaaagaaaaaggactgaaataacacttgtaaatacttgtgatttaattgcatattgtctcagttgagcctcccaacaacaagatagatagggaaggtattatctgtcccattctataaaaactgaatccagaaagctgattgacctggggtcagatagccattgggtggtaatatcagactgatatcccacctgattccaaagcctattcacccacta

SEQ ID NO: 58268 - DNA, 1342 bp, Homo sapiens
cagggctccccgaccctgtccttttgatgtcttgctatcccactgggaggtaaagagcctgtccagttcctccaggactagggtttggagcactgactttggtacttcctgacatctacacttatcccctctggtggttttaaagcctgttcacaaattccttgacatccatcccttcaaaaagtgaagcctaattccctccctcctaagtgtgggcaagacttaatgacttgcatctagtttataaaatatggtggcaggaagagtgtgtaaacaggtggtaaaagacatcaaggcttcctctttgctcttttggatcattcaccacgaggaagtcagctactatgtcatgagggcacacggcaaagaactgaggtttcctaccaaaaactagcactaactggccaaccacaggagtgagccatttcagataggatcctccagcaccagtcaaatcttcagatgcctatgactccagctaatatcaggatgggaacctcatgagaggctgagccagaaatacccagataagccgctcccagattcctgacccacagaaacagtgtgacataataaatacttgttttaggccactgagactgggataacctgtacagcaatagataactagtacagcactgttcccctttctccattctgtcacttagaattgagtccatgacgctcatccctagggatgagctccttcaaggccagtcttaatcagtatttctctaccctgctcccttccaccccacaccccatgctttccccctcctgcctcaaggtttcacatacagcaggcattccacaaatgtttattcaagaaatacctccagttccagcctttcctgtggctcattcacaacccagaaaaatgtaccaaaaagctgagttgatcctcgaatgcttacagaacttaagacagtgcatggtaatttgtaacctgtctcctgattatgaagagtttattattaatacaggatctggatttggagcattaaatttggctgacactttcatctgtctgtgctaatctaatgctaagtcatagcttcaatgcctttatctccatggtcctcacttcagataatcagtcatttactttatcagtcacttactgcacattagaagtgctgaaaattctattttacaccagagcaatggtccttcaaactttgtatctttaaactttcccctttgattgttttgccctcttacctactttccttctgaattcaccttcctgcctcctcccatagacccatattagtgctaaatataaccgcagggaaacaaaacacgctaggatctcatcatagctgatacaatgactttaaag

SEQ ID NO: 58269 - DNA, 1991 bp, Homo sapiens
gaggggatggggttaaaggaaaaggcgcaggtgtgccagccaccaggttttgcgtgcacttttgcactccctggttcattaataaccttgaattctattctaaatgtctcctagttttcccgtttcgtacagctgaggtagtagatagaagggaaaacgttacttatcttaccattcataagatggttattaatagtcagtggaaaagtggccatggagctgggggaagggcaataaaatcctccacctctcctttcccgattccactctgggtcgtcaacctaactcagtcggttcctgaaatagctgatcagtcaaacgcaagcttaatcaccaaagcggattaccaaaatgttatattagacagttggaataagtttccccctccccaagggctgagggaaatagtactggcatttaccgaaagcgcagcattttactacctgctaaaggagaagcggaggaactcgcgggctgaaagtgagagaaactgagaccttcggaaatgtacaaccacgcactcggacacggccacctcccggaatcggacacaagctcccaggcgcagtgacatctcctccaagcctccacccccataaactcttcatcacgcgggggcgtcaactatattttgggagggtgggggtacagatagcagattttccttatgtgtttcaaacttcagagcttttctgcccgttttttttccccaagtgacagagaccccggattcacagacctgtctcaccttagctttcccacgctccagcgctgccacccacccctccaccacccataccggggctggagacgccgcgtccttgggctgggggaagagggagtggggagaagagggaaatggccagtgtaagtaaagagctccccgccgaggcctggacgccggcagctagtgagagccctgaggccgagaagcagggagagaagagggctggaaccgtgcggggaagggccgcgaggagagcaggggcgccgccggtgtcgctgcactcactctgcgtagccagtggcccagggcagccgccgagtctccttgaggatgaggatggggcgggcgatgtggtcggcgctgcactccacctcgtcctgagacagccccaggaactctggccgcccgtaggggaaacgcaggggcaggtccgagcctccgcagctgccgccgccgtgctcggagcctgagctgccagccatgatgccgcccatgaaattggccacggcagatttcactcgagtgagcatattactccggcgcccggctgcagcggtgcgagcaggaggcggcgggggccgggcaaggcgcagcgcggggcatgcaggctgcggtgggcgccgggcgcacggcgagtcgggccactgggacgcgccgcgcgcggctcccagagcctagtgctgcagggggccgagccccggcctctcgtgcttagtgccgcggtggccgccgcctccccccgctacacttccgcaacggagctgcatggagcgggccgaccgggggagtcaccgcgcgctccaggagcgcccaggcggctgcagctgcagcaggtcccttccccgccccctgcgctcggctccggcgtgcgctgaactgagcccacccggcgagctcgcggagccgccgcggctgctgccacggctactgccgccgggtcatgtgataatcaggctgcaagggctcaggctgctgcggtggccgttgctcagcccctcccctgccggcccaagcgagactcgcaccgggatcgtgacctcctgggggagggggagaccggctgagtcggtacctggcggaggggatgggggcgctgtgagctggaggcggtacaggtgttagcggctgtcacgtggagccgggcagccgggaaaaggattgaagaatccactcctgaggaatgctgccttcaccctccagaaaggaaactttgggagcaggaggggaaaggggagacaggtgcaatcagggtgggaagcttcta

SEQ ID NO: 58270 - DNA, 1949 bp, Homo sapiens
agtcattcttcggctttgtagttgcttggctgactctaggacacagtttctggaattgtggtcttaggatcattgcacactacaaatgcagagtcctgagccccattccagacattcttaattagaatgtctgcatggggaatccaggaatatgctttttttttttttaaacagtgttcctccaaggtgcgactcttatgtacacatagaagtttaaaaactactgccctagaagatactatgaagaaaattgctagattctcatttttttctctctctctctctctctctctctctcacacacacacacacacacacacacacactcctatccctgcactttcctctattttcccggcacgtaccggtccagacggacatgggatcccagacagaccacatctggatgatgaagaaaggcgcccagcagacgatgtaagccgtcacgatcacaaaagtcatcttcaccgtgcggatcttggcccgggaaatggacttcacgctgctgacacagggtgcgagcaggaaccccttttggaaggccacacccgcttgctctgcacccttgctctggcgcgacgccgtcttcccgcggacgttgcaccagatgttgtagcagatgaagccgtagcaggtacccaagatgaccacgggcgccacaaagatgccgcccgtcatccaggtcacgtaggcacgagaaccccagggctggatgaaggtggcccagcagtcgcgggccttggtgacattgttcacctcgatcatggagaagacgaagtactgcggcgtgctcagcacgaagctcagcacccaggcggccgcgatcatgaggcgcgagcggcgcgcgggctgttgcagagtcttgagcgggtggcacaccgcgatgtagcggtcggctgtcatgactaccagcatgtaggccgacgcaaacatgccgaacacctgcaggtgcttcaccacgcggcacagccagtcggggccgcggaagcggtaggtgatgtcccagcacatttgcggcagcacctggaagaatgccacggccaggtcggccaggctgaggtgtcggatgaagaggtgcatgcgggacgtcttgcgcggcgtccggtgcagagccagcagtacgctgctgttgcccagcacggccaccgcgaaagtcaccgccagcacggcgatctccagtttggccagctcctcgttgcgcacgtccctcggtgggccgttgccctccccgagggcttcggcctcccggcttgtgttgccagcgccggtggccagaggccaccatgggctggagttgcccgagggccccgcgtcgggaccggcggagagacgcatgctgtccatgcagctcctactcggccctcttcggagctccagccctcgcgggccgctccctccccgtctcggaggacttgggctcctcgtccgaagcgcagggtctttggcgcgctcgcagcttgccgggctctgcgatccctccagtgggcgtctcccggagcagcgtcccgcctgcccactgagcagctctcagcagggtgagctggcccctctccctgctctgccttttttcaacttcggcgaggtcgggaaggtgagctccgagcttccggaagcactgggttcccaactcaagtatttatgcggtgcttgtttccttgggacgcgctccctcccgccctattgccggaagactgctggttgcctactccccgctccctggagttttattttttcctctccctacgtcggtgtttgtcctctgcatcactgtggagggggtggagctgggagactcgcagattcctcctcacagtaggtgggatcgtggcgctttcccgcttttcccttccaaaaacttggacaactggacgagtcatgccttttctgggctcgtagccgtttccacaagcttccctcactagccttcctcgctagcctccttaaccatg

SEQ ID NO: 58271 - DNA, 765 bp, Homo sapiens
tcctggttttctctatggagactagggacttaaggagttttctctagattcctggggttttctgcgggaaaagcctgattcccacagcggggatggcggaaatttggccgcagtggtccgtggggaccgtctggttactactgagtcgtggggacatctttttgggtggacaaagagcagctgccggacagcggccatccaggcagtgctgtccagggcaagggacagaaaacccgcccggctcctgtgctcaggagtaagaaagaggcaatctcaaagagaggaaagaggccctgggaaggaggggaaacaaccacctacctagtaatccgttactctgaacagctggagcccctctgcagggcgggagggaggcagaaatgcgatctccctcagctctgttttaacgttggtgaagatatgcctcgacggacagcaagggggagctgttttcaggcaattttacaaggaagaaaggaagccgtttctgcagttatctgctgtgtagatgcaggagcatgactttgttggtcagaacgtttcagtattgtggccgtggtataaatttaattgcctcagaaaaatatcaccctctgtgaaacgtaggcaaaaaatgcaaaagattttattcattgcagttctcagtaataattccactttactatccagtccgttcatgcagagttaccaaggttgtcacgttgagatgctggacttgaaatctggagtcctgcttcctgtggctagataatcctgggtctgtgc

SEQ ID NO: 58272 - DNA, 836 bp, Homo sapiens
taaacggatgatgatataagtcaagcaaaaatattgaaaagcctctaaaaatcaaaatgttagcacaaaagccaaacacaaataggcaactgatgacctcaaagttagtttttagtcctcccttccactccctgtcaccctaattgctttctccaatgagatctcataacactcatcttacctctataatggcacattccacgtgatattctagtgcttatttacacttctcttatttgtattagactgccaaatctcaagaacagttatcaactattatctacttgtgtgtaatagaactggacacatgttatgcactcagtgaaattgtagtgaatgcactagttaataaatgaatgaaatgaaaaatgtcttatagaaaactgcctgatttattaggtcatcaagccattaggctttgaagagagggtttaaaacgagttcatatatgacccagatgagatctcaaaccaaaaataaagaaaatcttagtgctttttcttcagtttaaccaagaaaacaatttgccctttgctctctgtccgggtaaataaatagaaaggctaacaaggacagctgcaaggcatttcaagagatactggaagagatcctatcactcgagttgttgtgaaaatatgactagatgaccagacaaggcctgggttgagtgggctggaagccaaaagtcataaaacaggcaaatgatttctcaatagttgattcacacagactctctgtacaaagtaattttttttttatcaagggcatcatacagccttcagttatttgaaaacctgccataactctaaaatttagatatgttcaaacaatctgcc

SEQ ID NO: 58273 - DNA, 1414 bp, Homo sapiens
ttcacatggccttcatggaccaccgcgggtgttctttttcccccgagtctttatgtacttgggaaaagtggccagggttgaaaggtgcaatgagtacacggcagaggtcagagaggttcccactcagcccggcgtctggaagcagcgtggggtaggggccgctccagtaccccctcctccagtgtcgaaggtgggcaggccctcggccgggtggatgagccgcgactggagggggcggggcctgggcgggaggcgggcggtgggcgtgtccggggcggggctgtaccgggcgctgggcggaggagccttggctggggactgcctggaaacgggctgggcctgcctcggacgccgccggtgtcgcggattctctttccgcccgctccatggcggtggatgcctgactggaagcccgagtgggatgcggctgacgcggaagcggctctgctcgtttcttatcgccctgtactgcctattctccctctacgctgcctaccacgtcttcttcgggcgccgccgccaggcgccggccgggtccccgcggggcctcaggaagggggcggcccccgcgcgggagagacgcggccgaggtaggactgggtcggcggcttccttccggctctgcgctcctggctggggctgctgggcggctggggccgggtccccgcacccggctctcaagtccgggattacccgcagggcctgagaagcgctttgccccctacagcctctcgagccagcccttggctcggaattggagaatggtcctcattcttacccagatctcacacgccgtccccgctcccgatcccagggggtgacaggcgcgcacgcctttcaaacacgtgttaaaatccaagacgtcgtctcaaatgccagagatttgcgggaatgctcctggaaggcctcaaaatcgccgcaaggtttaagacatccgtttccatgttgaaacaaagccctctctaatcctgcagtgaccataaggcagactttacctccaaattctggtcccctgtcctgtgttttaacttgtgttaagatcagactcggctttctctttccctttattcagaattttgcacgatagtatctaagactggtgaacactacactctgaagtcagttttttgtgcataggttacctgtatacaatggataaaaataattgcaaaagttaagcttgtaacttgatacatattatcctgttatttttaaaggttttgtgttggggaagagaattttcctgtctcaaggtagcattttatttctaagacttttcagagtaaaaaaagttcagtaaaaaaattgctgattttcttttttgttttcattgtgtattaccagtttaaattcagttgctgtacctctcagaaattaaagttaggatgaaattagaactaacacttaatttaaa

SEQ ID NO: 58274 - DNA, 850 bp, Homo sapiens
agtgttccaagaccggtgtgcaggtctcacaaattcaggaattcaggaacctgacaccatcttcaggacatggaccttgtattcttctgtgaatccccagatctaacataggaccttgcacaaagtagacctaggataaatggtgagtggatgaatggttggatagggagactcaatagggttaaatgtcttcttttatgtagtaaccaggaaacaggtgttcatgttgtgaaggaagtaaatttgcaatcatttattttgtttttaaatagacaaatcaagttttcaaataaacaaagcataatgcagagtcatcagggaagtaatgccttaaaaatgtccagttaggtctggaattttactttttaaattatagcaggtactctttattgctaatgtaaccatatcatattcgttcagtcagtgtttaccaagcaattgctctatgccagaaacttgtttacccacagtaaatacagcagtgaacaaaacaaagtccatgccctcctggcacttaaatgcttgttggagtagacaagcaagtaaaatatattgtgtgtcagaagatgataaatgccctgtaaaaaattaagcagaagaatggcatagaaagagcttgggtgttggtggtggagcatttgctattttggaatagccaagaaaggcattcattagaaggttacatttatgcacaggccttaagaatgtgcatgggtgagtcttgtgtatatttgggagaagactattccagacgtagggaagagcaaaggccctgaggcaggcaggaatgtgcttactatgttacaggaacaacagggccagtatgtctggagtggaatgaatgaggaca

SEQ ID NO: 58275 - DNA, 3622 bp, Homo sapiens
aaaacaaaaacaaaaacaaccgtaaaagtactaagtgcaatgtagtgtcctgtgttggatcttggaacagaaaaaatgacactagtcgaaaaaattggtaaaattggaataaaatctggagtttagtaaataaataagctaacaacgccgttaagtgtgacgtgtttccataccatcgctttcctaccatcctagcttccctatctactgtaggaatagaggatatggtgttcaaggtgggtgtttttctccgcctcgattgaagagcttcgcgctctttggattaacagccaggtcattcacaattcagtgttcagtttttctattggggtccagcgtctcggagtaacatccctttgtgtcatggatacatccaactctggacttccccattagattctggcaaaagccccaccagagcccccgccagagccagaaggcggtccctcaggtcaggaaggggttttcctgccgccggagccgcgacctcggctagcggtggagcggggcttcggcggagggaggtgcggggcctcggcggagggaggtgccgggggcgccgcccacggcctcctgggctcggcgcgcggggccgggctgcggttggccacaagaggcatccatcttcccggaccagccaggcgtttcctagcggagcaggggcgggagcttggacggagaagggcacaggccggagcgcggtccgctcccgcgagcctggccccgcctggcggagccccgaggagccaccgcccgcagatcgctagccgggcgcccgcgaggcgcgagccgtgtgcgcaccctcaactttgctgccgccgggggcgcggctcccgcgtgcgtgtgcgagtgtgcctgtcactagcggcctcctgggggcagcagcggaaagggggacgcagagaaaggcagcctcggcgcaccgcggccagggaggcagaggcccctcgcggcgccggctctggagacctaaactccgccggggctgtgcccagggcgcgtctgagcgtcgccgccttcaccctctcagcagcagcggggactcgcgtcaggactgcgattcctttcgcctgccgagctgtagcggcagtgtctgcgggcagaggagcggcggccgtggcagcagcatccccagcccgggcgggacccttgagcgccggagccgacagctggaggcaggaagggagggttgtggcgcccgagctgggcgcgttcccagcgcctgccctccgccgctggccctgtcccgggcgcccggtgcgggtctcgaacaatggtgcggagcgccggcgcgagccccgcgcccgcccagcggccgtagaggaagtggccgggctcccggcgaggtgggcagggagacgtcccccgccactcgctggctggagtttgcctgcgcgtccggcctctcccccggggatcccctgggattaccgacggagctcaatttcgagagtatggtgccagcgcccgggctaatctagtcctctctactcgctctttttcccctcctcctcctacttctcctctccctcctcccttccctcgggtcggcgctgcctctggattgcctgcgtgtgggagtacaactctgcctctccaaggagaacgggttgtgaccactgaacaaaacttgcccattgaaagcaaacccggaacagctggataatgtccaccccgagccgattcaagaaggacaaagagatcatagccgagtatgaaagtcaagtcaaaggtaaggatgggagcggctgccttgctccttttgtgtgccttcttgtcattgtgctcgtggagttgcgtatctaacttggtgtctgcgtgggaggaaggtggtgaggggacagctcgagccctgtctgagccacctgggcttcctacaagccagttagttcccagttgcaatcccagtcccgtcaaacccacggggagctggaaactgggtgacttcccccgccagctgccagcccgcatctctaatggggagagaactggctttaacttaaccaccttcagctgggcaacttatgtgggaagcaggcagcagtggaggatcctgtccagctattattatcaccatcattattctttttaaatggtaggattgtcactacgtaatttttttacggaatgatttttgtaaagtctgtgaaccccaagcggtctacagcctcattgagtgcaggctatttcagatatttacaccactcacctatttacaccgctcacaatttattagggcgagaccccttttattaaatagctccctaaaagcctggcagttaaacgaagcagtgactagtggaatctgactcttcctttataatgggccagaattcattgccatctttcacactcacatgggaatattgctttatcattttctggaagccacttgcatgtaaaatgaaggtttgaatatttgagtagtagtttcagtccatttacattgtcaactaatgaaggaaacctaattaaggctgattatttttactttctatgccttgtgattaaaaatatatatattttctctccaatacaagtattttgttttgttactgaagtgtttcgtaaacatatgtgttacttgaattttttcctcctctttcctgaggtctcaggagtagctttcctgattgagacaatggatggaatgttgggaccgccactgttctttgacacattcaatgcaaagttcataaagattgctatgtatacacctgtgtttatctatgcacagtcttatgaaagggctacggagagaggcattactgtacttcccttgagcaagggaggagcagcctgagtgttcttttgtgtggtcaagttgtaaaaatgcctggagtcctgtgagaggacctggtggagaaatcctgtatcatccagtgtgaatacagaccaactcattgtggacactgcagacacaatatgcaagataacttaggttatctttaggaggacccctataatggagttatctataggctgacccctataatgtgttcaggagacacagatttttgtctgcttggaattgtgataatttatacttacaggaacttgtttcattgctatggaagttgtgttagcagataagtaattattttcttagagccaggtaaactttctaatgagactaacctttcttttttcagtgagtccaacatagcctaaaacctttcattccagggcagtactcttgttcacaaccaccatttctctgtgcagtttttccacatggctctttgtggcaggtcttcaaggggtggcggtctggtttttctgccgcctagagcactaattggcaaatgcacttccaaatgttgatttctttatgtttgctgtaaggtcacttgccagtgatcaagtccttatttgaaaatcagcgaaatgggatgtgttgcaatgtgtctatcaaattcaaacggaagaaaaatcatgaacatggtgaaaatcacatttggagctaagtctgtcccacagagaatgaccttctccctatttccttcaacacttcttccttccacacacccacgagtccctaggctgctttaggagtcttcactgcacctgccctgccctgagtccaggctttacctcctcctgcagtacctacacatccagt

SEQ ID NO: 58276 - DNA, 2066 bp, Homo sapiens
gctcacgcctgtaatcccagcactttgggaggatgaggtgggtggatcacctgaggtcaggagtttgagaccagcctggccgacatggtaaaccccgtctctgctaataacacaaaaattagccaggtgtggtggcgcatgcctgtaatcccagctactcaggaggctgaggcaggagaactgcttgaacccaggaggaggaggttgcagtgagccgagatcacgccactgcattctagtctgggcgatgagtgaaactccatctcaaaaaaaatttatacacacacacctcatgagtcaaagaagaaattattatgaaaattaaaacatttttagaacttaattctttacatatcaaaactagtgagatgcagcaaaggtagtagtttaaggaaaattatcccttgtgattctttcctactccaaggctggctgtggagacctatgacactaggccctgcgggggaggtgccaccctgcaggctttttggtgtcacagccaacttggcacaagacgagcatttacaaacattccagcagttcttaaagcattagatgtcacagttactggactgtcatttctgactcccttctcagttggtctgtggaagacatggacttttgcccttgacttttattattctgaaggtgcggcttatgcaaacagctccttctcacagacctccagcaactaagatagaacaaaggtgtctgcttatcttaagtcagacctttttcacttctgaagatatccagattttagtctggctgtgaaattagcatgttttcaccagtggaattcagctttggaacagtatttaccaaggagaaggagcaggaagacatccgtttgctcatcttgttttacatatgtaatggcgctgtgtatttcttttgatgtcttctcaatgccgttcacaaagttttctttgaaagtgatggctttatccttctgctcatattgattaccacagttcaagtaccatttagttgaattataatcctcaagcaccaggggagattccagaactcagtgaatgagagatttgatcattgctgcaggactgagttctgcccattccctgttcttagaggagaggtagggaaaaagagcacctttttagaaacttgcactagaaaaggcgaggaatgttttctttggctgaccccagggcttgattaatttgctcaccatttctttggctgtgacaagttttcacttttatttacttcatgacagacagtggagacattgcttgataatgatgcggcacagaaagctggtaggttttgagatttagaaaagaaaatttgttagtttttgtgtctcttagagaagagttttctgagtacagtattacaaaaaaggaatgaatgccttttcaaatggttgctcttttcaaaaggttgctctttttttttcttttttttttttttgagacagtgtcttaccttatcgcccaggctggagtgcagtggcatgatctgggttcactgcaacctctgcctcctgggttcaagcaattttcatacctcagcctcccaagtagctcggatgacaggcatgtgctgccatgcctgcctaattttgtgtctttagtagagatggggtttcaccatgttggccaggctggtctcgaactcctggccttaagtgatctgcctgccttggcctctcaaagtgctgggattataggcgtgagccaccgcgcccagccacagttgctccatttttaattgaacttctgttgcacttgtattgacagtgtttatgggaactctcaaatgtgtcaccaaaaatctatatttgaaagatttccagactattgttctagagctaagttttaattatacacatctatctgtattgttaaaataaaaactttaaacaaattaaatttaacagagtttaattgagcaaagaacaatttgtgaattgggctgcctcccaagccagagtaataagctcagagagactccagtgcagccacatggtggaagatttatggacagaaaagggaaagtgatgtatagaaaatggaagcgaggtacagaaacaggtggat

SEQ ID NO: 58277 - DNA, 1714 bp, Homo sapiens
gagtgagtgattgggtgacagggacaaagccacatttgctgtccctgaaggttcacacataatgccctgctgacagcataccaagcctaccagagagctttcacctcctttcagaattctgtgctgggaggtggagagaagaggcggcaacagcttctggcctgggtgatccccgttcctattcctctactcaagtagatttgaaaacagcatatcttgtgtgaatactcagtctaagtagtgagtcataggagcagctgctgctgctgttagaaaatgggagtccatagacttttctacaatgccgtgtggaaacagtggaatccaatgcaatagagttgatgctacagagagaatatcaatggccttagggggctttaaaaaaaaatccggccgagtgtggtggctcacgcctgtaatcccagcactttgggaggccaaggcaggcagatcatgagggcaggagttcaagaccagcctgaccaatacagtgaaaccctgtctctactaagaatacaaaaattagccgggtgtggtgtgaagcgcctgtaatcccagctactcaggaggctgaggcaggagaatcacttgaccccgggaggcagcggttgcagtgagccaagattgcaccactgcattccagcctgggtgacagagcgagactcagtctcaaaaaaaaaaagaaagaaaaagaatttctgatggttatttagtatttatttaccatgggttaatcattcatttgctttatctgtttgttccatgacatgtcgtttcttcctaactggtctgtagcttctttcctttctatctcttttagattgctgcagattcacatttatcatgtttcttgactttgcaggtacttctggtgtaatccaggccctgatacctggcccagagcaggggaaaaataactcaccgttattcttagctcacacctctcccactcaaccccaagaagttagtgctgtttttaccagaaaagcgtgaaaccgtttgtttttgaagagccacgcttatactttagaaacaagtgtagctggagagaggccaaaggcaggagagagtaagcgggtagtgagggtgtaggtgagtggagcatgtgaatggatgcttctccctaaagtgtctacttttccctcctccatgccattcgctgcagtgggcactagcaaaagtttgagttttgcttccacagtggaggaaaaaaaccacaacatgttaattaagaaggttgtggggttttgttgtgggaagctagaaaagcagctgaccactgaaattgaagctatttacaggaatttgtagtgtgagccatgtaaggtgagttgtggggtgtgggccctgtgcccagccctcagttactcctctcctccgcagtgaccagctgcatctaggatgaggaaggaaaggagcccatgtctagatgacacctgctgagctcccccaggacaggcctgcctgagcccccatccctgcaaaatcaaagctcttcacctgggtttctgcaggccccaggagacgggcagtgataggctgtctgcctggtccctttcctgtccttttgcactgggccctgtggagaactggttctgttgtaagttaaatgcccccatctcttgaccctcttcacagactgttccttcaaaactttatgtttccaccatcttgttctccctgcgcaaaggagaacacatctctggtagccttt

SEQ ID NO: 58278 - DNA, 1915 bp, Homo sapiens
gggcaacatggcaaaatgctgtctctactaaaaacacaaaaaattagccaggtgtggtggcatgcacctgtagtcccagctacttgggagtctgaggcatagaatagcttgaacctgcaggcagaggcttgcagtgagctgagatcacgccactgcattccagcctgggtgacagagcgagactcttatctcaaaaaataaataacaaagaaattattgtttagggttttgtactatcaaacctaagtaaaaaaacaatgtatgctaaagaaaaggtttatgtataacaggagtgagcagtagaggtgataaaacacatctctttgagaatgtttatagattatgacctctcaaccacacttgtgcacctattttttttttttttaaatgagagacagttctgacctgctggtttgggttgctgctatgtggctgttcagtcatttatttgccaggcattttggaaacacttatttactatgtgccagttactgtcccaggtgctaagaattcaaaggttaatagaattaaggtccttgccctggagaaacctcatagttgctcttcaaaagcagtattcctaatatggtttgttcttgcttctccatactaagaggtgaggaaccccagggcaaataatttcaacactggataaatctgtaaagaaaaaatgagccattcccagtcctgcaccatgtttatgcaagtttattttccccagttctccaaaatgtaaagtctccctgttgagttgtattgtctggtctgattttggtacatgctgagctcacccctgtctttctgcctttattatagcttgttcctccttcccctgtaatctgaattctacttgtgctttaaagctgagcaaaatgttactttgtccacacacagtgccatttctttctggttgttcctgctcagcctgagcgctccataatcttggcctatccatcattgacgtcacaacaggttagcccttaatcacatattgttttgcacatcttgtttgtttttagtcatacctccccaactggattgtctgagctttaatgggacaaactgctactaaccacagtttggcctcccaactttttgaggaagaaagctagactctagcatttgatgggtggcatttacaaattaatgagattttaaaattaactggattatcatcaagtttctacccacatgagtaataatcaagcttgaactctaaattagaattgtttaagccctgtaggttgtcgagtttaatttaacatcatctttatgcaataagtcacctaacattgttcttcatgaaaatttaaaccagggattggcagctcactggacttggcttgcaagcttgccttgtttggactttatagtacttgcaaaatcaagacatgttttacagaaatttggctggggagtgtggtggctcacgcctgtaatcccagtactttgggaggctgaggtgggcggatcgctcgagctcaggagttcgaaaccagcctgggcaacatggtgaaaccccatcgctattaaaaaatttatttaaaaacattttacaaaagttgagatctctagtttgtctgaaataaccttccccattccaatgaactgtagggaaaacagctaattttcaaagagccatgaaaaaggcaagtaacaacaagatttattgaatgtttactatgttctagacactattccaagaacagtattaaccctcacagtatttctagtaggtagatactattattaaacttattttatagatgaggaagctgaagctcaaagagattaatcaacttaatctccagggtgtttcagggtcacaatttgtaatttgtggaatggagatccaacctaagcagaaagcagactaaccacagttacccataatcatgcttttactgcctattca

SEQ ID NO: 58279 - DNA, 2852 bp, Homo sapiens
ttacttgtctgcagcagctcagccagctctataccagacgctgggaaaacaaatgtcatccgtggtcttgagatgctaaaagtttaaaggggagatggacaaaataactaaaactgaaagcagtaattacatactgtaggaaatgtgtgcagagtgttctaagcatagaggggctggagggaaatgacggggaacatttgaatcaggaagaaattccagaggaagttgtgactatgctgaaagctgagaaggggcataaggtgcctaggatgatataaaagtcatgagatttaagaaaggtctgggaatcgcatgcaggccagtagacttaatgagaagtagttagggtgtgaaatgtgacaaaaattaagtactcttctgctccaccctctatccatttatttctccttgattaattttggggaagttgtggtttggatctgagaggagagtgtgccatttgatcaaaaccacgaggccagatcattttccagtaccaccaaggatcatttggcatgggctgctgatttctgctgtggtctcaccttgctcagcaaggtcagattgcatatagatttcatgtgttcactttaaggaatctcacttgtgagatttagtcatattgcaagctttatatctaccccatgggatataacatatgggatatgctatttaatggcagttatgcagattaaatgagcaaatatatgtacaacactaataataaatactgcctgatacatagtaaacaccgtataaagcgttattattgttatgatgagtaattattattcatctgggattctcctgagtcgtcggaacccctgggctgtcctttggacctggagcctgagcagaactggaaaagactcccagaaagacctagggctctctaagacagtatggtccattagaggtatggatgcctgggtcttggctagagtccagggtggaaaatataggtcagttcactgaaaagttcatttttattgtgagtgtgttgggagcaatgtgagtcaacagcactgcgcagttgctccttttgaatttgctaccataatttttggaagggactgcatgggcttcacagcagcgaaggccctgggttttactactataaaataagtcatcatctaggatgtgaaagagcttgctttctgttttgttttaaaaggatatattatagctgatagtgcaaatctactcttaagaatttctaattactatttgaatatggtctctatttcagaacctgcttaggcccaaatttgaaaacagtttataatgaacctgctttctgtaattcttgtacacaccaatttcccaccctgctttctgtaattcttgtacacaccaatttcccacgctagctgtgagaagttcatgggatgatgtgtctgtgttgtttatcctacagaaaaccgtgaataaatggctgttatttttgctattctcgtcttgctgatttcctatgctagtggctagcacaaatgcaagattatattgtgccatactcactggaagtttggtggctacaagatttccctagcacatggccttagtctgagcaaactgtagcaacaactataggatgcccaattggttcacattttaaaattgggtgtggacaaaatcagtcatagtaaaactgcgtaaagaatgcagattgctcaaagctatgtccttgagcaataaaaagccgctttttatgaggaaattacactgtcgttgtgcaagaataatattgtgctggacaaagtgctaaattctttttttaatcatcacaacccctcctccccccattaccctgttttagagatgagaaaacggaaacccagtgaagttaagcaactcattcaaggtcacccagctaagaagactaatgagagccttgatttgaacctggaagtgtctgacttcagggttcatgaactaagccttttatgctctattgctttctctctttttttaagacaagcctcactctgtcacccaggttggagtgcagtagtgcagtcatggttcactgcagcctctgcctcccaggctcaagtgaccctcccacatcagtctcctgagtagctggaactacagtcatgtgccaccatgcccagttaatttgtgtattttttgtagagatgaagttttaccatgttgccccagctggtctcgaatccctgggctcaagcaatctgcctacctcggtctcctaaagtgctgggattacaggcgtgagccgttgcaccagccagtgctctattgctttgtttgcactatctaggccatttgttcatccatttattcatttattccataaatatttattgtatatgccgagtactcttctaggcctggaaatactgtggtgaacaagaatgtcaaagactccacagttagggagtttgcattctaatgggagagacttaaaataaacaaggaaatgagtgcatgagtgtgagtcagtgtgtatgtatatattctttggggagtgacgtgtgctataaagacaaatgaagttcagagaagaggtatgttagttatttcgtattttggtttttttggggaggggtgttttttgtgtttttgtttgtttagttggtttttagagacaggatcttgctctgtggtgcaggctggagtgcagtggtgtaatctcagctcactgcaacctccgcctcacggattggagtgattctcccacctcagtctcctgggactggaagctgggactacaggcacacaccactatgcctggctactttctgtattttttgtagagacagggtttcgccatgttgcccaggctgatctggaactcctgggctcaagtgatccacctgccttggcctccc

SEQ ID NO: 58280 - DNA, 1719 bp, Homo sapiens
caggaggcacaggttgccgtgagccgggatcatgtcactgcactccagcctgggtgacagagtgagactctgcctcaagaaaaaaaataaataaaaataaaaactgcatatatttatggtgtacaacatgacattttgatatagttatgcattgtggagtggctaaatcaagctaattaacacatgcattacctcacacacttatcatttttttgtggtccttcttaaatacttaatttagttagacttaactcctcatgccagttctttgtaaaggtcattataaatacccacttgactgaataagtgaaaatgtaactttaagagagactccactgtggcataagataaggccaactgatagaaaaggagttaattctcaatgttggttttcttcataagccatctgtttttcaggtactgtattgactaatatgatgttcataagtttctcttttttatttttgaaaaaaaaaaacaagcttttgaagaggggccttaaactgagttatatttgaattgaaataatgagctgcttatggacatttgagtttgggataggaaaaaaacttttaaaatataatttgagcaaattcttttcttttaatgactattattttgcctggacccatttactgaaaattatttgaggatgtacagttctgattataaatcacttccctaaaagtactctgtgttctcaaaaggctccgtccgaaagtgaacacgtgcttcagtttgttatgactgagctactgattgtgcaacacacttttgataagtcactgatgtctgttagccctgtttgcatgacataagagtgatttcttttttttgagacagggtctaggtctgtcacccaggctggagtgcattggcgcaatcccgagtagttgggactacagacatgcacctccatgcctgactaattttgtacttttctgtgaaaagtacaaaattactggctggtctttaacttctgggatcagcctggtctgaaacttctgggctcaagcgatcttaaacttcccaggctggtctgaaacttttgggctcaagcgatccgtctgcctcagccttccagattgctgggaatacaggcatgaacccctgcacccagcctaagtgtcattaaaaatttgatctgttatataggcactaggtagaatgtctgtcagatgcatattttcaaagttgcagatgcataaattgtgcaaggaggcaccaaggctataaaaaaaacaacttgtgtaaacgcctttaaaaggaaaacaaaaaaatagttcaagatgattgggtgctggatagcagagaagcatatgaaatagacatactgaaagagcaacaagaaaaacttttaaatattatctcctaatacaacaaaaatgtaaggagctcttatcatctggtctcaggttttgagcagcctcctgttattgataggatatgtttgcttgttgatgatcagtaagcaaggcttttttttttttttttttttgcagcagctttattgagatagagacatacactttactatttccagtgtataattccatggtttttagtatattcagagctgtgcaacaatcatcacaatcaattttagaacattttcaccatccccaaaagaaacaacacacccattagccatcactctccattctgccctaagcaaccactaatctactttttgtctttatagatttgcctgtttatgaa

SEQ ID NO: 58281 - DNA, 2696 bp, Homo sapiens
tggtggtgtgcgcctgtaatcccagctactcaggaggctggggcaggaaaatcacttgaacccggcaggcggaggttgcagtgagccaagattgcgccaccacactccagcctgggcaagagcgagactccatctcaaaaaataaaaataaaaaataaaaataaaaatttgagctatattgaatatctttaggattttagctgtctatatattctccattttgattcactttaaacatttaacttttaacacatactcccatattgtactttcttcattcaggggaggattgtgaagctactacaagaaaggaaagccatttgggcagcagattctgatttgggttcgggaaagtttgtggcaacttttatttttctatgtcaccatttgtgcaacagacagaaattatctaattagcatagcaagatgttgcatttttgaaattgagttctctttgaaataagacgcatttagaacactggtatatctgctgcagtaattggcaagttgactttcaaggatctataatgttattgctgggcagcttattcataaggaagcccctcgtacttcatggtaaaccaactagaaagatacagctcctgacttttccaaacctaacaaaagaaaaaaacactgaggtttttcttcactgtgtcagtgaaaaagaagactattacctcgacctggtaatatgcagcttatagagatgtttttcacctatagcatctccttgcactatcaattattttacctgttgtttctcaattataattactgtaaggcacttcaaaaaaagagatttttttaaaaagcagaaatggaaatatattaatttgccatgagagctataattgccaaatagactagatattcacatcaacctgaccagtacttcctctcatgtgggcatcctctgtaggaaaccaaattatcaggaagtcatgtggtagccacagaatcagaatgagtcacgcaattggaatgttgaacgtccctggctctgttcacttgatgtgggtgtagcagagcaagaatcatcagacctctgccatggaaattactttgataagcactgaggcaattcgttttcattccaggttcctctcacaacttgcatgcgttcatatttaccgtactatagaatcctacagaggtgattttcaggcctttcatagaagactcaaaagatatccctccattagccagcattaccctgcgtctcccagtcatgcggggacaatgattcagtgcattggaggtttttggctccgtctacaagattggcttgctccgtgaatcagtgaccaaacaaaattctaatctgcttagctttgtcagcttctccagatatcaccagatgtgaagctctcttggaccttattgtaataaccacattttctagttttttaatgctttggtatattggggactttctgaccccagaagtactgcccctcccgggattagccaattcctagcagtagtagtaagaactggcttgccaagtgtgccttttgtatgcaagccaggtgatccagacgacctacctccaaccacctccttcatggttctgacactcacggccactattccccttccctaatcaccccaaggccaggtataggacaacttagggatagtccctatgccccaaagcccactggaatcattccaactagcctattctaaacctgcttgcccagcttctcccattccctccagtgggaaccacaataaagactcctgcccacattttcctttgtgccttctgcctcctgacccaccccggtgcttccttctgtggcctccctggtggtggggcacatccccaactctttaacaaactatcttttcagtggtagttgtctcctgaacgttggcctccccgtacctgaataaaaatgaaatccacactttaaaacacttttaaaatagtgaaaggagtggatgaaatcaagtatgtagggttaaatgctttggtggttggttgttttgttctttttactcctatcagattatttcctccatgaatggccagaactcagtgtataaaagagatctcagaaatttcatccgtggcaggagatgacatgttgcctggtagaagtttccatattctctcctagacacttgcaaaggcttcttttaacctcgccagcactgtagaacttcaggtgctgcttgctgtgcaccttgttcatcatatgagcccatctgctgggagggtcttagaatttagctgtggaaggctgtaccagtaggtttgtttccatacatgatagtgtctaaggaagctagtcaggcttccacgtaacttcttgggatctggtatatgaaccagactttctgaacttaagctaaatgaactaaaaaagataaattttcctagagtctgaagcttaatgaagggctttacacaatttcctggtgtggtgtgtatcctcctataagtcttgcagttaaaaaggagttttacattaaaacatccagagacaggtctcagggctctccttccatgtatttcattcagcacagtagtagaagttgagtcaggtaattctggccttctttccactaaagggagagagcagaagaggttccctctctgcagtcacagggcaagatgtcacagtttctaaatatactacatgctgcactagatgtgcatatgtcagagagaatggtttattcac

SEQ ID NO: 58282 - DNA, 6445 bp, Homo sapiens
gctcaagatacatagtgacagacaaggcctgcccttgtggagttaacgttcacattttacaagagagtgggaaaatggcaatagttcatatccaagaatagaactattttgtgtggaatgatagaaattatggggtactccaaccctgagcattccttggcacggccactggtgtttgttatgccccagccactgtgcaaaggctggaaatgcaaaggtcagcagaaacgggcttagcccttggcctcaggaagtttatagaacagaaaggaagggagttactcagaagtaaatggtcaaccacttacaatggtgatcagggctccgaaggaaaggaaccgaagagcccttcgctaaaggagactgagcagggctgggcagaaacagggctagggtgcccgaggaagtgatgactgagatgaggcctgagggatgcagggataaagggtgacataagatagagggtgaagaaaagcatgcaagacacagggaacagcatgggctgctcctgggacccaaacagagccagggaagaacgcatgcgaggagcctggggaaggagccgggctccacatgcaagcagcggtatttattaaaaataaatccttagatctcgaagccatgtactaagtcaaaatgtgctccctaatcaatttaatatgattttagtttgaatctatacatggaaaacaatgtttttgtttgtggttgaagatgataataaaggggatatggtttggtttgagattagaataaagaggatttcagcgcaacaatttttgagcaccacttacataccaacactaagtgtaaaaagacaaaagacccagtacctgttccttacagcttactcatacacacagaactatatgcaaatccatctagaaaacccagaaagtgacaagggagagagaggtatgtgcatgggacaaccttcacctgaacgtttgcatctagactagcccaggagaaacggtagctaccattgttagcccaccgccttagggaaaaaggcattcaacgtatcagctgaattaccccatagggtaccactgtgaagatcagagttttatttgaagatctactctgaacctccagagaaaattccatttctccctcctaggaaagaattcagtaacagtagtttcttatctagccacagtaccaggataaattcactttaaatgcatgtatgagaatagaaacatgcacagctagcaccaagagaacatatgtaacccatgagaaatgactaaaagtttagaatatgcctcatagggggaaaaattcaatagctaccaaaatgagtctttctacacagctagaacagagtccaagcaaaaccctctgacccaagataaggaatcccacaggcagaatgactaatactaacagatgtatttggtctcttcaaagccatttagaaatgaaaagcactacatccaaatgtttatcatcactgttaataattgctatttttgcctctatattcacgatctaaacttgacagagtaactcagatcacacaattcatacaagtacagcaagatagagacagaagacctgaatggaaatctcagagcatgcttccacttcacaaaggcatagtctctgtcagataaacaagatttaaagtatgggaagcaacaataccacagataaaattgctacctggcaagggagaacaccttactgtggatctgtttgtagagtctcagaattttctatctggaaggaaacctacaggcccctatagaccaaccttcagcataattgctaacctagtcattggattaaaaaaaggaaaggaggggaaaagggacagaaaggggaagaaagggagagacgaagagaagaaaaaaaaagggaagggggagaaggaagaaaaaaatcaagtgaatgaaacagtacagggatgaaatcataatcctgcagctcaacgcttacttagttctctgtctcctcccaggttgactccaaacgattgatattcactagttaggaggtctgatcaggtatagataagctgtgccatacaaaggccccagtgggcttatcctgtctttaaaaataactccaaagtactgcatcaaagcctttgcagaaaatccatatgcactcccagggctctgacccataaaacattcttaccagggacctggatgaggccatatactgtgcgatgaccatgggccaatggaaatcttttgaaaacttgctggaaggtccactgtgtaacctactttgttgttttttaatctggataaaggacatttcagcccgtagcacccaggaagggtattatgtgaataaatgaggtgttctctttcatgactaatttctgtgcttctagataaatttccctaatgaggagttctctattgaaattttccttcttcccttccttagtccctcttctctcccacaaattgtaagacatgtttcataccctagaaaagctcacagtctaatgagtgagagaagacatttattccttcatggaggtctgaaatatcatagcatttccagtagtacaaatagtttagaaggctcaagtccaagtcgagaatagacacatcttactccagcgaacaaggcagaaagttaaatgccatgagagtgggatgaacaattgggacagggtccttgaaggagaagaaattacttccaataggggatataggggaaaacttaatacaaaaggtggcctttccctgggtcttttaggaggcatagggttttggcaggtaaagatggcaagaggtgatgatctatcctagatcagaggttttctttctctttttttttttttttttttttttttttgagatggagtcttgctcttgtcacccaggctggagtgcagtggtgtgatctcggctctgcaacctctgcctcctgggttcaaatgattctcctgcttcagcctcccgagtagctgggattacaggcacctgccaccacacccggctaattttttgtatttttagtagttgcattttagtggtttcaccatgttgggcaggctggtctcgaactcctgacctcaggagttctgcccacctcagcctcccaaagtgctgggattacaggtgtgtgccactgcgcctggcagattggaggttttcaaactgcaatccctggtcctgcagcatcagcaacacttagaaatacaaaagccagggtcttacccttgacctgctgaatcagaaatgaggcttagcatgctttgtttagcatcccagtgattctgattcatactttattggagaatcaataatctagatttaagatccttagcctggggtctgtgaatgtggataggaaaaaaatacatctttattttccctaatgtctaactgaaatttagcatttccttccattacagatgtaggccataaattgccacgataattattaggaccaatgccatatcatgttattaaatgtattaataaagaagaatgcatacaacatagcagatttttaaagatttttataactgtatttcaatataattggtttctttgtaatttcgtgtatcattttatacattaaaaacattgtgagaaagtgtatgctttgcaggctgccaatgaaatctcatcttttatcataccaaaaatgtgaagaacccctagtctagaaggattccagacaaagaaaactcggagcaaaggcaagaaaatacatggccagccaagtattccattttgcgtaaaactgaggtaaagcaaggaaatgccggaagagaaaaaagaaaaggctgaacctgattgtcagaactggacttcttccagcagactctggggagctacttaatcaggactttttaaaaagagggagcaagaggcagagccaacgagacacaaccagctcagggttttcaaagaattccctagcaaaggtaagaaggaaggcctggaatagaaagaaacagaaggtgagagaccaagcaggagatgagatttctaatccaggcttatctaatagcccaaagtgaagaaagaactgactatgaaaatgggacgaatatgagagtgctgtgaaaattcagcagtgactaaaacagaagaatcaaacatgactccaaagtctgaagagaaggcgactgggacaagagtcatactaagaaagaattaaggatgccaagtggagcaagtctggcaaaggaaagtgctgagttgcctacaggatatccgggtgaaaacatccagcagttatttatccgcctgggacagtactgacctttaagacttactgtatctcctgaatagcctatttggacttcatcaagagcttttcccaaacagggatttttatcttgcgggcccatggactcatggggagtcccatgaacctcccaaattattaaagaaaattttatttgtgttcatggacatttggggagaggtatgtactttcattacaaactcaaggagcacgaaactcccttttccctcacaaaaatgttaatactctccattcatccttctaaacactccaagcaaggtaagccctcttgtctgaaaatttggggagggagcatgagtctcagaacaaacagaaaatgcctcaggaacaaagcagcagcagcagttacagtcatgcgtggatggttctgagtcaggagaagctcactgcacagtcaccagatgaggaaggcatttggaatgtcttggttaaaactcactggaaatgacagaagagtttctgactcatttcttgaaccaattcttgcctgaatacctgtctctacaagagcagtcattaatgccccaaccttaaacagtaaaaattgtcatttttataaacatcatactgctcaacttcccactgtccaaagaagctgagctgcacgggttgtcccaggatggaaaagaagccacagccaagaagctgtgtcttgctttagtgttgccatctactggctggtgctcactgactctcattcccaatcttttcactgccaaaggaaagattttgcaattaggctgctttttttatccagagcctctctagacagttcagtccccaagaggtcaaaaaaaaaaagttttttttaacagaaacctaccagctccaaaaaaaaagtaaggcaagaccaaatgtcaacaatgttactaggaagcttcagcactgactaacagagtttatggtgaatgctccctaaatgttagccccacataattaagacaaaagatgcttttaatgtgttgtatatgaagtgattatgaataagcagaggtttgtgcccacagaatggaatagggatataacagcattgaaaattgttattgttgttgttgtttcgttaaaagtaattctctttgctaggctgtgtgtagaaagtggttatcctggtaagcttaataaacatagtgccggggattctggctgaatagctgagagttagaattgaatgggttctcacataccccatggaggcaggaagcaaggaccaggttccccaagtgaggactttgttgctcttattgaactacaatgaaagggtcttgtacacttacttcataagcccatggcactgaccagaacagcaaagattctttatttccgaatgccatagtaactcttttcactattctttcgtgtgtgtgtgacagtactcactctgtcactcaggctggagtggcatgatcttggctcatagcagcctccatctaccaggcttaggtgatcctcccacctcagcctcctgactagctggaacttacaggcacatgccaccacacccagcaaaattttttttcttgtattttttgtagagatggggtctcaccgtgttgtccagactggtctcaaactcctgggctgaagtgatctgccaccctcagccttccaaagtgctgggattacaggcatgagccatgcctggcctctcttcactcttcttgtgttcacttcctccttccctggttttttgtttttattacttttcttcctttcctctttatgaactgtctaaccccacatctaccttccacctcatcatactggcacaaactaagagctaaaaggaaaagagagttgcacttaattctcctcattcatatgcttttcccttcttttcctttttgctttttaatccagcaaagcaccttatctttcactcacgttcacattaaaatttagaagactgatcatgtttggcctttccgtccaatatcaccttcctataaaatcaatacatatgggtgataaacgtaagtcacaaccaccatcttatgcatcagcaagcccgcagcacgtaatacaattaaagacttttttgttgattaatgaaaggagaggttgctaatcctttcctcctataacttaaggaacagaaggaggaagaaagaatatagtgcccttagatgtcaattgtccctcctccctcctttgcggtcaggacccctcaaaaaaaaaaaattcgctcaaggag

SEQ ID NO: 58283 - DNA, 2044 bp, Homo sapiens
catacttgctacagcaattacgaactcaggaagccctgtctcttgagtgtttactgaaagctcaataagatgtacatggtcaccttcaggcaatataaggaaagtagggggctggttagggaacgggggggggtggatcaaaatgaaatctacaccaattttacatttctattctctgtattttatatacgtgtccttcattcacatcagacctcacgcttctgaaaattgaagagtctaaaacaggtcaaagtactgactctgaaacccctaggattcaaatatatttatttgtcataattaagcagtaatattattttgtatgcatattccatgccttttacatctattatttccttctcatctacttatacttattgcttctactagtaaaaatcagttgaatcagctcttgaatcttatttcagaggcaagatgtacatgaagtgctaagagtgtttaccattttccccttaagtctcttcttgctagtgttaggcatatttcttgcctttcctgcccaatattcatttattactttagtcattaaatatgtattgggggactatgaagacggggtaggactctaaatgtgactctcgggccttaaccttaagaggccacacaacagtgttcagtaatagaactaggttgttttgcaaagttttgctcttctggctgcagcgtcactaattaaaacaatgaagacatagtttggttaacttctcatttatggcatcaatccatgcacgaggcaaaagggcaaacccttcggtttgggtcacagccctgcaaagagcatctacccagttcgccaatctatcagcagcgcaggccggtgggcggggcttgtggaagcccagggaaggaaaggaacggtgggaggagatctgggaatgccgagtcgagcctgcgactagaagtgacacagagacgggaaacccaagccactgccgactggggaatataccccctttacttcctcctcaaggggctcggggggcggggcggaggtacctagtttctgccccaggtaggtgaggctgtgatagaccttctcggccgcggccaggtgcgccaaggccgccagcagcgacagccagctgccccccgcgctcttgttggcctctcgttccttctccacattgtccttagccttgtcgtaagagaagatacccaggtgagagaagaacgtctccagcaccgcctgttccaccgggaccggggcggccagcgggatagactcccccatgcgagctgcgccccagctcgacccacgtggctctcctcggcctcgcacttccgggttctgagggaacgggcttgcgcacaagcgtgcgtgcgcgtgaccgcctccaccggcggactcgtgagcgcgccgctgccgggaccgctcctgggccttagagaagacgcggataagggccaaggaaagagggaggtagcggttgctgagctccttcggcgcttcggctcctgtagctctgactattcggaccgtcaaggtagaataggaggcggccagttccccgctctaagaagttgcctgcgctctgaggtgagctgacaggcccctctctgtgtggttcgtcagcgctggtgacgtcatgcaaacgtgacgtcagccctggccagaacatctggcctgggctctccaggcacctcgctgggccggctgggagatggggaagtgcctggagttgtgcccacactcacagcagggaccctagtcagccctgacaccttctacaccaactcatggaagtgatttgctgagattagaagactgacgggtaaaggttgatctccttcccattgcctagttttcatcacatcacacaccaccggttaactctcacctgtatcccgttctagttctcccgggtctgtgttagccctgcaactaataagtagagcccctggcccaaactgcattaaccttccttaaaaagttatcttttttttttctttttttttgagacggagtctcgctctgtcgcccagactggagtgcagtggtgagatctcggcccactgcagcctc

SEQ ID NO: 58284 - DNA, 2422 bp, Homo sapiens
caactagtgaggaggcggagtggcagtcaagtcgaggcagcctaagcctacactgcctctatgttgcattaataaattaataaatctgtgaccaaataaatgaagtgacatttagtagcatcgaaagatcccgtgagtaggacttcctaagaatgctctccttcttttcatggacaaaattttagtctgtttaaaataaattttggaccggacaccgtggctcacgcctgtaatcccagtactttgggaggccgaggcaggtgatcacttgaggtcaggagttcgagatcagcctgtccaacatggtgcaaccctgtctctacgaaaaatacaaaaattagctgggtatggtggcgcgcgcctgtcatcccagctactcaggaggctgatgcaggagaactgcttgaaccccggaggcggaggttgcagtgagccaagatctcgccattgcaccccatcctgggcgacagagcgagactccgtctcaaagaataaataaataaattaattaattaattttgaaaacctgtcagcactcatcagagctttacactgctgtactcgggacacttggggccgtagacaagcaattaaattgactcacacgtggttagaaccacgtcatcctgattcgtgaatccgtactctcaactactagaagccctttgtggaatgctcggggcgaacctgacgcttgagctctgacaccacgcagacacagccggggatttaggagctgggtagggactcctgggccggatgcctcatcccggcatgcacctcaagccccggtgaccacgccttccggcgagcgccagggagcgcgtgtgcgcctcgccgcccggaagcgccggccgctccctgcatgctgggagttgtaggcctccggcgtcagcccgcgggctgccgcccgcactctccaagagactgctggcgccggcgcccgcccgcgcggcaccgacgcggggagcgcgcttcgcgctgactcagcggcggcggcggctgcggcggcggcggcggcgttagccggccctcgcgctctttcccttcctggggcgccgaccccgcccgcttgcttgcttgcttgcttgcctgcctgcctgcctgcccggcgccacgcaagagaaggtgccaggggacgcagagcgactagaggcgcgcggtcccggccagcaccgtctctggcgttgtagctgcggccgtggcggaggactacggcgacaaggacgagggccgctctcccagctctctgcgtgccgcgccgctccgctccgctggctgaccatctggagtgcaggctgggaggcgggatggagtgatagggaaggtgactcggggctcgggggcagcgggaccgggaccaggtttggtccgcgtgaggcttcgaggaagttggccggggcggaccggcccgggggagtcccgacgccagggagggtgcaggcttgggaccctctatggcggtgcaccccctggctgggcggaccgggtgggggtgggtacgagccggggccgccgccgaggagcgcgtcccgagtgcgtggccggcggttgcttggtgtttcatcacccgaattgccacgaggcttcctttaggggagggatcgggggagggatgggagcaaggctagcagaggagggtcggcatcgcctgtggttccgaagcccgttagtcatcgttgtagcgttatcaactgtggagacctcaaacttgattcttcccccacccctggacaaaaaggaaaagtgttatttctgtgcagtaattggccagcacggacgctccatttcttctcaaaccttcctcaccatcctgcaggactagagaagcatgaggtttccctgtaaccagaaaaacgagtactttttgaaagtgctaattagttgtggcgggcgggggttgggggagagttacgttttattaaaccgacttgtcagcgtggtgttaaaaggctggaaagattcagtcgtagtatttgaaacagtcttcagtaggtgtagaggaatttttccaaattgtttgattcttaatggctatccaggaaaagttaaggcttaatattttaagtatgttgcttgccttcccccaagaacctttgcaagatgcataattgtttaccgtattgaaacattttttggggttttgttgttgttgttttgagacggagtctcgctcggtcgcccaggctgcagtgcagtggtgccatctcggctcactgcaacctctgcctcccaggttcaagtgattctgcagcctcagcctcccgagtagctctattacaggtgcgccccgccacacctggctactttttgtatttttcgtagagatggagtttcaccgtgttagccaggatggtctcgatctcttgacctcgcgatccgcccgcctcagcctcccaaagtgctgggattacaggcgtga

SEQ ID NO: 58285 - DNA, 2731 bp, Homo sapiens
aggcttagagaggtaagagattagcttttaagtcagtaattggcagccgagacagcaaccctaggtctgttacattcaaaagcctctgagccactccgcatgacttcccattcattcgtgtttgctgctgctactctgggaaacaccatcttcctcttcccctccactcagaaatttagccctagattagcagcggtctctgctccctcatgttgagaaaggcctgttgtgctgtccgtgggcagaagggaccccttcagaaagctattccttattgggaatagcggcttgagattttgactgcacgaatattgcaggacctaattttagtatttaagttttagttcttaaattcttaagtttagagttagatactccaatacggccgttttccaaaataccgagagggaattaaatgaacatttttacattaagaatttaatgtatttctgggtgatgggaaaatgaaaaaaacaatgtaaagtctgaattactgcgagacgataatctggctccactgcagccaaagtgggcccttaaaacatagaatccatccctcccagctctgccggccgtctgtgcctgccccccacgtgtcccacgttctgcacacctgtaaatcttgggatgtaatcccttgctcagcgtcggtccgccctactgtcggccagcgctcggggaaggggcgggatttgcagttgcgggaatcccaattactgtgttcgctgctcagggctcctcattcccctttagagtaaagggcgagggcaacagtggacggggtgtctccagacatccccctcattaccgtggccgcggaagccgactcggcagttgccgccgcggctgtggtgactaccagacgggccataggcgtgcgcacgcgcacccgcaccggcgcgccggccgtcggtcacgtggcctccggccagggcttgcgaagccggaagtgtcctgagtctcgaggaggccgcgggagcccgccggcggtggcgcggcggagacccggctgggtaagtgagacggccgcgggctgaggggccaaggcggcgcggggcgcggtcggtcaggcctgcgccgcccggcggggagcgctcccgccccctgtgggaggctgggatgctgagtcagagcgggggcgggggcgggcgcaccgagaagccccggacgacccgaggccaagccatccaggaccccggctgcgtggacactgcctctggggtgtgtgtcgggtggccgtagccggtggaatggtcgcgcgggccctgttacctgcatccccgctccgcgccgcgcggccggtcctcgacctgcatcccgtccggcggctttgggcataaagaggacgactccgttaccgggcctgggccctggctgcctggggaggcaggggcacctctttcccttagactcgctgttttctaccctctttccgagcgtcgacacaacgggcagtttttaaatgtattgatttttcagaggattaaaaagagacgtttccttagagttttagtgatgttcagtccgcagaggttgactcacaccggaaattagaagcataagatgttttaaatatatgccgatgaaatacgaattcccagacatttccttgctcctcgtctacctggcttatgggtttaatttgtaatctctatcccaagtattcttagtaggtggcctcaaaacaactcccaagtaattgccaaatgtataaccaaagactggtcttttccactctgaaaccccagtgtatgaatcacataggggcagagtttagaaatcctggaactttgtccataggccatgtcgtcaaacctgttttcatccctcaacaaatagtaactttcgttttggacggtgtaaggaagtaggctgaagacggcatcatcagcaacatagttgttgagtgtctgcttatatgcttgtcaaaaatttgggaagatttatatggcaagcacgttgtgggtgtgctgagtcatgttttaacatgttattgtggagttattggaagataatttcaaaagacatttcccctgaccactattgtgattactgttaaatagaaaccatagttttgtatttgcatagagaacagatatcttagctgataaatatttttcttattatcctgaaggtacatacatataggtacctaatggtactatttgccatttacagttacattgattagggaaggtttttcgttagatagttgagacgtttgttattgtatcgtgagtgaaatgtaatgactggcaaatgtgtattccttatttgtgaaaagggaatcttatttttattgcttatttcctatagtcgtatataaagtttatctaaattagatgggtagtaaaattatataaaaatatcctactatatcagtgattggtaaaattgagacccctgaccattctgcattttcctaacccagcttggggatattggtggtcattaattcatcacagaatacctagtctagcatactactttttgctttaacttactgtggagggatattaaaatccatgttttaatgacaatacagcaggtttaagggggcatggtgggactagtgtttatgttatgttagcatacatcaattttagtccagtgtggagcttggatactttgtataccttgatagatccatagcttttcagtattaaagacttgataatacaggctacttggtacgtttatatatttatacttggaggttggagaaactatc

SEQ ID NO: 58286 - DNA, 792 bp, Homo sapiens
ataaattagaatgtgtggcagatagttacctggaattagccaaactcaagattaagagcatagccttccacactgccaagtctgctcaagacttttgataccaattgcaaaggagtttggcaaactgcacagagagaacagttcccacaagattaccctcacatcatcccagccggctacaaatgtgggggttgcccatgacactcaggtttggtaatttgctggaatgtagaaatgactcacaaaactgaggagagtgctatacttataattacagttttattgtagcaaaaagatagaaattagaaccagccagaggaagagacacaaagcgtggaatgtgggagggttccaatcttgaagcttctttgtcctgagggacacattactctctcagcattgatgtatgacagtatgcatgaagtattgccagtcagggaagctcacccaagcctttggtgtccagggtttttactgaggctggatcatttattgcctgtattgctgacctttagtccccagctccttccagaagtttggggtaattcctttagtctccattaagcccccatcctaaatcatgctgtgagactctccagtggccaaagcccccagaggaacaaagacagaagtcttgttctttcagataggacattttaggggccagagatcactgtccagtagccaagggcaaagcctgacttctctttgggtaaagttaattttttaccacacaatagttaagtggtaatgaaaagagatatttaccaaaattttaatcttcttggaaca

SEQ ID NO: 58287 - DNA, 2665 bp, Homo sapiens
gatggatggaattccctgatctccttatccccaccacttaaaccatgccttgtgggtgaccgtggaaggctgattgtggcggggacatttacaaagcacatttaattgataagcactcgattgttctgtaactatagaactagttcacctttcagttgcactgagtgcgcctaagataacgatcttatttggaagtgagccctcgctagaaagaaggggaaaagggtaagaccgaagctcaaatgaatgaccagaaaggatgttttcattcgaataaactcaacccagtttttgacctccccacccatctctgccaacttgaaatcctcctggaggggcgagctgctggggttcaggactgggcgttgcggctgcaggaagccgtgggacctggggggtccctcggccgggcaacccccacccacccctacaggaccctggtgcgggggcgagcagggagtggacgcagagaaagttccccgctctgctcccgccctctccgaaactcgagccagcgaggctgggggcgggcggacggctcgcagaggaatttgcagtttccgggaggttgaggaagcgacccgagcacagccccagcagacgcagccctagcgcccggctttccgggttccgcgacgctgtcgggagaaacccgcgcgcctggaaggggcgggccgggctccccccacctgcgggcgggcggggagggtcgcggccgcgcggggtggggctcggccggtcgcccgtccggggcggggcccagggaggcggggtcgcgggcgcaccggggccgagccgcgcctggagcctggcggggaggcggcaggaggggccgggagagcctgattgagcggcggccgcagctgcataaggactgcccggggctgcgcgccgggaacctcgcggggctggcgggcgccgcaccccctccctggccgcctgcgccccggggaggccgcccgcgcgcgacgggaccggcagcatgagcagcggctacagcagcctggaggaggacgccgaggacttcttcttcaccgccaggacctccttcttcaggagagcgccccagggcaagccccgctccggccaacaagtgagtggcgcgcggcgggcgctgcagcccgcgccccagagttccggggaacccgccagcccgcgccccctgcctccacgtgtctctgcggggcgctcgggggatgctcgccgggaaggaggagcgggccgagaagtggcttctgccttttcgggtcccgggaacgtgcctggagcttgtgcgtgtaggcgagggaaggcggaggaagggcggggaggctgagggccggcttctgccttccgcgccagatggcctctgcagctccgcctcgggctgccgcctgcggggagcagccccggagccagcaggcgtccccgggccactcccccaggtttccccttcgcgtccccgctgggtcgacggtcgggttcgcgcgcctgtccttcctgttagtcagcttactcatctgtggcccccagagtggcttgggtcaacgtgtaatagctaggggtggccgggtgacctgacctcccctcttcctggcccgggcgacctggtggagtgggggtccaagggcaccgtgggcctcgccaccataggctctcactaaatctccgttgcgggactcagggttgtgcgttttctgtaaagctaggttttttggtgcccagatgttttgcaaacaagctcctatgctaaatactagccagcgacagctaaccttttcgccggtttcttccttttttggaggcagcatgccgtgggaagcacgagttgggaaaagatgggaagggaacttgtgccagtttcgccagctgtagccgtgttttttgggaggccttcccgaaacggggcacgtcggctggactgaggagcccggtgctagagcccgcggcctcctggcactaggagccgcaccaggggagccgggccaacccggccacgctcacatcagattacagaagattgtaatggcacaaatttgttgcttttagaaaacaggcgttcgccaaacatttctattaataccggactgagacctagagactagaagcaagaagaatcgttcaggggccggatgataacttcttttggtggatgtgggagggtgcaatctgtcagggtggtcttgccagacctcttaagtttagccactttctgaagtaaaattctttctaaaattcggaagttctagtcttttcaggctcttaagtcccaaaccaggaggaggagaggagacggtgaagggtaagctgaagtcaagtgcccttattcagtaaccgcagttaatctcaagtcccggtgccatagttgtccgtcttgtattgtttctaaggcttaaggccccactatttacgagtcactttgagtgggatctcttactttcagcagagtgtgttctgagagcatgagattgctgtgaagtttggaagttggaaacgccctctcctcccccatgcccaccctccctgggttgtagaaaaattgcatttgcttatgctttttccatttttgctttctctttcttggcctctctcttccccttctccgttttgcattttctcctttcatttatgttgctttcaccacttgacatgaaaaggaactcatggtagtttgaagtttattcca

SEQ ID NO: 58288 - DNA, 542 bp, Homo sapiens
ttattttttagcatggctatggaaaacttaaaattatgcatgtggctcgcatgatatttttgttgaacaatgctgtttgctgaagcagggctggcagcccttgccagaggtttgaatctccattgtcttggtggctgcagatggatggatgtgggggtaccagcctggtgtgttgggaagatttttctttgtgaaggggaacttgccctttactgttggggatagtttcttctcagcctatccagggacacacataccagcattttggggttgtgaaacttttgtgtggggaacttcccttttttttttccacatgagccaataagataaaactgacctaatggcattctcggtgcaactctgccttcagtttaaggacagaagagggctcatgtttcatagagtattaaaggagcaagcttaatattttgcattttgtggactgtaattgctaactgctgctacatgattcagtcagctaagaataatttactaattatatattgcctcacttggttctttttccagatgctaaacaaggt

SEQ ID NO: 58289 - DNA, 3325 bp, Homo sapiens
gtcttgctctgttgcccaggctggagtgcagtggcgcgatctaggctcactgcaagctctgcctcctgggttatgccattctcctgcctcagcatcccgagtagctggaactacaggcgcctaccaccacccccgggtaatttttttttttttttgtatttttagtagagatggggtttgactgtgttagccaggatggtctcgatctcctgacttcgcgatctgcccgcctcggcctcccaaagtgctgggattacaggcgtgagccaccgcgcctggccagcaatagttatttttaaaagatcctcctacatgtgattatatgccccttttcatttgagggtagtagaccatatggagaactgacagtggttgagagatttgaagggaactaatagtccagccaaagagcgaaaaatggcaggaaattggaaattaggtctgtctcattggctttattaaccaaaatgaattgggaatctcaatgtaattgatcaggaaggagctccagtcattcctggaggattaatttattattattattattattttttagctgcataccatatcactgtggtgcctttgtttttggaatggagctgttgcctgctgaccacgcctgggggcacctaatcacaagtctttcccaacttctttttcctttaaagcaagccactccagttgaaagagaatgattagacatatgaaagtgtggttttgtttgcccaagagtttatgtataagttaacacattgtacacttttttttttttttaaacttcctctttctctcttatctgcctctgatcacgggatcctggttagttttgctcagggcagctcgcttgacctggtgacaaattccgcttcttcctggggctttcctttttcctccagaaagtcttgtgctcatggtttaggaacttagtcactgtcgtctttctggttttcatgagatcaaatcaaataaggtaatacgtgcaaactgtataacgtgctgcaaaggcagactctgctgctgtccttagagtccagttccctggccgtggctgggttcccagccctctgttctctctccacagagtgactgtctcggctctgagggtttcagcgatactggatgcttccacatttaggaaataggcctgcttatgctccagtgcaggcattaaagctcaatgagtcatgtgatctgcttggccgactcttcagagttcgtttgtactcagtaaaattagtatgagtcttggaacccggtgggaaacctcttcctagtcctacaggccggatgcgccttctgagttttcatattatctctccacccccaacctccccctcctttggttgtatgtttctcacaatgaattggttgttggaaactggctttgtaataattccaaatgccactgtgaagatttttaatagcctttaaaatttttaattggctgagctgtagtgttattgatatatttttgtataaatgttattattaacaagttaattcatataaagggcttggaactatacctggcatataagtacatgtttaataaagattaacttatttctgccgggtgtggtggctcacgcctgtaatcccaacactttgggaggccgaggtgggcagatcacttgaggtcaggagtttgagaccaacctgggccaacatggtgaaaccctgtctttactaaaaatacaaaaattagcctgatgtgcttgcttgaacttaggaggcggaggttgcagtgagccgacatcatgccactgcactccagcctgggcaacagagtgagactcttgtctcaaaaaaaaaaaaaaaaagaaaaaaaaagaaaaagattaacagtatttctaatggtattagaattgttttattttattttttgtttttgagacagggtctcgctgtgtcacccaggctggagtgcagtggtgggatcatgcctcactgtagctagccttgaactcctggactcaagtgatcctcccacctcaacctcctgagtagctgggactagaggtgcattctaccatgcctggctaattttaaaaaatgtttttgtagaaatggggtcttgctgtgttgcccaggctggtctggaactcctgggctcaagtgatcctcctgccttggcctcccaaagtgttaggattacaggtgtatgccaccatgctcatccagcattcttaattaaaataatttggtaggagattttatgaaggcagtatgttcagtagaaaggtttggggatccagaattgggagactattttaattttggatctgttatttactagctctgggagcttgagcaggttccttacttaagttccttgagtaacagtttcttgatctttaaaacattatagaggggttaaatcagataatgtatgtggaatgtattcctagattatagattattacataattgtaagtgtggtagcaatcacaggtgtgtttagagactactaaaaaatggttttctcttttaatcttgtctgatgtaaattaatgacacattctcagtcgactgtagtattgacacttgataaacagtttttgaaaatgaatttattctccatctcttctatgtctgcttttatctgcaaagtcgtgatttgtgtttggggacttgaacaattgatagctaagcatcaactttaaattgctttatgaattgatgattgtgtttatgaagcactggtgatttgggggaagatgacattttagcttactgttggatgcatcagggaacttgagttaatttagctttaagccttccagattatcctgcctatgagcttcacaagggcagaccacatctctagttttcaccatgatattttcagtgctatcttggtgcctggcacagaggacagagggagtcccaattatatttgttaattgaccacctggttttcatctgatcagacttgtgtcagaattataatcaaggaaaagttgggcaaaggcactaaaatgagtttcttttggtttcagagggagtaataataaaacaacagtaatagcttatgtattcatgtggaaataggacatttaggtgaaaagtacgttgggccaggggtatggagatctagctcctaggactggtcctttattaaatagcagagataactttgggagagttacttaaccatttttggcttcagtttcttcctcaaaggccctgtccagctgtgtggcaaatggttagtttattctggagcagaattactgattggagggaaagtaacagcaataggatttgagagggcttcacaaatgttttgagatgccaaatgaattagtttagaaacagctatatt

SEQ ID NO: 58290 - DNA, 1844 bp, Homo sapiens
ctcctcctctctctcttgttccctctcctgccatgtgaccacctgcttccccttttcctttcacctcctgaggtcctcctgaggtcctcaccaggagcagatgttggtgccatgtttcctgtgcagccaacagaactgtgagccaaaataaacctcttttctttataaattacctagcctcagatactcttttatagcaatgaagaaaagacaaacacagaaaattggtaccaggagaggggcatcgcaataaagatacctgaaaatgtggaactggctttggcactgggtaataggcagagattagaagagtttggaggggtcagaagaagacaggaagacaagggaaagttttggaacttcttagagactgattaaatttgaccaaaatgctgatagaaatatggaccaagtggggtggctcacgcctatagtcagcactttgggaggctgaggtgggaggattgcttgagctcaggagtttgagaccaccctggacaaagtggcaaaactgtatctctacaaaaaatacaaaaattagctgggcatggtgacatgtccctgtagtcccagctactggggaggctgaggtgggaagatggcttgagcctgggaggcagagtttgcagtgagccagtatgagtcactgcactccagcctgggtgacagccagaccctgtatcaagcaaacaaacaagaattgtgtgagctgaactagttgagatgtctatggtgttggctgttgtttctgctgttaatcattagttctcttaaactaggagatgaacaaggttaacctttttcttgcaaattgacacagagggtctgctgctgtgagctttatcttcaacatcatcttgtcctttttttttttttcctactttgaaaaaaaaattcattttttcatagaaatgagttcttactatgttatccaggctggtcttgaactcctgagctcaagtgatcctcctcagcctcccaactgggattacatgtgtgagccactgcacccggcacttcttgaagggttatccacttgaaaactgctgatttttggggggcattgtccccacaaacttttcaaaaagcaacagtgatttcaccattctgcccaagcttcaccataaatttgatgtttgtttttgcttcaattttagcagaattctagccctgcgtggtgacaggcacctgtattctcggctactccggaggctgaagcatgagaatcgcttgaatttggcaggcaaagtttacagtgagccgagatggcaccattgcactccagcctgcacgacacagcgagacaccatctcataaaaaaaaaaaaaaaaaaaaaaaaaaaattagcagaatttatgttgctctgataggggctcttttcaaactgatgtttatccttcttagtgcctcaaactaggttttgctcagacatgttatgacaagttagtacaagtttattttggtgcaaaaaatttttcaaatccatgcatagtttcttctttttcttttcttttcttttcttttttttttttttttgagacaagatctatctctgtcatccaggctgaaatacagtggtgcagtcttggctcactgcaacctctgtcacccttttcccacctcagcctcctgagtagctaggactacaggtacataccactacacctggctaatttttgtattttttggagagatagggttttgacatgtttccaaggctggtctcaagctcctgagttcaagcaatccatctgcttcagcctcccaaaatgctgggattacaggcatgagccaccatgcctggccgtagttttttcataatattcattttccttgaaattttt

SEQ ID NO: 58291 - DNA, 4000 bp, Homo sapiens
tttcttagggacatcagttatattgcattaggaaccatgctgatagccttaacattttaacttgatgacctctataaagaccctgtctccagagaagatcacattctgagttattgggagttaggacttcaacatatgatttttgggaggacacaaatcaatattcagcagtatctttttttttttttgagactgagtcttgccttgttacccaggctggagtgcattggcgcaaacatggctcattggagcagccttcacctcctgggcccaagtgatcctcctgcctcagcttccctagtagctggcactcccatgtcaattaaaattttctgtagagatggaatcttaccgtgttgcttaggctggtcttgaattcttgggccttagcaattctcctgccttggcctcccaaagtgctgggattacagcgtgggccactgcgctcagcccttaacggtgtctttaacagctctccagtagtgtatctagagagcactgcctgcgggatggtggccatgggacccagcttggaggctggccctcaagaatcaccgggttggtggtgggctgttagtggatccccttctccatggggcacaggcaagtctggtttggaaaaggatgatgttgcttcagtgtcagtttgccagtttttcctctgttctccccactctgattctgactagaattaatttggtagcactgagaagagtcatttctactttggcacagtaatcttgcccataatctgactaatttttatttttatttttttgagacagagtcttgctctgtcacccaggctggaatgcagtggtgcaatctcggctcactgcaacctctgtctcctaggttcaagagattcttctgcctcagcctcctgagtagctgggattacaggcatgcaccaccacgcccagctaattttttttttcttttgctatttttagtacagatggggttttgccatgttgtccaggctggtctcgaactcctgacctcaagtgatccgcccgccttggcctcccaaagtgctaggtttaaaggcatgaaccactgccccggccccataatctgccaaattttagttaaaactctgtattccacttagaactaattcaccgtggctgggcacggtggcttctgcctgcaatctcagcattttgggaggctgaggtgggtggatcgcttgaacccaggggtttgagaccagcttgggcaatatagtgagaccgtgtttctttgcgggggggggggggtggggggaagccagcctggccaacatggtgaaacctcatctctactaaaaatacaaaaattagccacgtgtggtggcacacacctgtaatcccagctactcaggaggccttggcatgaggatcccttgaacctgggaggcggaagttgcagtgagccgagatcatgccactgcactccagcctgggttgacggaacgagactctgtcaaaataaaataaataaaataaaatacaatgtaaaataaaataaaatagaatgaattcactgataaagttgacttctctcatctccaagtaaatgatttcattttctcctttgttccttgcatgtatgctgtgatttactgactatcaagaactcattacaccagtacgtatcccaagacaaatcagctccaaagtggagtgagtgcaaggggagagctttaattcaaaactgctttatggaggaagtacaggttttcctctaagctgcactgttatagatctgtagaagttttaaatccatgtaatgctcatcagtttttagtttagtatttagctgtctgtgatgataagtaaataatttacctttttgaaggcctgtgatatactgtgtcttcattgcttcatttaagaggatgcaacatcaggattttcaaaaatacacataacgaagtgttgtgtaatcgtctgtacatggtttctttgataagagagaggcaggaatctgcgtaaagcaggtgtacagacatagtttgcccatgagacagcaagaagagccctgatgtcctaaaggagagccctctcctgaaatgcataacatacatatatatttttttttcctttttttcaaaaaatagagacagggtctcagtatgttgcccaggctgtctcaaactcctggccttaagtgatcctcctgcctcggcctcccaaattattgggattacaggtgtgaaccaccatgcctggtcttgaaatgcatatcttagtcactgttacttcttttaaattgttttaattgtataagataaaaaccaaaacaaacaaaaaaaatgctaccatttcaggagcatacatctagtcttaaaaatatcataaatttgggccgggtgcagtagctcacgcctgtaattccagcactttgggaggccgaggcgggcggatcacgtgaggtcaggagttcgagaccagcctggctaacatggtgaaaccctgtctctactaaaaatatgaaaattagccgggcgtgattgtgggtgcctgtaatcctggctacttgggaggctaaggcaggaaaattgcttaaacccaggagatggaggttgcagtgagctgacacagtgccactgtactccagcttgggcaacagagtgagactttgtctcagaaaaaaaaaaaaaaaaaattataaatcctttttattcccctaacttggatctcaggttaattgggatatgcctaataacaaaatttctgaacatgaggtttactagaaagaattattttttagattatttgtgatatatgtatatatgcatttgatagtagtggatgtgtttattggactcttaagtacttgctatgtactgtgggacatgtaggagtatatgaatatttgtcagctagattataaagcttaaaaacatattattgggcaggagtgggctatggggctgtgactactagtgggcctggggtttctttgtgggttgatgaaaatagagatggttgtgcaactttgtgaatatagtaaaaccatttaattgtatacttatgggtgaattttatgttatgtgagttatatctcagtgatgcttaaaaaatgctgttaatgaatttgcagtgctgaaaagattccaaagttgtgattctctacctttttctgttctccagatctcccaaagcagttgcagtgaaagataaagaacatcaaacactcttatcttctggtggtggggaaatgctgagtggccctgactttgtgcagtgaaagttgtttacacaagcctgagtctataaactcagagataaaaaaaatcacaccaggctgaagccccatcaggcaaaaacctaccagagaaatgggcctgcccgtctgatggaatatctgggatttcctgatgttggtcccttaatttgtggaccattttaggctgtcattaaagtagcagtctaaagtaagagaaaaattctgacatggaataatgtggatgaatcttgaggacattacatgaaataagccagtcactaaaaggacaaatactgtatgattacaattgcatgaagtgcctagagtagccacattcatagagacaaagtagaatggtagtcacagggaaatagggagtcagtgtttaatagtatagtttcttttttttttttttttcagacagagtcttactctgtcgcccaggctggagtgcaatggtgctatcttggctcactacagcctccatcaaccaggttcaagcgattttctcctgcctcaacctcccttgtagctgggactacaggcccacgccaccacgtctggctaatttttgtatttttagtagagttggggtttcgccacgtgggccaggatggtctcgaactcctgacctcaagtgatctgcccacccgcaaagtgctgggattacaggggtgagccaccacgctgggcgatacagagtttcagctggggaaggtgaaaaagttctggagatggatggtagtgatggttccacaatattgtgaatgaactcagtgtcaaa

SEQ ID NO: 58292 - DNA, 830 bp, Homo sapiens
gtagtccttcttggcttcgttttttcctcagatgttctggatgaaacagttccccctgtcacacgtggagataaggatgtggctctaggcagggcatatcctgtgtttaagactgtgttgactcttcttttacagtgtctgccacttgtttcctgcctaggtctttagttttgagtgaagtacagctgtgaagtcctagacttgtaatgctaaggcgttcattatgttaaattcagtttctctttttcttttctctgcttcacatcagccttgtactttagcacgtttccagtccagccttggtagctgggctgctgttctccttgacccgtccctttgcaagcagcagaccacggccagggttgggagtccggctgggccactgaccgcagtgctgaggaaaggtggagcgggaggccctttcctcccagcctcgggcttcctgtgcaagccactgaggaggaaaaggagctggagggtgtgtgaaccctcaggttatacaagcagcacttctatgcaacaaagaaaatgtaaattgctgtaaattaccaaaaaaaaaaaaaaaaaaaaaattgctggcaatctgctttccagggcagatggagggtagcttttatttatacattggtcagctgattgagtaatgtttaaaaaccacctttacttctggcacttcttggcagtatcagttttttttttttaatggatagagaagcttttttattttacagataataactgcatatctttacctgagggagctcaggttcgctctatctagcagcttccacgtgtcatctctgtatgtgcagttggtgcctgcattaagg

SEQ ID NO: 58293 - DNA, 1600 bp, Homo sapiens
tataatttcacagttatagaaaaattaaccaaaagagtataaacaattctcagaccctttactgagatttgttgggacatattcttagaaagtctgagttgtgagcctgtgggattgggccgcacttcttgagtagagcctgggtcatgctacccgagaactcctgggtgcctgtgaggttgggtgtgtcccatctgagaaagttcgctactgaaaaacagtgacgtaaccccacccaggaactgaagtgagcctgagagcagctctccagggcttgctggctggaaacaatgagggaagagtctaggatttatgaaatatttttttgtggaagaactcttcctctgagaaactgctggagggtttggggaatacaaaacaaaactgacttatgaaaagatgacttgtaactcaccaagcagacgctctcaggcgtggcatgatgccctcactggctgccaagaacaataactgacacattatccacagacggctgcgccccatgccatttcctctcctgccatcacaatgaaagaccagggttgacacttggtattgtatctattccacgtccgctgcaccattttcttttaacccttctttcttgctctcacccctttacctgttggagctactatgcccctcctgggtttcgttttcttctcttcctttttcctgggcatacagctgcgttcctagaaattgtggttctgattcataatcattgtatgtggaggaaggggcaggattctactctgtgaggggacgggagggtcttttttaaaggggtaaacaattggaaagtttttagagttaagggtctttctctgatgctaaatgaaaccactgtcctctgttccaaggcctgagcttatatcttctttgctatgagacccagagaaacagtgcttgggggccattttggaagcagcttgtcctttgaccttccccactccacttgtgcagacaccacgccccgtgaggacgggcgtggtgtctgctgctgagcctgactgccccacacttaggcaggtacctggcacatggcagaagctcagcaaatatttgctgaatgatgaggccttggtgtatgattgctacatttttggcttaaaaagtacagcatcagggcccttggggttttacctgcttttctgggatatactttccagctgatctttgtttttttttgtttttgtttttgagacagagtctcgctctgtcgcccaggctggagtgcaatggcgtgatctcggcttactgcgatctccgcctcccggtttcaagcgattctcctacctcagcctcccaagtagctgggactacaggtgcttgccgccatgcccagctaatttttgtatttttaatagagacaaggccaccatgttggccaggctggtctcaaactcctgatctcaggtgatccgcccgcctcggcctcccaaagtgctgggattacaggtgtgagccaccgcgcccagccagtttccttagtttttaatctctgagaaggaaagataattgttacgtaaggatgtctcagttatctatgtgtggatgatccagggaaaatttctctttccagactggcttactcttt

SEQ ID NO: 58294 - DNA, 1003 bp, Homo sapiens
gcagaatttaatccctgaaaacaaaatctttatactttaacgatctctcttaattttatatacacatcagatgaccttcaaatatgcaaagtagtgtaagctctctttatgacccatagccccaaccaaatgatccagtatccacagttcctatttctcatgatccttttcaaactgactcatcttcctgtaaactcacaaggttgcagatttccccaattattggggggaggggagaattaacagaaaatccagatcagatattaagatctctagcaactacagataaagagcataagtacattttctctgtcttgaacccccactttaactgtaagagctaaccccaaacattctcgaacatactatttcctttaagcttggactttgggtaaaagctaaggccaatgtgtgaatgtgggcacatggaatccagccttgacaggtcaccacgaggtatccctccatccaggtctacaaggctggtgtaccagctgctggccatacactttaatgacctgcacgaccctgactctgggtaactaatctctgcacattttgttgccatgtttcacatcagaaaatgaattaagcattaagttgttataattcagaaaagattctaagaaatctgaggaaagattctaagacgaaaaatatcttcagttagatactgataacaaggaatggaaacaaagataccatgacagccacatgacaaacagaattcctgaggaaaaagggaagacgcatcagacagcagcactcttaggacaatttttaaatacatgctcctgggactactgaaaggaagaacaagtgcccatatcatataaatacacaagttcttacccaaatcatgtaaatatgtacatgtgtacttatatgaacatatttacatgatatgggtacttgtttaatgggcagattcacagaaaacaacgtataccaagaaatcctttaacattaattgaaataataaaattaacatgaattatattca

SEQ ID NO: 58295 - DNA, 1950 bp, Homo sapiens
tgctgggattacatgagtgacacaccgcgcccggcccaggcttatttttattgacatcagatacagacattgtatacaggcacaaacgtggaggtggtctaggtccctcataaaggggactggacttgtctgtgatcctctaatccaaaagaaaaacaatcaggccttgagtgctcttagacagcacctgatcctcattggttcaacccatcctccactggtctccacatgtttatcttgagatattaacgtaaactccacagcagtacggtccagactagaagctctgtgtgctgtacgcatgtgcctcaatccagaaaggaaaagagtattgcagtcccttacaccggcataaagggcctcaggtgggaaaaccaaacctacccaaggataagacagccagttcggggaggagggtggtggggaccgggaaagagagcaacaaaccgggtagtcagcccaagagatagaggggcggggcagaaacagaagagttaccatgccgccgagcacttcgtcctggtcgtccgtgaggagcagcaccacgttgggcctccgggttcccgcagccaccccgaagacccccaggcagccgcccagcaccagcagtagcagcgctgggctgcaggagggcaggtggcgggggctgccccgccggagccgacctggggctagaggcaggagccgcatagcggacaggctccggggtgaccccgggacgggacgggacggagggacgcacaggtagctgaagggcgagaggccgaccagccgaaggaataaaaagccgtgccttgaaggccggtggctggagtcagacgttttctccctaggcgcgatcacgtgagccagggacagggggcggagcacgctgcgcggtcacgtgacggccggcgtgggcggggctgcggactggcgcagcctggagggaggcatcaggcagtggcggaaaaggggcggagaaccggagaaaagggcggagaaccggagaaaagggcggagaaccggagaaaagggcggagaaccgggaaaagggcggagaaccgggaaaaggtcaagacctgtacgtacctctcgcgcaggctcgggttgcgttctggtaggacgtacgtgtttctgagcgcttggtggaaagatttaaatggggggaagagaagatgaaaagcaggaaagagttggcaaatactaaccaaccgataaaggaagagaaaggaggactgtacataacagaaattatcatcagctggtgaggaaagtggactctaccatatttaatccccaagtcgacgggcacttattcaaggcccggatgtttaatcgtttttaattttctctacaacttgtgagataaatcttaacattctcatttggctcagacattaaattcggaactggttagctctcttaactccaaagcctaattatgttcttctttcctcagcagacatcgtagtttcaaacaatttagggatgtcctgacagctttatcctaatggttatcctaatggtccttggtgactttttaaacaccctcttggaacatgttggaggatgtgcagatcgaacaaaaatcttgaaacgtggtcatccaactgcattattaagtaatctttagcggggaatagcccttgaaactagctccagatatttctgtggtcgctctggaataattagactttgcccctctcctctcaccgcccaccgtgggcgcggtggctcacgcttgtaatcccagcactttgggaggcgggtggatcacctgaggtcaggagttttagaccagcctggccaacgtggggaaaccccgtctctactaaaatacaaaaattagctgggcgtggtggcaggcgcctgtaatcccagctactcgggaggctgaggcatgagaatcgcttgaacccgggaggcggagcttgcagtgagccactgcactctggcctcagggacaga

SEQ ID NO: 58296 - DNA, 893 bp, Homo sapiens
gtgagaagggctggtattgtgttccgagtatgtcaagaaggagctcctggcctgggcctattgatgggcgtttagaaccctcctgggcattatttctagctggcggctgaataagaggcaagagtcaccctctttttgagttaaatcacgtgcttaattaaaagtgaaggtggcggcggcctcagcgccctccccctccgtgctgctggcttcttcccaacggtgttctggccacgtcctgcgccttctcgcgcacgggagagcgctctgggtagaggccgggcccgggcagcaggtggccccaggtagctcagtggcgtggcagtctccttctcgcccggtccggagcggaggggagcggctcaggtgccggctcgggggaggcccgggcacctcggggatccagagcccgctggcgccgcgcccgggagggcaccaccggcgaggacgaagccgcgcctcctcccggaactggccggcgccgcgaggcgggaggagcagcgggagccgggcagccgcgcgccggggaccatggacgtccttcccaccggcgggggccgcccggggctccggacggagctggaattccgcggcggcggtggcgaggcgaggctggagagtcaggaggaagaaacgattcctgcagctcccccagccccgcgcctccggggagcggcggagcggccgcggcgctcccgggacacgtgggacggcgatgaggacacggagcccggcgaggcgtgcggcggccgcacaagccgcacggcgtccctggtgagcgggctgctcaacgagctgtacagctgcacagaggaggaggaggcggcgggcgggggccgcggggccgagggccgccggcggcgccgcgacagcctcgacagctccaccgaggc

SEQ ID NO: 58297 - DNA, 1737 bp, Homo sapiens
gtatgtttttgatatataattagcagcctggtctaccctgaaataacttagaatatgactagatgaaagaaactgattgagcttgcatacagcatattttagcaacagtttctcctcattttctttaagctctttagcatcttaaagttaagagtttttttttttttttcattttgtcataatttacttgtgtttcttatgacctcgttataaaggggttgatttgtaggaaaactgaatcttagtcacggtaattgggagctactagaaatttttaaaaaatgatctccatttacccacaacctttggttgagcaaagggaaacttggaaaagttgaactttgctgaaactcactcagctggttagtgactcaggagttttttgtttgttttctcttgtcagttatggcaagagaaaactatatatacagccagcagggggagctccttcccttaagcttacgtgagagaagtattatactatttatgttctctgtattgccacaagggtaagacagcctttaagactaaaaatgatacaacatcagatagacaccatatgaaagaaataaagggaacttttgttggaactaccatgtatatgtattgtgaccatttttgtgtttagttatattatgagagaatacttctagaagtggggatattttgcaatttatagtttaaaaagaggcatttacattaaaccattttttagagactatatctttcaaaagcgttattcatttaacagatattctgtgtttactatttcccacacatgattgtaggtgctgggaatatggtaacaagcaatatatcaagattaagacctcacgatttgaagttcttttatacgaagtgtaaatacaagcctaaaagaaatactttttcccccaaaagaattgactctttaatttggtaggacaatcaactgcatttttcctatgtcaacagcaaaatataagatgataatatgacttatactgaatgcttacttttaggaatttcacatatatcttcaagtatcattctcctctgcaaaaaaaaaaaaaaaaaaaaaaaaagactattccagtgttcttaagctttgctgcatattggaatcacttgaaaaatttaaaaaggctattaatgcctggctccccagcccagacattctgcttttactggcatggagtgtgatctaaacattgtgatttttaagctccctgggctattctaatgtgcagaaaagtttgggaactgttggactgtttcctaatagtgacagcttcctgaagacaagctcctttgaatctcttttcttcctgttgtgtcaccttgcacaacatatttgacctagcagtgatcaataaacatccagtgcttggtttcttactaactctgcttagagtttatggtcatcagcataatgactcacttgtgtacatatttaacttatttattccactctttgtcattttcaccttgcaaaaccccaagcctgattaaactcaagtctctgcacattctgtctctgcatctacctagctaactgcagctgcagaaacacatatcatggggacgactctctttaaatatgtgaccaccagcctcacagacacccttggtacaaccagcaatcctatgatatttctttagtctgttcatactctctctctctttccctttttacatcctattttctcccctcgctctcagctggtgatttttgctgtgtattttaacagagaaaat

SEQ ID NO: 58298 - DNA, 797 bp, Homo sapiens
acaaaacaaaaccaaaaaaaaaaccccgaagtactactgacctaatgctatgtaacacagtttacagaaggctttagtgtaacatggagagaagctgtagcatgaaagaaaacaggcaatggctaactactgaatcaaatcctagacaatattgttcttaaatgacctttgactttcttctcctgggaattcctcctgataatcttttcctctaggctctactaatctgttctgttgctcaaccatccttactgttaggaagccagaagccccagagcctagaaggtaaactcacatcactggcctaatccaatttttccctcatggaggagtcagccgtagataaatttgctgcctactagcttcactctgtgccattctgactcacctggatggcatcaggcaggatagaggaggcattctaaacatttctctttgaacaaagttcatttggaatcaagttgtataccaaattttgtaatgcaagtcttagacatatggcaagggaacatctgaaatgttgactcactctatcaaaatgtcaacatcagtaagtagttaatgagatttttatgagatttaatgagtaagtgtaatatagtgcaagatttttaaagcattttaaaaaagtctttggacaattttgttcgaatcatctcaaaagttatcttaacacagatagtgattatgacagctgctccctgcatgggagggaacacaacaatggcacaaaaattattcaaggctgattatactgagtctgcatcattgaacattttctctctatggagagggtc

SEQ ID NO: 58299 - DNA, 2628 bp, Homo sapiens
gagtcttagaatgaagcagacaagctctttcactttcaagtgctgacgtagtaaagtcattaggtttcaaaaaaggaaaaaaagataatatcttacaattaactaatgaatgaacagccattacgctagaagaaaattgtattgtgattggtgtactccgtatcttctcagaatgagagaggtgaggcttctcaaaaagagcagcgagagaaagtcacttaaaaattttttttttttggtaggtcaagctaaagacgaactgaaaatagacaacctgaagtcagacgggaaagctgccaatctagtctggccagcagaatttctttcagtaggtctaggctccctcggcattgggaatccagatgtaaagaaaacttacgccataaacttcaaggtagatttcagttattactgcccggtggcaggaacctaggaaggtgaggtcaaggtgtggtttagtaagagacagctcccgggaacggcacttggaagggcagggcggagaacagctggagatgagatagagagcagggggagaatgcgccgacacctcaaggtgagagagtagaaacagtctccgccgtgggagccgcgcgctgctcaggtggctctttcccgctcaggtgagctcctcccgcgcctcccattggccgagatgcccgcggcgctgggagggcgacgcagcgcggtctagttcagggtctagggcggcgcgtcacttccggtagcgcggagcttgtaaaacaccctggagagaaaatggcggcggcagcagcttcggcgcctcagcagctctcggatgaggagcttttctctcagctccgccgttacggcctgtctcccggaccagtgacggagagcacccgcccggtctacctcaagaagctgaagaagcttcgagaggaagagcagcaacagcaccggtcagggggccgcggcaacaagacgcggaacagtaataacaataacacggcagccgccacggtcgcagccgcgggaccagcggcggcggcggccgcggggatgggggtccggccggtctcgggcgacctctcctacttacggactcctgggggcctgtgccgaatctcggcctctggcccagagagcctcctgggagggcccgggggcgcctccgccgcccccgcggctggcagcaaagtgctgctgggcttcagctcggacgagtcggacgtggaggccagtccccgggaccaggccggcggcggcgggaggaaagaccgggcttcgctccagtaccgcgggctcaaagcgccgccggcgcccctggccgccagcgaggtgactaacagcaactctgcagagcgaaggaagccccactcgtggtggggggccaggaggccggcgggccccgagctgcagaccccgccggggaaagatggagcagtggaggacgaggaaggggagggagaggacggtgaggagagggacccggagaccgaggagccgctctgggcgagccggaccgtgaatggcagccggcttgtcccctacagctgccgggaaaactattcggactcagaggaagaggacgacgacgacgtggcctccagcagacaggtattaaaggacgactccctttcccggcatcggcccagacgaacccatagtaagcctctccccccgctgactgctaaatcggccggcggcaggctggagacttcagttcagggagggggaggactcgcgatgaatgacagggcggcggctgccgggagtctagacaggagccgaaacctcgaagaggcggcggccgcggagcagggaggagggtgtgatcaagtggactccagccccgttcctagataccgtgttaacgctaagaaactgacccctctcctgcccccgccacttactgacatggactcaaccttggattcgtcaacaggctcccttctgaaaaccaataatcatattggcggtggggccttcagtgtggactcccccaggatttattctaacagtctccctcccagtgcggcggtggccgcctctagttcactcaggatcaatcacgccaatcatacgggctccaatcatacctacctgaaaaacacatacaacaaaccgaagctttccgaacccgaagaggaacttctccagcaatttaaacgggaggaggtgtccccaacagggagtttcagtgcccactacttgtcgatgtttctcttaactgctgcctgcttatttttcctaatactgggactgacttacctaggaatgagagggacaggagtatctgaggatggagaactcagcagtaagtattaaatcctgtgggtaaggtaacaaagagaatgttgttagtggtccgctttagccgcgcttagcgttttacatgaagtgacttacctgcaagaatatggtttaacagcaaaaacgcaacagtgcgtgcatgtgtcatctttcttaaagaacaccattatcgaaatgatgtcatatggctggttttaaaagttttctgcatgatgtattgtgaaattcaaaacaatttttaaaagaatattataagcttgttagtaaaactcatttgtatatgtgacaattctcttttagccctgaaagactatttgcgcagatgccagttacttaacaaatttgaagtat

SEQ ID NO: 58300 - DNA, 756 bp, Homo sapiens
tatgtctgtgagaaaacggaaagatagagggaataaggttacaagtgatttgtccaaggtcccacagctactaggtgttggagccagcatttgaacccaagatctaactttagagttcacagtattaactaccaggcagcagtagaatttttttatactttatcttatcgttagctacaggctttatttgggcaagcaagataaacacaacctctgggccttgctttttgtgtctgttaaatgagggtatagtaaaatcaactttacttccagccagtgatttttgtagggaactgctgtgataatgtctgtagaaatgctttggagaaatttggagtgatatataactgtaattttaatattataagataggacttaacagctatagtagtttaagcaacacatgttcagcattatgacatgtcctgtcagtaatgttaataagtaatagagttggctaaatttatagtccttatcagtatttaaacctttcaagctgtctgagcagataaaagggagttatcttttcacgttacataattagtgccttccttatctccaggactgaaaaataatgtggtttttttttgcagctatattaaacaggtgatgacacaacttgaaactggattgtagccttgctgatcactaaaaggtagatttgctgataggaaagtcagtgtaaatgggttacattgctttaatccaaaatgtagtactgaatttgagacggaaaaacattttttaagaatgagg

SEQ ID NO: 58301 - DNA, 1182 bp, Homo sapiens
gtgggcaggattttagtaattgaaactgggaggtcattttattttcacttattgactccctgtcacattttctcaaatagctgcattccaaattttcactaatcttttctttaaaaaaatcctctctctacattttttgagaagattgatgccaactgacacgaactattgtaaatgtctatcttactactggaaatttttgtgtcccttcatctttatcaaacaatcagaacaggcactgactaacagcagctagtggcgcctgctgaatatcaggccagatgtgtgatctcagattcatcacctgtaaaatggggtaaataacaccaaacaggtgtaaaaactaaatgcagaaaaatgcctcgaatatgccaggtattcaacaaatgttaaatacaagtggcctgtccaagttttgggaacatatcatactatcacagcagcctaaaaaatccttacaatgtgagaaagtacaggctttattagacagggtctgtctgttaacagtggatattagtgtgatgagtcacagctccagctgtgttgctacatttcaaatggaactctgctgcaagactgttcacacatgctacatttcacatgagcctcctgtgcaattttattctaggctaccagaaaatttaagccatttttcagctctttaagaacataagccctttcactgagaaaattccagtccagtgccacacacagttcactcaactgtgctacttcatgcatgctattctgttcaccactaaaagagactttcaacatgaacttttccctctgtgatgcaattttgtgtgtgtgtgtggcgggggaggatgtaagagcacagtgagaagataagagttttcccgttttcctctctactcaaatcccgtctcctcaacccttttaaaactctccttacgatatttaacaaccatttcagtcactgtggaattctgttatggagagtaacatgaatttaacttaagctttcttttgtggaactctagctggaaattgctcataattccagaaaatgtttcttaacctctaacgaagtacatttaacttgaattttaaaagatttgaattgcctctcaccttattcaaaatcctttaacgaagaaagctttccagtataaagaaactgttctgaaataaactagagttctgagtggtggcttactt

SEQ ID NO: 58302 - DNA, 1343 bp, Homo sapiens
tgctgatttaacttccatctggattttatgggtgtttcaatttttccattccctcttttttcaatattgaatattttcattctttatgatatctggcgtgttgtatttgaaacctagtttgtcatttatgttttaattgcattatttaattattgagtttaaattttataatgtaattattcaactttttttatttcatgtattgccagtttatgtcatttgtgtatttttctattggggtatttatgtactttattgctttgtaagattgctttatatattaaggatattagatcatcttattttatctggttgatatgtttttagatttatttatgttgttttctgtttggcaccagatcaatgcttgttggcattttgttagggaaatggttaggagcatggactttgtattcaaactctagcacaggccaggtgtggtggctcatgcctataattccagcactttgggaggccgaggcaggcggatcacttgaggccagcctggacaacagagtgaaaccctgtctctacaaaaaaatacaaaaaattagctgagtgtcgtggcatgcacctatagtcacagctacttggggggctgaggtgggaggcttgctggagcctaggaggttgaggctgcagtgagctaagatcgctccactacactccagcctgggtgacagagtgagactctgtctcaaaaaagaaaccccagctcagcaacttgctcattgtgtaatcttgggaaattgcttaataacttttagctcttgctaaaactgatataaaacaatagtgccaacttcatggggttgttgagagagattacttaaaaggtttagcataatatctgtcataatttagtaaacactcaatcatttctggctgttactgtttgtatatttttaaacagtgaccaaagcagaaataaagggaatgatgtgaaattaatgaatatgtaagttatatttgctgccctctctggccttttcacatgtacctttccctctgtgaaactaccccacccccacccttttatggggtagcgtatttgatatataatcttattctcattttgtttaatgtcttgggaatgtgttgaatactctttgtgtaggttttcatttaggtatacttttcaaatatgtaaataaagctcagtaaatagaggcctgttttcagattcagtgtatactttaactaagtttcttttcctacttatataacagtggcaattattgaagtgggacatacatcaagtgaataaacgggtgtttccagctctgaatatgccatgaagaccttacttatttttttgattagtgacatttttctcttccaaa

SEQ ID NO: 58303 - DNA, 393 bp, Homo sapiens
gaagtgttatgaacacaagccaatgagaaacagctccagcattcagagcagaaggggaactgagggttgggggcaggcagaatgaggtctctactgtggacacgtgtggtttcttgcagcccaagatgtgttggctgtcattctggtaactgtgttctgactcatctgtggaatttaacccatgccatctgaatgaggtgatccacctccccagctctggtcagtgcctggggagtcagtgcctgtgatcccgtttgtcacagtgattggtgcagggagggctgaggatgtaccagggccagtgaggagcaaggagactttggctggggcttgagacaggcattcatctcctcagacctgaagttaggaagaggtaaatgctgaggacattgt

SEQ ID NO: 58304 - DNA, 1188 bp, Homo sapiens
ggctacaacttatatatgtcttgcagatatgattaactcaagttatatgcaaatctctttctatgtataccaaacaatatataggagcccagaaagaataagcttggcagtgagtttcctagaaagaaccacagaaagagttgattgccagtactggtggatattgattcagacactgactcaggttgtatgccctggtaggagggcctggccttttccctgggcctctggccataacctccttcggatcttaaaaagacactaagcattgcttgtcatcatgaatgagaaatatcgcctggttatccagagggagaccaactggtggatcctttagccgtgacatgaggatatggctccagctggagtctctcctcctgcttctgtacttagctcatcctggtttaaccaaaacccaaaacaaccctctccaagggctcttccctggctcagggacactccattttaagaaacgctcaccgcgcctagtactttgcatggtacattataagcactcagtaaatatttgttacttcgtggcaaaatagatcaattcagcagtgatttttcacttttcaaaaggattcactgcagggttcctttaaatggccggctcccctggtgcatttaaaatgcgatttgatttataggaattcgatgtacatggttctgcagggccacatcaatcgtgtaaagtgagccgcatgtgctcccactgacgagcgcgttggcagctctcctccatcggcttggaatgcacacaagcctcgggtctgctctccccgcttttatcacaaaggggctcattttgtgaatgaacagccactgccaacagcgtgatggtattttcagtgacctttgcccggggattggattcccgcccagcagggagacaaggccttaggaaaaggttagttcattgacggccagggcctgctgggctgaggtctggggagggaaaggctcagagaactttcccttttttgtgaatcacctaaagaacccacccttcccgcctggcctgtgccgctttctctctttgtctcggcatattggattctgttcagcagggtggttttatagctcctgctgctcctgctcctgatttttttttttttttgtaactgtgaataatagtcctagttttgccttgctgtttcccaatagcaattctggggtcctcgtgag

SEQ ID NO: 58305 - DNA, 578 bp, Homo sapiens
tttcttcccttcttcctcttccaaaaaaaaatggtagtgtctgcttccaacttctcaagcatgtggaaaaagaccttgagctccatcagtgagtaagaccagataaacagcagtgcagtgttagtgtcatctttgtcagactcatgaaagagcctccttaaacaataaattatcatcaacattccagggtatagttgcttaatatgtgtactagccacgtctctgatacctcttctttccggggtttaccctttggctatttcactatttgttagcatttatgtacacaattggttgtgcaattctactctttcagctgctgttagttcttgtggtgatgaaaggtaaaacagagggtgcaataagattcaggaataatctgtggacttttattttttagtgtgatctatctcacagaaaattgacatgtttgtttttattttatggaaaactaactttactctcaaaatgttcctttaccgtgttttttggtgaaaaacatttttaaatagtctccacaattgttgaatggctacttttctgatgaatttcttaagcagtaagagaagtccctacag

SEQ ID NO: 58306 - DNA, 1642 bp, Homo sapiens
agcattcactgcctttcttcgagttctttaaagacctcctccctcatatatattcaagatctacaaggtcatttgtgatctgtcccctgcctccttcaactctatttcatttcattctccatccccatccccgcaggcaccaactacgtctgtaaagagtccaaactatctctacgtcagtgccttcatatttgctgtccctatgcctggcaactgctcttctcaaggcttgctccttcattcgctacctcagaaaggactcctctgacctccgtaagctcccttccctgcttattaagtgttacaacctgaaaccattgttttctgtcacgccccccgaccctctccccagactgtagactccacgaaggtagagggaaaggtcttgttcactgctgaatcgcacactttttgcatacttgttgaacgaaccactaacattttttgaacgccggcaatcacagtcattccgctcccttgtctacataactcaacccttgcgaggggctaggaaagcgggcggcaaacaaccttgagggccgaagttaacttcagcgggagtgaacgacaggggtgggctccactttatccagtgcactcggaagccggagggcccccaccaaaaagagcaaggggaaccctcgccctcaacaaggcctgcatctccggactggagctcaagtatagcccagcgagtgtcaagaaacgaaattctccaagggtggcggaatcaagccccaagtcccatgtgtcactggaccggtgaggaaccgaactcacctgagaaacgaacacccacacctcacgctcacgccgaccggaagtctttgcacttccgtcttccgggcggaggccacccggggcggacgcattgcacgccgggagacaaaatgtctcaagaagccttgagaggcgggattttggaacccgggcgctgacgagcttccgccattggtgtgatcgcggacctagaaacttggtccgtcccatacaggtgtagaagtcggatttggagaatgctgacgggtgtccggtcaaggttaggccccaggtaggtccgctttccggacgtgggcagggtagccccgagactaacctatggagtgaacctggccaggggaccctacttgtcagatagggagctccgagccgacctttagatctgacctcagcgtttacatgatactcatgtatttccttagatcaagtcagcctagatcaggtgttcttccagaggccgtattgagatcatttttatttgcagcctgtgcattttctcatctcgggtgatggcctcacagatgtacacatatgtaaaaccgtatcaaactgcacactttaaatatgtgcaacttattgcatgtcagttatactcaaagcggttaccaaaaacagaaaacaagcttttcctaccccagagaagaatttaaagggtaaaatgatcaaaggatttcagttctatcaatgtttacctgtctgatcacttacgtatcagacacaatgctaagcctaggacgattgtcttagctcacgaataacacttactgtacaactatttctactggcataggctttggaaccatataggtctgtgttgtactcttgcttccaacacttgtgaacgatatgggtgagtaattaa

SEQ ID NO: 58307 - DNA, 597 bp, Homo sapiens
ggaagtagaacaaaactttcatcatatatgccacacaaatatgtatgaaacatccttccaaagaaggaaaagaaaatagaaaatgttacctctccctaaatcaaactccattctaatgaaactatttaagcagctcgcgcaattgtcagtgttggctgaccaactatattttatctcaatagagacttctggtgttctggattaccagaataaaaggggtgggggaggaaagaaagtttagcaagagcagagttttgtaaatagtgttgtaacaggaaaaagaaaacggttgggtgactgtgccaacaggaagccactgtgagcttagaaaagagtctatgcattcctaccaggtgagggcaatgctgtaccataatcctaatataaaaaggatcattccgtatatttgtttgaggaaggatacaggttaatctagatggatcaaaaggtcttaaagttcatgcagaccctttcaatacctgtactaattacagcgcttcttccaagaagacgtggatggtcttggtaacatttatgctaagacaaagactgaagtaatttcagtaaattccataatgttaataaagcatacaagct

SEQ ID NO: 58308 - DNA, 1886 bp, Homo sapiens
tcactctgaaccttattctggttccgggacctgcccaattcgcaaatcattctgtgctcaaactccgttagatttaatgtgtctaaagtttttcttttaacagtgcacaaccatgtgaataacttaacactactgaactatacacttaaaaatagttaagacggtaaattttatgttacctgtattttaccacaattaattttttttaaaaaaaagctgagttcactggccaaaataatttcaaaattcaattccaaaaatataaatgctaggcaccaagattcttggtgcatcagaactatcttcatctttccttttccagaacaagttctaggcactaagattcttagcacatcagaactatcttcatctttccttttccagaacaagttccagctgcctaaacaggctgaaagtctggggctgtttcggcgatcaaatgaccaaactagagcaggcaatggcttccacgtagatgaagctgagcattttaaattcaaaaatttctgcccattggctactacgtaataacttaaaacacaatttagactgacttaggaagcttctgtgttgagcaacttcctcaataatcctcaaagacctgttgcattctgggccctgcggagaggaaatagtgccgtcagggagcttccagcctagcacaggacggtaaatataagcctgtaacgcgaaaccccacagaacaaaaacatcaggccgtggattccactcgtgtgtacgtcagtcacagtgatcaaccgactcatttccacgacgtttcttttcacttcaagatgccaaattcaggctgcggcggtttccatctgtcccttcctacaccgcggcgcccgctggggagccggggcgcacacaggacagccgcaagccttctgggcctggcgccctcccacacccgctaggaggggaggaagcgcctccccgactccctgaggagggcgccagtcctctggtacccggagaaggagggccgggagctcagtgagcactccctgtgagtcccaggagatggccgctctccctcggaagccggaagtcggcttctagaggccgagcagtgcagacaagcggctgggaggcactggagaggggacaacgtacccattcggatgtgcacggtggcggaggccacgctgctgccatagttgaagtcgtcctcgatcgaggagcgagggtaccgggggtcggggtcagccatgatggcaacagcacccctaccggtcccggtccactaaccgcaaccgcctcctccccacttccgcgaggaagagcccagccccagcaagccgtgcggcgtcggcgggcgaacaccgagcgagtcgattttctcgcttcaaaaattccagctgggcggagaaagcggggatggctccgagttagaatggaagagaaaacggtttacattcccggcgtcatctgaagtgaaacttttctcaacacacttttttttttttttttgagatggagtttcactcttgttgcccaggctggagtgcaatggcacgatctcggctcaccgcaacctccgcctcccgggttcaagcggttctcctgcctcagcctcccgaatagctgagattacaggcgcctgccaccacgccaggctaatttttttatatttttagcagagacgaggtttcaccatgttagccaggatggtctcgatctgctgacctcgtgatccgcccgcctcggcctcccaaagtgctgagattacaggcgtgagccaccgcgcccagcctgaacacactttaagtcctttcaccttggagagttgctaaagtgatagaacccatgtcccagtcacccatccactcaacaaatacccatctcattcatccactttttcaataatcacaccgaggatg

SEQ ID NO: 58309 - DNA, 1271 bp, Homo sapiens
ctgggctgcaaagagacacttttgccccactgtcagcaggtagcagcccagcttaaataagtttgggagaccagggtgtactcacagaggaaaggataaaaataactttgaatgttatctaatccagtggtgtccaaacctagctgagcatcaaaatggacagcccggaatgtacattaaaaagacagaattctaggtccctgccctagatccgattccagaagggcatctgctatactttcgttttgggaaggttggggtgggggttgcttttccaggttcttcaagctcagcagaagtggactttctccccgttctctctccgcaggagatgccgtgcactggcggttctgcaggtgccacgcctgtcactccccagcgctgatttcgtcccagcaccttcctgataatcaccgcccagcaccaggctccaaaaggagcggaagccccgcccatctcccagcccctcgctctcccttccccgcccctaacccgccttgccccgccccttccacatgccctcccctcggcaattcctggaaacttggggcggagcttcgctgcctttcaggttttatgtacgctggcggccgccaggccgttcccggaagttgatggccttacagtcgtagaactgattggctgatcatgaccatgcagttagccagggttttcccgagttgtttgggttgagttcaggagaagcatggccaggtcgagtccgtacctgcgccaacttcagggacctctgctcccacccagggatctggtggaggaggacgacgactacctaaacgacgacgtggaggaggatgaagagtccgtgttcatcgacgccgaggagctctgcagtgggggcgtaaaggctggcagcctccccgggtgcctccgcggtgaggaaggcgtctgcccgggggatggggttggagggtccaaagtagcgcttcccattctggctttgccctgagcaaggcacccagtcgtgctaacagatttagcttatcagtggtctagctgcttcatcctaccaagggtaaaattatgactataataatagcagtgactttaactggacacatactatgtggtttttttttttttttctttttttgagcagcagcaagatttattgcaaagagcgaaagaacaaagcttctacagtgtggaaggggacccgagcgggttgccctttttttttttttttttttttaaaattattctcattttaatggtcgtcctttaatttaatgtacctttaatgtaaggtagtt

SEQ ID NO: 58310 - DNA, 2824 bp, Homo sapiens
aaacacatattatgaggctaaaccaagtttcatctgttttattaactcctattgcctgactttgaagtactcagtaatagttgatgaatacagaaaacaatggtaaaggtcaggtagatttgatcggatttgagttatgtgttagtagagagctatttaaaggtttgttgttgtttttaacaggagtatcaagtgagattgatttttcatctcttcaccaggctctctgttcttttagaaaggcctgtcagctagctccatccctaacactttcagggatgttgacccctagctggcaaaacttgtgtttaaaatcccaaatattaagcagatgaaaaacttggatactaaatactttcataactcatctccacgaatttgtacgtctgagggagcaatacacagctgcaggtccatcaaggccacaaaagctaactacagagatagtcttttagctattttgaaatcagtagggcctgactacagccatctgtcgcatacccattactcttactaaggtcctgctggcgtcagagaggtggttctacgatgcacggtaggagtgtgtctggccagagaagtggggaggctcagctgccttgggaggtgcaagtagtagcgctaggaagctgctgctaggcctctggcaagaacaccaactgatccgcaatgcgcctggccaaactgcagcagcctgctctgcaaatactgcataacagaaaaagcctgtattggagaatataagaatccgcggcagaaacggagtgcgcgacgattctaaggtttttacccagcacggctcccccatcagactgcaaatcccagcattcactccttccacgggagccaatgaggaagctactagttcccgcagccaatcacattctgagccagtgtatcacccgactgaattctgggatttgtggtttttacgtggcaacattacaccacggtggctacggcaatgcaggccacgcgtctgatcccaaacgacacctccctgttataaattcttatgttggttccgcaagctaactccttaactgtcgttactcccaggcttcctccttctcaaagctcgtaatctttttctcttaatgtcattaaacaatcaagttattttcagattaaggcccacttgctccactcgtcccctgtcccttaaccgtcgctttagagtctcgcgagaacagccccttttttttgtgttgtcatgcctccaaaaggcgggtcacatgaaaactgacacaggcttcagccaaccgaattgttttttaactctcttctccacagcgtgcgtggggaggcctccgtgaactctgaccttagctttccgtagcgcccgcgtctgccgcccccgcccccggagcgaaggaggcgggctttggccttttgccctagggagcgagtgcggagcgagtgggagcgagacggccctgagtggaagtgtctggctccccgtagaggcccttctgtacgccccgccgcccatgagctcgttctcacgcgaacagcgccgtcgttaggctggctctgtagcctcggcttaccccgggacaggcccacgcctcgccagggagggggcagcccgtcgaggcgcctccctagtcagcgtcggcgtcgcgctgcgaccctggaagcgggagccgccgcgagcgagaggaggagctccagtggcggcggcggcggcggcagcggcagcgggcagcagctccagcagcgccagcaggcgggatcgaggccgtcaacatggcgagcgcctcgtaccacatttccaatttgctggaaaaaatgacatccagcgacaaggactttaggtgaggccgagatccgaccctcaccccacctcggggttctcgcagccgcggccctggccgtcacgcaggccttgccccaccccttcggccgtagccggtagcttctctgccccgaagtctccagcccaccggtccgctggcctcccgatccctgcggagcccctttcctctcccctcttgcaaccccctccccccattctttctcctaggcagttgcccgccgcggtctctaggccccgtttgcttgtctcagcgcccccacatccttccctgccccaccaggaggcgattcttgcgtctcaggtagcgcgaaggggctaaaccacccaccattgtggagaagggagttgctctaggccgggagaccgggcgccgggcctattcgcttgccatcctgcggcgctaggccgccttgctcgctggggcccaagctgctgcccactcggggacccggcagcctcctctctgcccgcaggtgcgcgtgggccttgctgcattcaggtggaatgatgaacttttgcgctcttggctgatacatagttcttttgtggattattaattttcgtgaaggtgggaagaagggggaggggagccaggatggaggaaacttcgctcatagggttttcccgccagcatcactgtcagttcctcttgtcaggtaaaaccaacttaggaactcggggtttcagtctcatgtcctcatatccaaaatcactgccaaaggggtggattgctggatcttaatcatagcagacggatcttcaaaaggaagagatgtttaatacggacctggtgaatatgaagctttattacagcagttctgttcaggagatcggtactgttggttccaaagtgttgtaatatgcatagtgaagatttgttatatttttacaggttatctttgtttttatttttccttgcacgcttcggtgattgttgcattctttcccgcctcccatctcttcacaaataagttctcaatctaaaaaaaaaaaaaaaaagaaaaa

SEQ ID NO: 58311 - DNA, 1051 bp, Homo sapiens
gaaggttgatggcagtaactttcttgattttactttgatgtttttttcttgatatatactatgctaactggttatcagcagtgattagggctcaccactgagaaagaggaggaagggacctcacagagaaaactgggaagaaagattagtaaaaattagatttctttacatgaacaatattaagactattccaatttaggtcttgtgtggtggctcacgactgtaattccagcactttgggaggccaaggcaggcagatcatctgaggtcaggagttcatgaccagcctggacaacatggtgaaaccccatctctactaaaaatacaaaaattagccgggcatggtggtgcatacctgtaatcccagctactcgcgaggctgaggcagcagaattgcttgaacctgcgaggcagaggttgcgtgagcagagattgcaccactgcactgtggcctgggtgacagagggagactgtctcaaaaagaaaaaaaaaaaaactgttccaacttaattcatagcactctaaggaataactgaggaaaagtgaaatagcagtggtgtatgtgcaggatctctgaaaggtaattggtgtactgagtgataaaattgaccatatcaactagatttctggttggaagcaagagtaaaattgtgtttatgtatgatgggagaggctgtggtgagagttattgtgagtgcaaggtatctatcgatctagtgcatacctagtgtaagttccagactgtgttactcatcactgtgtttgcagagtagagttccttatgttggtgccctcaaaatacttgttgaataaaggaatgagatggcactgcctacaggtcatatcaacctgggaattccattgaagtctgaaacgtaaacatttatctttttcttttcccgtcttaatgccttctttatccttattttggcctgttaaattaccatccactgaaagtcacaagcagaaaatctttgatatcacccttctcccgtctgtcttctttagtctcctgatgagtatttctcaaattaatcttgctgtctcaggc

SEQ ID NO: 58312 - DNA, 925 bp, Homo sapiens
ctcagagtcatgagattgtataaacaaattcatgttcacaatattaggcaagaggtaaatactgtactgtctttcagaagaaggattaaactgaatgagtagtaaatagaaagacctttaagtcctatataaactttgccaactttgccatctgggaacagatactcagctccttagcattcttgaaacctctgtctaggaactgaatcattcatttccataatttcagagctagaagagatcaagaggtcatctggtccaatcccccttttcaacgtatgaggaaatcaaaccacggagattaggtacctttcccagagcagggctaagacttgctaccaccatccattgctcttttcactatattaaaatttcttctctttcctggaaaaagttcaagactccagctgactctgatgcctgtttgagcaaatagttagggtgccaaaagtccaatgtcctactcagagctcttttggaataatcttcttaaattcaactggatatctgctttctttgaaattctgattagtcgagggtgtttgattctgataacccactagggaggaaattatgctctgaggtccagcagctgccagaagcaagctgtcagctgaataccagctctctttctctccattttatcagcaaaacagctgtgaacaaaggcagggaggatagagctgggtgaggaaacacaacatcaccgaaagctggcatgagctctgttgctgggagggcaatgaaattttatgatgttgcttaattagagtcaaatataaacatcaaacaaaacgaaatacccaagatgtgtgacaataggtcacagatatgggttaccaaagacaaagcattcctttgtacccttaaaacatcattgttcactactcattttatacctattatgccattgaaatgtgatctg

SEQ ID NO: 58313 - DNA, 884 bp, Homo sapiens
tggaaatgataagagtagagcttctggacagtagggaccctttcttattcatatgtgtacctacagaaactatcagtgaatgtttacacaataaattaatgcgggaataaatgaatgaacatgtgatggaaggcaggaggaaaagggacaagtctctttcacagaccatttagccaactcctaacattactggaaataataaagttccttgcgtaaccccaggctgggactttccagcctcccctatctcagccacaattctattacagaataagttatttacaggcagagagagagagaggcagagacagagagacagagagagaatgagagagagacagagagacagagtgtgtgagcagaagctaacactcaaaggaggaaggtcagatgcagcctgtattctgagagaaggattcatctccccacagcattttcaactggggaattctcagaggatcaaagagagactctgtccacactgccacccatcccatctgcagcctacagattgctcccctcccacccatttttagcttcccaaggaaggatgattcacttaaacagacttttatgtgtactttatttttagtccagaaagtatttgttttcaatgtttgtgtatgggaatgtgagttcagatcagctgatgtggcagtgggcatgagtaacttagcaagcaaaaccgcacagcttattatgatctccaaggcccatgtcagttccaaactgctatgctcatagtacttactgggtgacagtcaattgtagtggtccctattctgctctcattctcatatacaggatatggatgtgctgtgtagccagcctgatcccttaaaaaggaagacttttcttacttcgtttcttctttgcctccttcc

SEQ ID NO: 58314 - DNA, 661 bp, Homo sapiens
ttcataaaatccatcaggtaagatgatctttggcaaagaaaaactaggatccttctgagtggtgcactggagccagctaaattggtcatggtaggagtatttataccatggaaactggccaacacacaaatcagttttggttttgcttttgttttccccaagagtgcctgttgttaaacatttgtcagcacactattgaaccctccttgagtgaagcaactaggaatcattgaaaacatccacaatttaatttcttccagagacaccaaactatttctatgcctcctcccaatcccctcaagtcctaaaacctatttcattgtcgagattatcagcacatcaaaacatgtattgtaagtcacatcattacatttgcaaggagataaagaaattaaaaagcataagcataaagacaggtcctatgactcttgttgcccagccctggtgaagactaagaagctgataactagtgacaactctccattttaacagcctgtttcccacaggtgaaagggacccatcataggcctgcagtgattctgatgactcacaggaaagcagtccagcttgtttggccagttcttgggttattggacagtcatgaatagctttggagctactaaagtctcctctggtgccctgaagcttcattacttccatg

SEQ ID NO: 58315 - DNA, 3419 bp, Homo sapiens
taatactagggaaaattctttttgtcacaggttccctctcccagtgaccctaacttggaggcctctttaggagtcccagagactctgagagggtcacactgtaccttgaaacagtttttggcgtttgtataaagctgcggatgcgctctgtaggaggttgctatgacaatttgcaaacagtagagtggatgaaactccgcaggaggtggctcccttccgactggagtctgcactagttcgggcctgcacagtaggtccagccaggagccagagatactcgggcggggcagagcataatggacccctggccccaagagaacttcagaaactaggcacctctcgagaaggaagtgcatggcataactctgccccgtcatccgggatttgtcgggctttcccaccccacctcctctcacagttgaagtggcaaaacctgtgacctttgaacagaggcgcactgtgtgccacgcacgacgaggcgcggatgtgagacgggaaagcaatttttttttggtcttcaaggaaaagagaggttgtatatggcgaataaaaaaggcagggaaattctccacgtgtcttggaagggaagggggaaagagatgtgtcgggtggggtgagaggaattcgaggtgtcgctccctcaccgcagagctgaaaggaaggtgtgtctctcccagtggccgcgcaggggaaaggctcggagttgtaaggaaataggagatgtctctgatgtttatttttgcctagcaacccacagccaactgcttccccagctgccgtccacacgcgcctctctgcctccccttgtcctagcgactggcgagcggtcacttggtgtcagtaaaccggggagggtgtgtggtggaggtgggagggcagccccctctttcgcccctgctcagggtcaacgagctcagcggccgcccctcccgggacttgcctctccgaggtgaccctcgcacaactaagttatctacatgatgaattggggagaggggagtggctaagtcgctgggaccaagaatggggggacggggaagcagtactgtctgtgagcagccattcagttcgaagagctgaaaatgcatttatgtttaggggtgcgcatggcaggggaggggtctctgcggcgctttcggccggagggcagcagcggtaggttgagctgtagggcagagaaggggcgccgcggggccggggaggggaaaaggtcgccggagtggagccgagggaagcagtgcagatggccggagggggcggaggagggcgagcggaggccgccgagttttccggggagcggaggggcggctgcgcgcaaaccgggggactgagaggagccgggcgggaggttgggtgggggtggggtgtgcgtggccgcggccgggggagccgggggcggggcctgcggcggcggaggagggcggcggagggcggcgggggcggggccgcgcgccggcgcctgtgtgtgagtgcgcgggggcgcgcgcgcgcgggcccgggagaggctcccgagccaggcggtcttcggtcctcgcagcgcttccagctccccgcgcccctatgtgagggagacggggaggcccgcggcgcgcaggggagggcgaggcatgtgcacgggccggagggtgctgcagccgcccgaggaagaggaggacggcggcgaggaggagagcggggggctcgcggcggcgggccccggccgaggggatgcagtggactgtgtgtgtctggctgtagcagacgcgaggcggcgacgaggcgccggggacccgcgcgaggggcggccgggaggcggcggcggcggccgccagaagtagcagcaggaccggcggcggcgacggcagccctgaaatgcattttcctctccagcggccatgttaaccaggaaaccttcggccgccgctcccgccgcctacccgaccggtaaggaggccgtgccgccgcgccgcatccccggacccccgccggccctgggcagcccctgtggcgcgggcggccgctgcctgcgggacctcgaacaaagtcggcggcgcggcgcgggggagcccccgggcggacgacgcgccccgggctccatgcagggttgtgcgcggccccgaaggcccctccgcggggagccctcggcccgaagaggcttctgcctgccgggggcccgggcggggaccgtccaggcctgccgccccgccctgcgctgcccggggcttggcgtggccgtggctccctgctcagctgtccaaacccacctcccggctgctggccgtctgcaacgtgggccgcctagccccggcgcggcccggctcccccgccgggtcgcgaactcgcgcgccagggccccacttaactttgcagctgcccgcgccccgcccgtgggtgtgcgctggggagccgtgacccgaacgcccgtttttactgccccggtctcttcctccgtctttctttggaagagggttgtcgctgcccagcggggttggagggggggtctgggtgactttctcccccctgaccctcttttgtctcctcccgcacgtggcttccaggccgaggtggggacagcgccgttcgtcagcttcaggcttccccggggctcggtgcaggggccacccggagcggagtggggactggcccgccctcccccatcgccctgccgcctctccgggccagcaacgctgccgccgcagcccacacggtgagacccagcccgcgggcggcccgggcggtgggggcgggaggggccccaggccgaagcacccggacttggaggggtctgacgccgggagaagaggggtcgagatacaagcagccccacgcctcgggccgatggtctctcgtcgacgccgccctggttaagttgggcgagcccaaagctgcagccacaaaggaagattcgtggcgtgggccccttacttcccctccagagctcgcccacccatgacctcctcttcctaggaacttcctccttgctgctttccttctttcctcatttttcgtccttgcatcccagagttcccttccctgacccggtaaacatctctgtccttcccccacctccccgtgggtagtgggtatttatagaaacagatacgtgttaggggacagccagaccggcctgcccggaaaatcgatcccccaaagagcctcccaggcctggctccagccagcagggagcatcgccaattgtcccccgcgtgtgtaagcatgttttatgagtgctacaggtttgagcacagcagaaattgtaatcaacattaacaaaaataagggccgccgcagcagtcaaaacaagccacccctgtaggattctgcagttggacattattcaaaaggaaagggcaagcgttgctttggaggtgggaaagaaaaagcacctaacaggtgctgtggtctctgggaggggagaggccagcgtgggactggttgct

SEQ ID NO: 58316 - DNA, 670 bp, Homo sapiens
ggtgtgggcatttatcagacacccaccttatgcaatgcactttccgtgggtttcgattaactccccacatgactgggagaggagagtgtggtattctcttctttacagaagcaagtcttgaacccaggatcatttgcatccaaatcacacactattttcacaaaacatcattgctgttgggtgcctcagctggaacctgtgaaaaacagacgggactccctggtgactcagaatgagaggagggaaggaggacactgtgtagtcagcatatggccatgggtaaacttcctcctttctgttcacagtcctaggaggcagactttgaccctcataaaggcacagctgtccacaatctttgcccggcctctagttctccagacaaacccagcatagaccagattcagggtgtgctgtgggagccagggagaggtgctcccgtttcaaaatggtagtgtttgctctatgttactttaagtttaaaaagtgatttctcttttggagacgagagtggcagtttaaagaagacagaataattatgtaggcaagaatgtgaaaggaaggaccaaatcacagtgtggaaaataaaaccagagtgacatttgctgcttagagagtgtagtgtagacagcatggacagataggctcaaattcaggctccaccttgaagtgg

SEQ ID NO: 58317 - DNA, 648 bp, Homo sapiens
ggaccctcctttttcctttgcttcatttagcacagggggtggcaaactatggcccattggcccgaccacagtctgtgggataagaatggtatttatatttttgaatggttcaaatagtttaaaaaagaataacattttgtgacacaaaaattatatgaagctaacatttcagagtctataaataaagttttatttgaacacagccttgcctgttcatttacacattgtctatggctgtcttcacactccagtgacaaagttaaatagttgcaacataacctgcaaggcctgaaaagcctaaaatagttattattggcactttacagagaaagtttgccaacctcggatctagtatgatgtgacatcttagttttggaattcagaagttgaattctggaatttgagagctgaaagactatttagaatgcctcttgtcaacatccctgacacatacctggctaaagtcagcagtcttattttttgtacagctgttctattcttagaaatatttacttaaaagggaatcctctgatgttcatttatttgtcctagttttactctcagcatggccaggggttggcaaataataggtgctttaaactatttaattatttgccgagcacagtggctcacacctgtagtcccagc

SEQ ID NO: 58318 - DNA, 2960 bp, Homo sapiens
gagtaactgggattacaagtatgtgccaccatgtccagctaattttttaaaagattgtgtaaagatgggcgtgggggtgggggtgggaaggcagagggtggacctggctatgttacccaggctggtcttgaactctggcctcaagtgatcctcccatctttgtctcccaaagcactgagattacaggcatgagccaccacatctggcaaaaacatgacatttaaaaagttttagaccaattttgcataaggaactaagagaaccaggcaagactactgggtatggttgtgcagattgtacactgcaccattcgaggggaagccatgtgactggcaccccctaaaataaagtgctgtcttcaacgtcagcagccatatgtgcagctctggaacaggaacagattgggaaaggtagccaggtgccatggtactttgagttttcagatgcaaatataaattttgagcaagaaattaggacagaatggcaaccagttttaggaaaataatatatgtaaaaactcacctcgaaacaggtaatcaaaacttgcacatagtacagtattggcaagagaggactggtacatcctgataagccaagagtttggagtcactttttattatattcataatcactatgttcctaatatctatggattcactctcctccctttttttttctttctccttttttctttttaccatcttctgtcttttccagatgtttcatttgagctgctctgctccccactggtggctgagccaggcctgaccagggcaggaagggtgatcagtagcctcacacacagcagctggtagagtctgaaggtcacgcttggccttccaccaagtgtccaatgtgctggggattagcctctgaatcacagcctttcccttctcctgccatgttggcccagccatacaagaggctctctctgcccagcacacaagtcccttgctgtgactggcattctgctgtgaaaaccagattacttattagactttatcttcagtgaacctttgactaacttctgcatgggactggaatatgatctgcatacctttcattactggccaagattttcattgtgcatattggaaagcatacagactttggtgtcagatactcagaggaacaaagtccagccttaacaattactagctgtgtcacctaagacaaattactcaactttgctggactttgcccttctcatctatgaaagggcgtattaaggaatggctcacatgaaggatatcatctatatgggtttgtattactcctcccttgtttttctgaggaggtcccatggagtagatattggttacagtgttttcagttgcaggaaatggtgactcaattcaaagcaatttaaacagataggatatttcttggctcatacaaaacaaaatccagaggtaggacagccacaaatcttgttgatcctcctgcttaattatgtcatcaataaacaatggtccctctgtctctccacacagcaatccacaaagaagacttcatcctaaggtaaatgctctacttagtagtatggttgctttgagtaacaattggtgtcatgtgcttctctgttcacttccagagggaaaatcaacatttctcactgatctttggagcccaagttcttcctgttcatttccttggaccaatttaagtcatatgctcttcttgaatcaataattttagtagggaaaggctagatgctgactggtctaagttcctgaaccaccactggttaatgaatcaccatgattgactaagaccagtaaaaaccattcctaactgtattgcaggtatctaatgtggaaggggtggggtgaaggttgaagaatcagactgtacagggtgaaacgcttgagctttggtttatatccctacctggcaagtaccaatggggttacaatttctgaactgcaatttatccatctagaaatgggggataaaaatagtacctctctcactggctagcttcacaagatttgtgacgcccttagccctgagcttagcaaattgtttacaaattctaggtgttattatttctttatatgcctagaaatgtggtgccacttgctatatttgtttgttacttgattcctggattcctaccacggactcctctgcaccagggttgctgaattccatctgcacatttcatgccctctctacattgtacctctgacaattcagttgctcatgaagggttgactggattagtcattagtcccttctctctttcagtactgccccatcaaatctagacttaaaactcttaagtcctccccagtgacacagggtattgaggtcccagcttgctttgtgccagggtgtgatggttggttttgggtatcaacttgaccagattaagggacacccagatagctggcaaaacattatttattcttactacttcagtaggcactgaacttgttcctcaaagccaggtgacttggagtttggttaaatgattgggctgcccgaggtgtgaggacgtttgcagaggagactggcatgtaagtcagtgggctgagtggagaatatccaccttcaatgtgagtaggcactctccagttggctgagggcctagatggaacaaaatgggaggggaaggatgacttcttactctctcttccagagccaggatgcccatattctcctgcccatggaggttagaccccagattctcccatctttggaccccagcactcacaccagtggacccttgggctcttggacctttcgccttgaactgagatttacaccattgtcttccttggttctaaggtcttcagacttggactgagcacactgctggcttccttcattctccagctcgctgacagcctatcatgggacttctcagcctccataatcaagtgaactaattcccctaataagttcattttcccctctttctatatatatacatatcctattggttctgtctctct

SEQ ID NO: 58319 - DNA, 519 bp, Homo sapiens
ggtggttctgagaaggatcttagagatttcagtgggtgtctgagacaggatttacttagaaagggaaaaagaaagtgactgtagagacagcccagggagtatgacatcactgcaggagcagagtgggaaggccgggaagaatagtgtgaaataacacctaccaaaacatacgccagaagacaggcaaagcccccatgcaagaatgccacttgttgcctaaagcaccctgtgcattttgttactttgcctccgtgtagatctgtcttattttgtcttgtgtgtggttagtgatacactgatctctctccctccgtaagaatgaaagtgagtcagagcagggaaccgtggcttagtcatcttggaataccccagtaccttgctcactgtctcttagacagagtgggcggcccaataggatagaggatctagaactttttgattgggtaaaaggcctatacttagcaatagtttttgaataataaatgaagttagggagaaaaaagcagaaacgtgtcctgt

SEQ ID NO: 58320 - DNA, 673 bp, Homo sapiens
gaaaaagctccgagggggcggggcgataacagtgttccctagcaaagcctcggcccggcgtccccgactacgcgccggcgcactccgcgcttcccgcctagaggcctgtcggtctgtttttccccgccctttttggagcctagggaccaatagagactcgcagagtgccttacctccattaggatttgaccaatgagtggccgaaagggagccgcctacctcccttgccaaatccctggggctgatagagatggcgggcggaaggccggccaataaggctcccggaaccgggctgggcgggaccccgggggtgccttcctgggttgggtggaccggtccctggttcgccgggtcctgcgcagcaatgcgtctgcttgctggtggaattcgccagccgccagcctcgctggcccaggtgcttgacagcatcaaaggtcaaagtgtgttcttcatgctaacatctatgagaaaaccgaacgcttctttttctgaaagtgctcagatttattctgctgaatatcggttcgtacaaacgacagccgcattacagtttattgtcacatcaaaagggaaaggccaaaaaaatatataacttaggcaagatttttgaaactttattgaaactcgaaagacaaactgctgtctcttcctccagtgatgttcttcctccttc

SEQ ID NO: 58321 - DNA, 1070 bp, Homo sapiens
cctttggacttgaggcctctgaacctgtgctaattgcactctgtcaggaattcgtccttggcgaccatagaaaatattacaggtgtctgtgctacccagaaagcaaagggttgtggtgctttcttttttcctttgagttacattgcgactggcacagttatgaaatgagaaatgttacacacaagattgccacaatccccatttttggcttatctttatgtcccatacattcttttaagatttctatcgcctcagtattgtcgatttccacatccacagcctaacaacgtggtgcaatcgccctttgcgacgccgcagaccaacagacggatgctgccctgctgcagtttcacagcacaccgggtctttccgcttcagctggacagaggcccagccaggccgtagggaggattccgaaggtctctctgcagaggaccggcctctcagaccgagaaggctccacccaggcaggaaaggacactgtatgtggggcagtcggcctgggccccatggctcgtgtttgttgctgaattgggcaacgtgggctgcggttcacagggcaacagagacttcaccacctaacacatcggggctggtgcagctgaggagggctgcttctgcctcttggtgaccacgccctttcccaggctgggcccacaggaagtctggccgggaagggaggaggcactgcaagctgtgggaaccacaccggctccttcactgctgacaaagatctactccacccccaccgagaaactagctcagaaccagctttcctcctcctccgcagccctcatgccctgaatggctgacttgggggatgtttacactcatttttttcatacttaagggggtgtgggtgccagatcaacttgctcaccactcagaccgcacacaagaagccttatgttgaaacttgttcaacctccagtaaccaagtcatgcaagtggagaaaactagatagcattgcacacacacatatacatacacaggcatatatagacacatatatatccatatatatgtgtttatgtgtgtgtgcaattatctttatacatatatttaaaaa

SEQ ID NO: 58322 - DNA, 548 bp, Homo sapiens
cctctcctgtttgatcccacccttaattactccctggtaatgatattgtcacagaactcagcccactgaataaattaatatcactaaccatgacttccagcagtaacagagtgcaaaggaagccaagtttcctgccctttggcttcccagctaagtcagagaggaaaataatgttctgaaaatccccagagaatgttgttgacacatcagctttcatttttcctgcacctacttcctccataaaattcaattataaaagtccttcctaggtagtcattcaatgaatggcactgggctgaagaagaatagacctgtgggtgggttactaaatggatgggaagagaaaataaagaaaaggagtaaatgaataacaggagaaatcacactgcaagtaaggggcatttcacaacaggaatgaaattgcttctgccacaagcaggcaaacaaatttcttcacacaaggaaggagggagcatatttcagaaggccaaacataagtcttggcagtgaatttcaggaccccagggattgtgacaataggagggagg

SEQ ID NO: 58323 - DNA, 752 bp, Homo sapiens
cagcctcagctgctcagcatctgagcgaattctgactctgccttagtggacattgaaagccctttcccatcctatggcaagtgagtagtctagacctctggaattatactcctgcctctctctgcatttccccttctctcatgcatccctttccctccatcccacagtactgtgatctgcagcacccggcagggcagcccttcccaaccctgggcttctgcctgacttcctgactctcactcagccgcctgctcttgctggagccttgccctgaacttcagcctccttggcaagggccctgacagcccagctggcccacagccaccatcctgttcctctcagcaagcagccagagtcctgtttcaacacggatagtcctccccaccccgcttcctctgctgtccccctcttcctgaccaactgaacatttccattatccagcgttcagcttttcccctgctgcattcccctccctccactaggtgggaacccatggatatctacactggctacatcaagcccagattccccacacatacacaccagtttgaccagccttaaaccaatatgtacctttatttaacttatgtaataagaagtccagagataggaagattccagggttggttaatttcatggctctcaagtgtcattaaggacctagagtctttcacctttctgctccgccatccccaccacaatgcctactcttttcacaagttgagttctgcagctctcagtgaccatggtgg

SEQ ID NO: 58324 - DNA, 619 bp, Homo sapiens
ccaccaggagccatggatgtagcagcaacacaggcaccaccaaaactgcacctgggcagggagtggggtggtggggaacaaataccacaacatctctctcctctaccttcaaaacggctgttggaacccctgcgttggccaaatctaactagaagccaaaaagcaaaggagcctgggcaatggagtctgcagggggggagtctccaggggtgcagggcaggatggtgaaaggtgctgaatggatttctaagggcaaatggagaatgatgagcacgcaactttgacatttttggctagaatgctttataggtcatgctgtgaacttcagattgcatcacatcaggggaaacgaaatgttaggttgtctcacccattaaccaagctcaatttgacccctccgttaaagcaatgctagccacatctccctactgagatgtaaaggtgtgttttcactttgcaatcagcaagtgatccagcaggagacacttggcaccagggggattcacggttttgctccaataatttttcacgtaattgtttcagcatccatggatgattcttccctgaatcggtcatttcactgggagttgcaaaatgttgatttttctgagtttttctt

SEQ ID NO: 58325 - DNA, 661 bp, Homo sapiens
aggaaagctttctaaacaaagctatgtttcacctgaaacctgaagaataggaaatatcaaagtagagaagggaattcaaggtagaaggaacagcatatgaatggcccctatcatgagagtgtggcctgtttgagaattgacaatggagttcagacagcaggacaaaagtagctgtgatcaagctatggaatcttcagacattactcactgtccacacttgcttggctgtgactgaaacctaatgccttggtcctgctttgtacaattttagaactctgagcaactggatgcttagcgacaaggattaggcacctggagtaagaatggacaaaaagagccctcatttcagtgctcagaaggcctggaatgttccagtggcctcagtgagtcagcatggtgttgtgcagcattggtgagctcgttcccagagtattcgggtgctacacagtcttcagcaagtcacacttgcagggtctccgacctcacttctgtaaagtgaggaggttagatatgggcttttctaactcaccttctggaatcagttagcaacaatagtccccatacagttcttaagtgggtcacattattactgagctaacctacatttgctagtgggcggaggggattattcagacagccagcaggcctgtctccaatttgc

SEQ ID NO: 58326 - DNA, 542 bp, Homo sapiens
cccttggtggaaggatgaatcaaaaataaactctacagcccttgccctaggggactataagtaaagacacttaagagagtaaaggagaagttccctaataagtggcaatgccatgctagccctcatgaggatttatagtccaaattaatataaactgaatgatccaggaaaaagtcaagaactggtactgtttccaggcatacagccaaagcaaatcccccactggaagaacttacatcatccagggactcaaagaatgctcacaaataattttccaaagaaaatactcacagtcattaaagagacaaagtactacagcaataagcaacaaaaataacagaaagtagaaagaggactgaaaaaaaatctgatactagaatgatcagacacagattacaaagcaactatgatcgttcaatagccaagcttgaaaataaatgcagataataagaaactgcaaaacgatgaagcagttttttgtaaagaatcaaataggaccacaataactgacaattatatttattacaattacaaactaaatg

SEQ ID NO: 58327 - DNA, 1420 bp, Homo sapiens
tttaaatagctttttaaaaaataacccagattggggagagggaggcaggagatggtctaaaaagaaggttgcatattatattagttgctttgattaaatttgcctttgttaacttagcagaaaatacactaaaaatgtaaaaaaaataatcatattgctcatttaatatttccacatacaaaaattgcttatccaaacttctctaaagtctacaaattaatcattattgaagcacagattatgcaatgttctcacgtaaaaaaaaagaaatgttggctaatgaaaactagtagctaggtacttttttagccagaattttatttcaaccacagaaacatgacttgaagcagaaatctgaactaaagtaaaccctgaatcaaaaatccaaaaagaactatactcatctgccagatatacaaagggaaccaaatccaaatatggtaatacttttttacagaactaaaattctctcagaaaatcacttgtttgtgtctgattttttttctaagaaattacttttttcaatacttctagaaaaatattacctaacaagggagtgtgtacttaagaagaacagttggacaataaataaaatggctaacctactctcttccccagaaacttacccaacccagtctgagcaacaagctgaaaagcagggttctgagaaccaggtattaaggggagttcccagaggagcttgggaaacacagaaaataagaggctgcaagcctgttctgaggtggaaaaggatctaaaaactggtaaaggaatgaaaaccttaatttttttttctgtcttttttttttctttcccccccctcacgatcatttctccttttccttctctcttgttcagatcacctctgggttcacatttcttttgccttttatttgcatgtttttatcttctgtgtctctgctcttctacctctgatttgtcttgtcttgtcccttttatcccctttcctttatcttctctttttctacttctttttcctttctctggtctttgttattttctttttcagtctttaccttttctccatcttttctttgcaattatctgatctcgtgccccaccaaaagcaaaagatgtttataatcttatgaagcagatttgacaatacttatgtatatgctttatctaatgtgatgatatgcaatgttcataatatttcgaagcagaggatgttattcatacactgatcaggactttttgtgaaatgctatttctattttccaccatgttcacctcataatttgcaaagcactttttagtgaacatcagtaacaaattcaaaattcataagagtggtagaattcaagttaaccttcatatttcttactatggtagtcagcctctgagataatacccagtgacccttacctccttgtatttatgccctcatgtagttcct

SEQ ID NO: 58328 - DNA, 3503 bp, Homo sapiens
acacaataaatgcagacaataaacaatttttaaaaagatatttttctaaggaaatagaaattatcgaaataggtaatctactcaattaacctaaattgtaaaacattataaaacacagagaactgttataattcattctcatctattcatttaacttaggttagcttagttttcaatcactacatattcttaaacggagtgaaattagtcacattccatttatcttccaaatttatcaacgtttattaagatttatttcaagaataatttgtacagggcctaattaaattatgaaccaagaaagttagtcttaaatgacccctcaatcccttttccctgcactttgctctcttaatctcctcgcccatcaaaactgcttcaagaaaaagttctgataaatttcttgtactaagggtaagtaagaatggtaaattcccgtgttaagttcccgccctttttggaacgaggcattttggaacagaaagtgttttctggtgccctgaagtcacacgataaacctacttgcctatgggtaatcctgtgaagtgaataaagcgtccaggacatgcatttaaatacgcaatttattttagttatataaatggcgttggtttaggtgcagggtacaaacttatttagaaatcatcgatttgttaactgcgtttggcatgggaatttggaaagagttcgcccgggttaagacaccaatggataaaacacttgtcaatccaggagaaaaggcatctcaagaatggaaagacttgctggcccaggctccctcggggagctctaggtgtagaaaatgcgcgctctccgttacttctcggttactttgcccagcacaaaggacgacgcgaataccaacagactggacgagtcggtgactacagtttgcattaagaggcggcgccttttgggtttcggagggttccactggaacccacgagggtcaggaacaccgacgcgcggattccgcccaccagacagcctggggaagcgagcctgaaggcgcggcgcagctagagagaagaacctcggcagacatgccgcccagaggcagctaaggggcccgtgggcagggcctgcgctccggctgcgatgcaggccggctagaggccggcgccgaggacccggcgcgcggcggccccgccccctcggctcccctcgccccgccccctaggcccgccccttcccgggccgcgcacccgcgcgccccgcccgcgggcggaagctggagcgaggctgaacgcctgacgtcaaggcgacatcgccaaacctcgcccagattcaggcgtgtaaaccagccggagcggcgcggcagcggcaggaccgccgtggcgcctagagtagcgacccggggggagcgcggggcgacgctggctgcagggacccggtgacagcgtgagaggttcgcagagtgagtgcgtggccgctgagggaagccgcggcggcggccgcgcggggccgggcgccggctgaggggagcgggtggggtgcggcgaggcgcgggccgggcgcggcggtcaggggccccggcggcggcagcccctcggcgcgcggcaggtggcgcgagggccaggcgccgggcccgcgagcgcgctgccttgcgggccggcgaggaggagcagccgccgccgccgcgggagaacagcgcgctttgcggaaggggtcaaatgtctgaaatatggcggaggaagtgagagcccgaggacccccccacccgcccgctctcttcagcccgcgtccgccgcagcttctcccgccgccctcctttccccgccggctcccccgaagactcgctccccgccccgagccccctcgcttgtcgcctgggttccctccgtggtatgggtggaagttagaacggaaaccagaaagttgtcctttgcgaagacctagcttctcccagccccgagctagggcgaggagccttcgggggaaaccactcccaggcgccccgcgggcttgagcctgacagcgaaaaagtttgcctgaaacggggcttgcttgctccatttgttgcgggaagtggcaggaggaaggcagcggagagagccccacttagtctggcagcagccaccgtgtagagaaaaactgttaaaggggcctttcccttcgtcagcaagaggaaatctctttctcttagagggagagaaaatccaggaagtttgtcctcttctctttttcgccatctcgaggtgtctaatcctaaaactatcagcgccatgaattttatttaaaactacgcccagtgaaccgggctctccggatttttcttctgaaaaacactgatgtcttttggagaaaagatcatttttgcaagttaaagcagatggtttccttccccttcgctttcccccctctcccactctctttaatagtttagaaaaacattttggccctgtaacttctgattggtatgaatagaagcagttctgtgttgcagtaaggggaaatcacatttttacggggtagaaagttgacactaaatgaagattgtgattttagtattttaaaattaattccgtctaattggattttggttttgcaggcagcatctcatatatgtcgagtacttaacaatttaaagctctgacttgtaaatttatttttcagctctcttttttcgtaattagaatactgtttggacttgctcaacaagaccttatcttaacaaaaagtaacttatagaaaagggagacattcatttaacttcaagcccatattattcttaaaagctgactcttgaaatagtatttattgagtcatagtggagtcatgggactttttaagggccggaagggactatttagatcatccagtcccaccctgtcattttatggaggaggaaactgaggcctagataagataaccagttagtgggtccactgacctttaggacagtagtctatccgtaagagacaacatggagaaagaaatacaacgtttttatagtgaattatcatcttacaaagaatattcttcccatatcgcacttttaaaaagtgggtaccttagtcaaataggagaaaaaaccacttgagtagtttcatcctcaggttttaggtgaggaaactgatactcagattaaataactttaagcacacagagcctgaatgatagtcttatttgagctcatctgtgcttttaatgtgtactacgttaggtgttttcacttgcatttcctttagtcttatttgagctcatctgtgcttttaatgtgtactacgttaggtgttttcacttgcatttccttgtttgacgttgacaataaatcgtgaagctgccttatctaaggaagtcctaaagtaaatcattggaacacatgtagccagtttgttgtttttaatatgccaggtatcaaaatataactgaagaaccaatgctaaactgacttaattttaaaatgttgtatggggcatgaaaatgattgctctggctgggcgtggtggtttacgcctgtaatcccagcactttgggaggccgagccgaggaaggcggat

SEQ ID NO: 58329 - DNA, 2275 bp, Homo sapiens
caaaaaaaaaaaaaacaaagaaagaaggaaggaaggaaacataatttaaaaaatcaagtccaaaaaaaagcaagcaagaagtaaaaaaaaaaagctcagcactgtcacaagaaatatatggcaagaaaagctggcaatttctatatacctgtgaaacccaaattgtcacttgccttaaggatcaaatgtatcaatggtgtgagcccaaaactctgttgcaacttcttcactttccccagatcttcaatggcagctttgttaaactcaacaaggcttcagttaacacgctgaggattgtggaaccatatatcacatggagtacctgaacctgaaatcagtaaatgaactgatctacaaattggttatggcaaaatcaataaacaaattaccttaacagataacgctttgattgctagatttcctgataaatatggcatcatctgactggagaatctgattcatgagatctatgctgttgaaaaactcaagttcctgtgatccttcaaattatcttctccacgagggagaatgaaggactacctattttgtattaataaaaggtataaatgccagcaacagaaaagactatatcaacaggcttattaaacggataaactgaagcatctaacattatttttgtaatctggtcagttaatagccagtcactactttcaaactggaaaaaacaaaaaccaaaacaaaaatgtgactgactccttcaagaccaaaatacaccactttttgcctagacggcactttgaaatagagggcaataccatcatatttcacgcttgcctttctactttttaatacaggtgaactttttctccttaataggaaagaacaccaagtaaagaacaaatagcagttatggaaaatagttgcaaaaactgcagggggctacagaacaaaggactgagtgtaggcagagagatagagatccccgaggtgtggggcagagcccacgcatctgaattccaagaacaggcgctttctgacagagaataccaggaaatgacttcacatttttccagactatcaacatacttcattcttcccagtaggagaacccagggcctgttccacgcccacagactttggtcaggcaaagcggccgcagggcgtctgggctaaacgcaaccaggaacacattggcaaacttttgcgcctgcgcccaccgggcgtgcacctgtaggctgaagtcgcgcatgcgctagatgggaacgttgtttcttctcccctaccccttttctgtgggtctgttttagggacagactgcttccgggtcgaagggcttgcttccggagagcgggaaggctaaaacgcggtagctaaactgcagccaactttggttgtgtgtggaaaaggctttagccatggacaggtcagtactgatggtggcagctgagcccgaagtcttgcccgtctcgcctgttggcgaaacgaaataggtgaaactagactcccagaagaagccaaggaggtcccgggtgcttcccctaaggctccttccccatgccgggaaatttggccacaaatggggaaaaagccgcttggcgtgcgtcggggtggggtacagatcataatagtcccttactttcccactacgttctgcgatctattcggcgctttggggcagcaacactgttcgctcctggggtgggcggggtaggtagcgcggcgttcgaaatgctaagtgaccagcctgagatcacaaagccagtcagtgaagatactgggatctcagcccagactttctgattacaagtgccagcatcagattctgagttccctctatgatctgggtactgtgctagccgcctacaacaaagatcagttattcaagatccttcccctcggggaattagttgtgtaatggagacaaccaagcagtgtaaagtggtaagtgtttgggggcgattaagtctccttgtcactgtaactatcaggaagacccctcaaagaaggtaactttctagctggtctttgaataataagagtacattattcgtactccaaacattgagtacctactatgtgactgccattgttctaaaggcgttgaatatatattattagcttatttaatcttcagaacaagaaaaatcctatgagatgggtactgttatccttttttcatatataacactgagactaaaagaggttaaggaacttgctgaaagttcggaagctaataaatacaagaaccaaattgccaacctgcatctgtgtgtctccagcctacctgaggctctttgaggagtaagtagttgtt

SEQ ID NO: 58330 - DNA, 1762 bp, Homo sapiens
tgtgtgaaggaccttactgtcgatcaagactgttactcaaagttctatctcttagtcattgcacctgacctgatccaaaacatatatatatatttgtatgcacccctagagacagctgtatatatatacggttttgccaggttgtacgtttttttctcgagttgtaagtgaacacagtagcactcgtttacattgtcaaggggacatctttagagaacacattttctcactgttgagctaataatgctttgtgaatgtatgatctaaggagaaacccttgtagttatacccgatgatgctgtctgttggaaagtaaattttgaatgtctttttccaaaaataaaaaataaaaacatgctttcaataagttctttcccccctctggcgagggctactaaatttgctcagcatttaatacgtaaaattggctaacagtgtctgcacagccagagagaagttgtctagcaaatcgggtcaatgacacacaggaaacaaacatcaagaaaggggtcctagattggtccagtcaggtaggcgttaggtgaccaagggggtcggggacccagaggataggacccaaagacgcaagcgtcgcgcgcccaaggctcagcgcgcctgcgcagggtagcggccgttcagccagcggctcgggggcggaagcactggagccccgagtcacgtggctgcgggcggagatgagcggggcgtgggacgtgctgcggcgtcctagctggcttacagggcggcggcggggtgtgtgtcctctgttaagagtgctactcgcccggggttgatctgtgcatgccactcctgggtcagacggtgaggtcggcgtctgcgaggacgcggcggtggagtagaagggcagccggagacaggcccggcgccccttccgaggctagacggccccagcttcgcggggatcatggcattgctggtggaccgagtgcggggccactggcgaatcgccgccgggctcctgttcaacctgctggtgtccatctgcattgtgttcctcaacaaatggatttatgtgtaccacggcttccccaacatgagcctgaccctggtgcacttcgtggtcacctggctgggcttgtatatctgccagaagctggacatctttgcccccaaaagtctgccgccctccaggctcctcctcctggccctcagcttctgtggctttgtggtcttcactaacctttctctgcagaacaacaccataggcacctatcagctggccaaggccatgaccacgccggtgatcatagccatccagaccttctgctaccagaaaaccttctccaccagaatccagctcacgctggtgagtagcttcagcttcccaaggcgccgctctcccgacccacctcctgcactggccccgggaaattcgaacgcacactggtctttcccttcatcttgaaatccacaaatgagtcatctgtgggcatgtgaacttttaggcttattttagggagggggaaaaggccatcttgtcagcccagaagagtgggcatgtgtgaattttagtagctgccatttgatggaaatcgttaaatgctgtgatcgataagaaaaaaagctgtattgggtggtacagtccagtgttatcagaatatctgcaaaagctcaaacaaaaacagcctttctcccccaggggaatcaaatcgtgtatgataaaacgtgaaaagatgtagcataaagtaggtctcaaaacgtctgcagcaccatactttagagctgtctgcatctttaaata

SEQ ID NO: 58331 - DNA, 4919 bp, Homo sapiens
gtaagaacccatctcaaataaaataaaatgggtatatcagtatagtgaaaaaattaatcatccatttggtcttttattcactattccacagattttattgagcactgattatgtcaggcactcttttcttttttttagatagagtctcgctctgttgctcaggctggagtgcagtggtgtgatctcaactcactgctacctctgcctcctgggttcaagtgattctcctgtctcagcctcccaagtagctgggattacaggtacctacaaccatgcccagctaatttttgtatttttaatagagatggggtttcaccacgttggccaggctggtctcaaactcctgacctcagaagatctgcccgccttagcctcccaaagtgctgggattacaggcatgagccactgcacccggctgccaggcactctgaaatgctaggaatacaaaattattaggcaaagcaatctaaccaaggggactttcccaactaattagactcaaagaaatagtcttttattcagtcaggagcatgagtcctgcacacagcaccccgtattatactctgaaaattaggaagaagtggaagatagtgcctttcaccacagagctttcaatttagaggccaaagagcatggccaaatattaaaaagttatgcaaggacacagatatgaacaaggaaatattaacgtaccaccagctgtaccaaaatgctgcagttctctgagtaatcaagtgatcattactcatggtatctcagtcagatttcagactagcaagatcaaccttgctagtctctcttttaggaactcagttcttttccttctaatgcctcatcccagtttgcaattatatatttatttgcttcttgtatttctcctttactatactgcaagctcaaaaaaggcacaggttatatatgttttaatcaggctatattttaaatgccttgcactgtgccagtaaatattcgttaaatatatgaattgctgggtatgatggtgtgagcctgtggtgccagctacttgaaaggctgaggtgggaggatcgcttcagcccaggagttcaaggttgtagtgcactacagtcatgcctcgaatagactttgcactccaacctagccaacatagcgagaccctatctctaaaagtaaatgaattaattaatgaattaagggtcacagccaaattcatgcttaaaatattttgatacttggccaagaggatagtggcagtaaatcaataaactggttgatggtgaacttcttttttgttgttgttgcggggtttttttgttttttattttttgagacagggtctctgacccccaggttggactacagtggcacaatcacagctcattgcagtctcaagccaccttcctgggctccggcaatcctcctgcctcagcctcccaaagcactgggattacaagcatgagccatcccacctagcaatgatgtgtgtacttgtgacatgatgcataggatttacctttccacactcagctaaataactgtttcaattttgctaggaaagttctggtctagtttggtctggactctagtttacttttctttctttttaaccttacttactttttattttatttttatgtgtttattttttgagacatagtctcgctctgtcacgcaggctggagtgcagtggcacgatctcggctcactgcaacctccacctcccaggttcaagcgattctcctgcctcagcctcccgagtagctgggactacaggcgtctgccaccacgcccggctaatttttgtatttttagtagagacggaggtttcaccatattggccaggctggtctcgaactcctgacctcgtgatctgcccaccttgggctcccaaagtgctgggattacaggcttgagccaccgcgcctggcctaaccttacttactttttaactgtggcaaagactctagtcttcttttaagagtaactacaatttactttttaaaattattaaataattttctatcatacttttatgtgctgtgttttatggattatgtgttttatgtgctgaatttatgtttttaaatcactttttaagttatctgcatcacttttaagcaaggtggtgagagataaaaaccatgtcgctttacttttaaagtgaatgaccgcctctaagcttgaaaacatcacagttagactgtgtcattttctggtctttaggtggagccactgctattgcaggtttcctaaacctaaacctatttatagagaaattcctcttcagtcattttataaccaaagcctcttgtaagtatttaacattacattttagctcagtgaatttcactatataggaaagatcctgagagaactaacaatataaaatatgtagccaattcatacatattttaacattcagaaatactacttattagaatttgaatttatttctcagacttttctgagaggttagaagggccctgttgtgtttaacccaaagaccagttcaaaaactagggaaggagctgtttaagaggaaggaatgactaacgtctgaaggtcagaggactaaaatcctggtgattgaacaagttgcaacacatgggttttccctctaaaaaaacaaaacaagccgggcaaaaaaaaaaaaaagaaaaaaacaaacaaaaaacattctgtgctggccccagtaattacttgtacccttgctctttcatttcctcttctaatgataaaggaagctgcagttgctcaacttgtgaactgaaaacatgggacagcaatgacacaggaaaatgggcaagtccaggcaaaagcccgtgcggtggccagagtccgggcctgcctgctttcccatcattttcctttcccatgtttgttcttttcttcttttcgccttgatttcttatcgtgttcctttttttttttttttttgagatggagtttcgctctgtcacccagactgtaattcagtggcacgatcttggctcactgtaaactcctcctcctgggttcaagcaattcttctgccccagcctcccaagtagctgggattacaggcgggtgtcaccatgcctggctaatttttgtatttttagtaggcacggggtttcaccatgttggccaggctggtctcgaattcctgacctcaagtgatccacctgcctcagcttcccaaagtgcttggattacaggtgtgagccatcacaaccggcctgttacatttttttaaaaaatattttccaccacccctttttccttgtatcacacctctcctttaagcccacaagttaaagcattgatgaacacttctacttcaacttgggaatattaatacaaaaaaaagacccagcactcactgaagtacaacacaaagcaaatcccttttactacaaattcctttttctacagctctttccaatggatttaaattgttcttaaatgaaatttttaaacatataaaattgggaaacattttaattttcatagagacctataaatccatgttttcccaaatttagtcctgtcgagggtatgggaaaacaagtaccatcttacattcatcatgagaccataaattgcatagccacaaaaatgctcatgccctgtaacccagaaaatccactttcaggagtttatcctaagaaagtaaagatgtgcaaaaagattttctttgtagatggggtctcactgtcaccatggctggagtgcagtggcaagatcataactcattgcagcctcaaacttccatggtcaagccatcttcctacctcagcctcctgagtagctgagactacaggcttatgacaccgagtgtgcctaagttttttattttttttttaatttttttgtaaagacaaggtctctctttgttgcccaggctagtcttgagctcttggcctcaagtgattctctggcctcagccacctgaagtactgggattacaggtgtaagccaccacgtccagccctgcataaagatttttgtgcagagaagtttatcacagcattattattattatcatttttagagacagggtcttgctctgttgcccaggctggagtgcagtggtgcgagtatagctcactgcaacctccaactcctgggctaaagcaatcctcttgcctcagtctcctaagttggtgtgcaccatcaggctgagaaacattattgataatagcaaaaaaaataggaaagcaactaaatgtccaacagttcttggtccacccgtccatgtgactcaccagtcttctggaaaggcctgggatttttaaccttatgcttgccacctaaacctctgctggatgagtgaggccctagagatcaatagacctctctagttaatgattactagtcttctcccatttctaagtacacacagcttggtttccccacctttatcaacatgctgcttagaacatctaactattttcaattgcaactccttccaccttccactgtaagaactatagtttttgggctgggcgcggtggctaacgcctgtaatcccagcactctgggaggctgaagcgggtggatcacctgaagtcaagagtttgagaccagcctgatcaatatggtgcaaccccgtctctactaaaaatacaaaaaaaaccaaattagtcaggtgcggtggcatgtgcctgggtgactgtctcaaaaaaaaaaaaaaaaacaagaactatagttcttgttttgttttgttttttgaaacaaggtcttgctctgtcaccgaggctggagtgcagtggcaccatcacggctcactgcaacctcgaactccctggctcaagtgatcctcctacttcagcctcctgagtagctgggacagtttcttttaaaaattatgattattggctgggtgcggtggctcacacctataatcctagcactttgggaggccgacgcaagtggatcatgaggtcaggagatcgaga

SEQ ID NO: 58332 - DNA, 5891 bp, Homo sapiens
gaacacctcttgggcatcaagaacaacgctactagaaataagcagtttgcctctagagaaacttcaagtaagcacaacaaagggcaaagtgacacaagataactgtggaatgcaagcaaacagcagcagctggtctgtatttttttaaatggcaaagtcacaaacaacagcaactgcttttagagtgagcaggtagtttgctttcttttttttcaaatggaactcactttttaagtgatgacatgcacttgggggtgggtaggtgtgagttcatttgtgttttgaaatcccaaattaatgagcatgataaaccgctattgctggccctgtctgactctctactctgagtaattggtgggttccccccaaccttctcctaaccctcaccctttttccctttccattgacttgggacagtccttgtcaaagtgccaatcacagtgggaaggaggagaaggggggaggtcacagtgcatgggattcaaggtcacagtgggcggagcaacggggatcaccaggcaagtaagtcaagttcccgctgctcaagtccagctgtctgccacggtagtgcaacccttggcggacgacccaggacgcgttgacgcggcagtcgcgccatctcttcttgcctgcatttatctgcgctgtttgaagccgtgtgacccatcaggacccagaggctgtctgatcacattattgggctgtctgctgtcttcgggttaggagatcctggttggcctgaagggaagaagatcagaggaagacctatcgaggatgggtttctcctgcttctcctcgggttggcgctgcccaggatccgcttcctggcctcggtgtactcggcttcccactgtgccagggacttgactggaagggcgggcctgctagcggacttggggctgctgaccacaccgttgctggtgggcctcttgaggatgcggacctgtggagggggtcccgggggaaaattatcatcctgaatcacaatgggcactttgggagatttgaatttcctgctttctgtgtgatcttcagttttttttccagacgtctatttccccgctgtctgccgtctcctcccagctctcagcaacctcctcatattccatcttactcgccactttccagatcgcttgctttcttatttccacattttctctgacttttgcagtattcaatattattacctgattctgatttttcagacatcactatatggtccttggctttttggtcgttcctctcattcctttgctgtttcaagctctgttcccagcctaagctttttaccaccgaattctgttctgtgacccataacttaaaactaacccaacttttcattccctccagactttttttggtaagcagtatcatcatgctttaggtggacactgagtcatactgctgtggtagtgctggtacacgtagttttgaataccaggttcttgagtgaatcctttttacttctctctctctcccccacccccgcttctcccttctgccttcatttctgacccttcttttctggttccattagaaaaggactaatcttatcagttctgcctttttttttctgctctaataattttgtcaagataattttttcaaagcacaaggccaatgagaagggggaaagtcggtccagaaggcagccggcccgactattctgagtttgaatctactcttggtggtcctgttaaaatacagtttgaagcaaatcacttgtttttatgcttctaatgtctactctgtcgaaagcccaaatttccttgcttggcatttaaggagactccaagttcttaaaacttcttcttgactttcatgcaagtcaaacggatttatttattgtatctcaaacagtcctcttatattttcctttctgtattttttgataattttcttgtgcctggaatattctctgcttttatttaagtctcaccatctttcaagacacaaaatatgtgtgatctctgaggcctttgtgaactgcctccagcatttactaagcaattaattctgtctctgaacttttatagcacaaacccattcgttcacttgatatttaacaaatatcaacctctatcacttatctctttttttttttttttcttctgagatggagtcttgctctgtcacccaggctggactgcagtggcgcgatctccgctcactgcaacctctgcctcccgagatcaagcgattcttctgcctcagcctcccaagtggctaggattacaggcgcccgccacggggcccggctaatttttgtatttttagtagagacaaggtttcaccatcttggccaggctggtctcgaactcctaacctcgtgatccacccacctcagcctcccaaagtgctgggattacaagcgtgagccaccgtgcgcagcctatcacttatcttttcatgcttacattttctcactgcttgagattttctttcatccagggtcaagcactgagtctattagaaaccccactgtatatgatctgatgaagatgagattatctttttaaaagccacatattaaatctcttaagttaataatattggcaatcaacttaaatcaactgagtgaccactatgtttaaggaagtttcctttctggtaggctgggaagcgggagaagggaaggatataactttataaaaaaaaaaaagctgcagaagggaaggatataactttataaaaaaaggtccttgttcacaaggagctaatcacttactggccagagaagaaacgtgttccttctttgcaatggctgtgtttttgggtttagctaactcaattctttatgtcctcaatttatgagaccgcatcaaaaacgtttttgccacatctctgtgggaaagtaggtgagtcagaatgagtgcataatatataagtatatattttaatgataatgaatgtgtagattaacaaacccaaactttgtttttgtttttttgagagtcttgccctgtcgcccaggctggagtgcaatggcatgatcttggctcactgcagcctctgcctcccgggttcacaggattgtcctgcctcagcctccggagtagagtagctgggattacaggtgaccgccaccacgcccgactaatttttgtagtttttagtagagacggcgtttcccatgttggccaggttggtcttgaactcctgacctcaagtgatccacccgcctcggcctacccaaagtgatgggattacaagcgtgagccaccgcgcccagccaaacccaaacattctaaaagcgcagagtaaccgctcccctccccgccaacggtaaccagcatcttcgttctccaaccagaacagctgtatgcaccggtgtataagcctgccttaagtgctatttttaatcttttttaaaaacaggccttaaaataactcatttgggtacaactccagcggctggtggagtgggcttaatatattaaacagctgttaattttggtttctttttggtaacagcgacacggagatccgcatttgtcgcagtttccaccgcgggcgggaagtgtaaacacaagaaatacaaacatagcgcaacggctaaaggagtgtcacagcgccaaaccttgctggctccgcgccaggccgagccccaccctctcagctcgcggccaacacccccaccccgcctcacagcccgccgcgcccgcggggcgacaccccccactccatcatcccggaggtggtgcggccgagccccggacccaattggcggaagcggggccggttgtgtgcgcgcgcacaaatgcccggatgcgccgcgacgacccgcgcgctcccctcgggcggtagggggcgcgcaccgaggcaccgcggcgagcttggctgcttctggggcctgtgtggccctgtgtgtcggaaagatggagcaagaagccgagcccgaggggcggccgcgacccctctgaccgagatcctgctgctttcgcagccaggagcaccgtccctccccggattagtgcgtacgagcgcccagtgccctggcccggagagtggaatgatccccgaggcccagggcgtcgtgcttccgcgcgccccgtgaaggaaactggggagtcttgagggacccccgactccaagcgcgaaaaccccggatggtgaggagcaggtactggcccggcagcgagcggtcacttttgggtctgggctctgacggtgtcccctctatcgctggttcccagcctctgcccgttcgcagcctttgtgcggttcgtggctgggggctcggggcgcggggcgcggggcatggggcacgtggctttgcggaggttttgttggactggggctaggcagtcgccgccagggaggagggcgggatttcggacggctctcgcggcggtgggggtgggggtggttcggaggtctccgcgggagttcagggtaaaggtcacgggggccgggggctgcggggccgcttcggcgcgggaggtccggatgatcgcaggtgcctgtcgggtcactagtgtgaacgctgcgcgtagtctgggcgggattgggccggttcagtgggcaggttgactcagcttttcctcttgagctggtcaagttcagacacgttccgaaactgcagtaaaaggagttaagtcctgacttgtctccagctggggctatttaaaccatgcattttcccagctgtgttcagtggcgattggagggtagacctgtgggcacggacgcacgccactttttctctgctgatccaggtaagcaccgacttgcttgtagctttagttttaactgttgtttatgttctttatatatgatgtattttccacagatgtttcatgatttccagttttcatcgtgtcttttttttccttgtaggcaaatgtgcaataccaacatgtctgtacctactgatggtgctgtaaccacctcacagattccagcttcggaacaagagaccctggttagtatttttgtctcgtgtaacttttaagaataatttattttatgaagtgataaactaaatttcgtatacctcaattgtagcatggctctgtaaataaaattgtatgtgcatagcttaaagtgtgctacctctggcgtaactgcgtggagttaaaaactgttaagaactggtcagtatttttttagccatttgccacatttgctttaaaaattagttccattacattgttaagcgtggttgaagttacgtttgttacgtgactgatttttttttcctttttgacctcccagtatttaatttttaaaaatggtttctaaaagtcaaaaaagttattcgtgcttgttttaaagatttttgtcattagagaaattttaaagtaaaacctgaaaattccaggctttttgctccatgtttccttttagattttttgtgtgcgtacccacatatatttacatttgaatttaaatctatgttattgtcctgtttgttgtactaacaagatgaaactgtagttgttctgtgacttgcatccttgtcaataaataaagtctacagaattctttttaatggctgcatagtattccacagcatgagtataccattttaaaaattatttatgcctttactgataggtttttaaaaattgcctcctgtttttgagtattacagatagtgccgctttgtacatgcatcccgtgtgactatttctgtaagaaagattttatagaattataggctggcctcggtggctcacccctgtaatcccatcactttgggaggccaaggcggaccgatcacctgagatgaggagttcaagactagcctggccaacatggtgaaaacctgtctctactaaaaatacaaaaattagtcgggcatggtggcgcgcgcctataatcccctgctgaggaggctggggcaggagaatcgcttgaacccaggaggcagaggttgcggtgagcca

SEQ ID NO: 58333 - DNA, 615 bp, Homo sapiens
ttatccatatttagtaagggaggaggggtgtctagttgaagacagacgaagatgttaatacagtcacactgtaggtactttcgatgccaagaggctttggtgtttttcctttatgcagtggggttttgaacagggaaaataatgtagtaataaccttgaaaccttaatctagtttcagtatgcaggatggatctgaggaggaaatgtgcgtggcaaccggctccgggatggctggctggggggcctagtcttctgcccgccgatctccctcgggaagtcccggatcagagcagcaggcccatcccccaactgttacaccctgctggcagcagcagaggcacagggatgagttaggaaacagatacagaggtcaagaggtgatgtttattaagttatatatttttttcttgttttaggatcttgatgctggtgtaagtgaacattcaggtgattggttggatcaggattcagtttcagatcagtttagtgtagaatttgaagttgaatctctcgactcagaagattatagccttagtgaagaaggacaagaactctcagatgaagatgatgaggtagtattttttttcccctctaattatattggaaaattattaa

SEQ ID NO: 58334 - DNA, 1031 bp, Homo sapiens
tgagccgagatcccaccactgcactccagcctgggtgacagagcgagacttcgtcccaaaaaaaaaaaaaaaagctgcaaatttaaacgttgaagtctaggtaaatataccagggaacttctgcttaagaggcttctatgtaatgaaattctcttgaaaacagagaaactatttcctgtttattttctaaattgagacgtcactttttaaaaattggtacctgtaatttagccatttcctactcagcaatgtctcatttaaactattatttgtttagcgtgtttcaaagagcagatgtaagcttgagcccatcctctgtcctatgactaagtcgatattagcaggggttaggactgttagttttccagttcctactggaggcaaattctttgtttaccactgttctctgtatttcaaaagcacctggaaatcaataaaatttgttattcagaacaaaagccttctctatatatcagtatttcccaaaatgtgtttggaaatataggtatgttaatccaaagggatggtacgaggctgtattatttaaggaaatggtcccatagcttagcatgtttgggaaatccatttcttttctgcatttctcagattctttattacattaatataaattgtgaattttcaaatattttttctgaccagaaggcatactttccatccatcatcttgtccatggaacacactgccccacaacacaaattaatttggaatgtattatatataatatatataacatatagcatatgtaacttgttctggaagaactatctggactttgaagagttgttgcaatgttattgcctcataaaaggtcattaagtttggtctttcccaagctttatttggtggtaatcagttatttttagtggactttgttatacttgcataagtacttattttcaggtaacataatgggaaaaaagcattatttatatggatattagttctttattgagaatcagaaatattttaaatttactaaattcagaggtagtcatggcctctccccaata

SEQ ID NO: 58335 - DNA, 2861 bp, Homo sapiens
acctcatactataaaaagctgagaacttccctttttggtcccttgaggaagaggtcaaacataaccagatcatctttttgaaggacaattcagctgtactaagagcgagatcgagcattaccttaaagtacaaatgaatacttaaagagatttcttggccaaggtgggcagatcacaaggtcaggagttccagagcagcctggccaatatggggaaacctcgtctctactaaagttacaaaaaattagccgggcgtggtggtgtgtgcctgtaatcccagctactcaggaggcttgggcaggagaatcgcttgaacccgggaagcagaggttgcagtgagtggagatcgtgccattgcactccagtctgggtgacagagcgagactccgtttcaaaaaaaaaaaaaaaaaaaggcacaatcattacaactagcactatacagttattgtccatttgaggtttctttttttacagtatgtcatggacattccggttcagtgttgaggttttgtttcttgctgccctattggtctcactccgtcagccaggcaggaatgcagtggtgcaatcatggctcactatagccttgacctcccagggctcaagtcagccacctcagcctcctgagtatctgggactacaagcatggaccactacgcctggctaatttgtgtattttttttttttttttgtagagatggggttttgccatgctgtctaggctggtcttgaaatcctgagctcaagcaatccacccacctcagcctcccaagatgttaggattacgggcatgagccactgtgcctggcctggtgttcttatttgttatgagtgcctgcaggtgtcacagagctgtaatttaagaagaggttaattcagaccccttttgaccccagaaaagacagtttgttggaggtctgcacagccctattgtctatttattgctaccataagaactcatcctttagtggcaaggaataatggcaattaatttactagtttccccataagctactgtggagaagaaaggcttttctttcagtcatcctacttcctgagttttaccctaaaaagctctcattctaaagtgaagcaagtgagagtccagagtgaaggatgcttagctcccaatagcaggagaggccttgaagttaccaaaattaggttccctaaccggaacatttggtggattaacaaaggtggactacttctcactagtatcactgttttgagatttaaatctcaaaaatagatcagtagtttagtaaagacatcaaaaccagcattgagcagcacgtcacctgcctgaacacagcatgtgagatgagatgatatacagtatcctcttcagggcatctgacataatgatgaaatgtgcaggttccagaatcaaagtgtcagagctaaaacccagctctgtcacttactagccatgtggtattgggcaaattgcttaatccctctaaatgaatcagtttcctcatccatattatgggattaacggtacttaccctcatggggttgttgtgctatctcatttaattcttacaagctttaaaaatagtgccagaaacattgtaagcacgtgtttgtttgagggcctcaggtgtacaaattggctgatgacaaactactggccctagcagatgatgtagtatcagaccaattaaagacaaattttcaatataaacagtgtacataacatagggatagactgccaatttgttatgccaagagacagcagaaatgtatgtgccagaagatctgcacatcaggtcaaatagactaccactcactgaagttaaaaagaaaactggagtgtggattcagaaagtggaaggggctattttgagagaacatgtccttcaaaatgtattagcacaaaaactgtcacaaacattcacaccaccaagcatcaggtaaattactttttcaactccaaggactgaatctcattcagaattcccaggccctaacagcagaggacagtgctgaactgggaagccgcatgttgccatgagggcagggcagaaagccaagtcacctctgttaactgtgttgaatcattaaccataaacacatttttcacaacattttctttcatggcctgttctcaaaattattgaggacatcgtgtagattttgactatctcaatgttaatgagcctggaaagcatgttaagaatttccagtctggtgctgtcatggagagactccaactcatcactgtaagagggcaagccaagagcttgtagacaaggaaatggttcattaggaatcaaccaatgacataaaattggttcaatatgaatcggtcaatgccaaaaaaaggcaggggaactgtcctagattgtgagactgtagacgatgggtgagccttgcttgatttgattctgggaactactggagaactttaaaaatgcagtatgttgttggatattactgagttattatttttagtttaataatgatgtgtcatgattaggcagtaagaagtcatgcttaggagatgcatattggtgttttttgggatgatgtgacatgccatttatcacttctaatggttcagtaaaatcaacagatggagctcatgagagagataaagcaaatgtggcaaaatattaacaactggtggatgtatatgaataatgtgtgagtgcttattttactatttttgtatttttttctataggactgaaaattttctaaataaaaagctggagggatcaagagaatgaaaaggtaagccacagacttggagaaaatgtttgcaaaagacatgtctgatgaaagagttatccaaaatacagaaagaattctgaaaacccaacaataagaaaataaacaactcaattaaaaaa

SEQ ID NO: 58336 - DNA, 1937 bp, Homo sapiens
ctgattcaaacttgctgtctataaaaatgaaaataactttatgtagtttctaacttagaacaataaattattaatgataaatatgaaaatgctgggaagagtttcaatcactactaatatatattcattatctagcattgtcttcttcaaatggatacattttaaaaacagcctttaatcatagaaccacttttttgcataactttaagccatagggctaattatacacgacacaaatctaaccaacagaactgtactacttagattaaaagaaacttgcagaaatgatagttttgcataactttaaataaaaggctaactacagatgacacagaaatcttaccaacaaaactgcattatttcagtttaaaagagacatgaagaaatgacattaacagtccaagtcatatataaagaagcccacacaaaggggaactgaaacggataaacggacttacttgggagtttatcttgaaaaggaactaaaacatacatcccaaataaccaatgtctgcaagatccaaaaagacagaagaactccaataatggaaaggactcagtgacactgaattacaatggacaagtccagtaaaattcagttcttcctactattcctcccaacaaaagcagaaaacaaccaacacgcacggtaccggttgacttgttctgtgccactcagagtaggtgcgtggaagagcagacaggaagctggggcatatttaatgaatactgaaagggaggactgagggtttggcaaagtgttcacgagacggaccctacctttcacagatttcccaatactgtgtaagtgagtgacagaactgtagttttgggcaacagtcttcaaaaacgcttccatcccttcctggcggtggtagttgaaatccagcgcagctaccaaaggcagcaacagccctagccagaggcacgggaagtccatgttctagagatgaataaaaataagaagaacctgagaacacatgagggcaggcgggggcatcaccagctacgtctcggtactccggtctcagggtctcccgacactgacgctccctgcctcctaaggaggcaaaagctggaagcaacaccttcgggagtgagccgtgcaaccagagaccgggagcacgggcagcctcggtgccctcgacccagccgcccgcgcctccctctcctcctcctcctggcgcctccgccgtccggcagctgccacagctgcgcccggccccgcgcacccccagcctcaccaggtcccaggcgcgcacctctacccacccgcggccgcccggcggggccgggtgttatagcccggtcagagggcgggcgcgcccgggccccgcccccggacgtccctccggcccactccggagccgcgcgggtgcctcccgggcggggcctcagccgccttcgcacctaggagagacggcgcccgcgcggtgcgccctttcgtggcgcggctgctggtgcccgcggccgggcggctgagctgggcggagggctgcgggcatggagtcgccgctcgcggacagtctttgctggagccccaggtcagaagtgtgtcctcgcctcggccacggctgtagcctgggcagccacagggcgctccaccgagggacactctctgtcgcagactgcagccgcttgggagacgtttagggctcggcgggtttcctgcggttggcggtgccggggcccacctggagccgggacgcatgcggagtcctgagtgccctgagccccgcgcgggctcctgcgggacgggcggcgtcggccccggcagggcgagccaagctcccagcagtgccaagctgcccagcgaggctaagcaatcacggggcttcgagaaagaacgcgcgcgtgtgtggaagttttaaatgccacgaagtgcagagtgcaggacattttccaacaagtttacatagtgggtgggatttgtgtaa

SEQ ID NO: 58337 - DNA, 1309 bp, Homo sapiens
agtaagcacagttcaagttttaattttaacttattaatgaggaaaccagcaggataacaaagccagttcaaagaaagacatgagaaaatatgtgtgtatacacacacacacacacgtatatctatatgtgtacatatatatctatatgtgtatatacatatattatgtatatctatttatatatgtacatacatatatatgtatatgtgtatatgcatatatgtataaatatgtgtatatatctaaatatacatagtacatatatgtaagtatatagatattatataaatatatctgtaagtatatatatagatattatgtacatacatctataagtatatacatagatatatgtacatacatctatatatgtatacacatatgtatctatatatacatttactacatacatatatgtatgtatatatgtacatatatctataataatatatacataatatatgtatatgttatgtatatatgtatgtacatcccataatgtatatgatgtctatacatatagacatcatatatgtatatgatgtatatacttatgtatattatgtacatatatacatatagtatatgtattatgtgtacacatacctatatacatattgtatttatattatgtatatacatactatatataatatacatatgtaaatatacatcctatatatatacataaatatataaaaaagaatactaaaatcattctacattattgctaaattagatataaatctgattaatgtcttacagggtgataaaccataatgtttggtgctatctttacagagcaaaattattttcatctgtgcaggacagaaattatatctccattggacaaaaatatagcatctcaccaattttctacaaactaacatttgaatttacagttgtaaaatgtgcaaatctgtaataacgagtcaggattcaattcaccttagatggactggttaggcaatgcctaacatgaaaacaaattatgcaatcatattttgctttccaagttttgaaaaattttttctgaccaaaggtcattccaatttacagtcctcactggtgatatgtgaaaatgcctgtttggctcctcatgattactattatctcttttaaaaatgtttgccaatttcatagataaaaatgaaatctcataattttaagttttagtattaatgtgactgaacatttctctcatagtcttattgaacatttattgttcttcttttaaaaaatagtctattaatagcttttgctcatttttctggttgtgtattagtcttttccttctggattcatagtt

SEQ ID NO: 58338 - DNA, 805 bp, Homo sapiens
tgagccaccgcacccagcctacatttcttagcaatcttaaaacctttcattattttatgataaggtagcactttagacgggagaaggttttagaccctgagttttgatatgagattatattatactacattgtctaggaatgaaaaaaaatcatatcatagtagtcatcatctattgtatcacagtagtatgatagtagtttgaggtctgtctcatcaaagcatggatgaaaatgttcttcatttgaccagaatgtccatgtcccttagagccagcattcttattctctggacagccctggactcacaggtcagacctgcctcaaaacaaacgattctgtccctctgccaggaaagctactgcccaatctctctacttcccaccatcatcatttgaatatccactcaaaggtcactttctagcagacagacctctgttgcttcctccccgcaagcccaagctgaatcaactctcctgtcatagtagtcatcatggtagttaatgttgattattactgaaaaggaaatggtccttttcaggcaaaaggcatgcacaacaatacacaaaggaggaaatacaaatgaccaaataacatatggaaaagtgtttaatctcactgtaaataaaaatatatacaaattaaaacaacagtgaacaaaattcttaacttattaatgtatcaaatattttataaaattgttttttatgtattcatttttgtaaatgagacgcctaatatgaatgaggaaacaaggaagtggctattgatacattgcaggtagggatgaaaattgctacaagcctt

SEQ ID NO: 58339 - DNA, 1712 bp, Homo sapiens
ggtcatctgtatgaccaaatctccttgaaaaagcagagtgagtttccaagtgagcatgattaaacaacgcataacaggacccacctgcggttgctttagctttcacccttctgccagcagctgcacatcctgaaaccacattctccctaaacaggaagaatataaaggaccccttggctaggtaaaccctgttgctgcattctgacactggttgctacctgtgtagatgtcatactgagtgctgttattaccctcgttttacagatgagaaaactaggcccagagaggttaaacacttcatccactcagtcacttattcatttattcttttaataaatttaaattaagtattgagcacccaccatgaactgagccctcttctatggctgtgaatgaaagttgctgccctcatgaaagttacattttaatggggcagacatgtataaacaaaaaagtaccccctcctaggtggcacagctgaaattgtaattgagcaatggacctcagtctggttgcagagcccatgggtttgaccacgactgcaaggccacattgagagagaagagaacacaccctggagaaggtgatccggcatcacctgaaaagccttcaagatggcatgactggggtgagatgaccacagtccagggtgtcatccagaaccacctcattctacaagttccacccagggagaggatatctctcccagggacagctgcctttaccactcttaggaaaccattttatgtgttcaaccttcctgacccctgtagcccacatacttactctgtgttctttctttcacattcttgctagtgcaaatgtcaattcaataagctattaatgattaataagaactaacttcttttagcagagctaaatgaggctgatgccagggttttcacatacatagtacaacagtgggcagaaatagctaagtggagttagacaaaaacttttaatatcattaaaaattatccatagaagtagggcagttggtgacagggctatcatctgatgctatgtggattgacctttacttaataaaattccatttgccagcccctgctattccttccttaatgaaaccaaggctcttcttgtcttacaaacatagatatttgatagataaagatcttttctaaatatccagagttaatcttcatttactagtttcgagattcatctcgattttaacttttaagaaagtatttatattgtttaacctctttgaaacatttggaattaactaggcctttatcttagtacagtgtttatttaagaactctagaaactttataaaggatttaaatcacttttgctaaacactgttggtagtttcaatacaggaaaaaaatattttctctgctattaattcagcttggtgtcagatgttgtcagtcccttggaaatcagcttcaactgttcagctttaattaacttttttttttaatttgtgaaagagaggaaagaggagaccccaaggaaaagacacccagacaccctgaagcctttctaatagcaccgcacagaactctgggttttccctctgggtcctctgtaattaagcggtacagccaaatttggtgagcacacttgctatggaaaactttacacgccttttctttctttttttttggtaacatcatgtgaaatccttgcaaatacaagggccttttatttattgacaaagggaacagtgattctagaca

SEQ ID NO: 58340 - DNA, 2235 bp, Homo sapiens
tctgactgaagagccatccgcttatgctatcacccacatagagaacacccacctgcagcagagagaacgaggccagctccctaaaggaggcagccccatgagatggaggaaagaaagggaatcctactaagagctccccgttttcctgtcattttgttttgttttgttttgtttgacagaggctaatgtggctttctgacaccagagacagaaatatgctcaggaaaataaaggatgaaaaagacatggatgtttccttccaatagctcacaggacagtgggggagacagacagacaaacaagcaaacggaaagaagacaggaagcactaagggctaaagtaaagccaccttttaaatgctgcgggagcacaaggaaggggactcaacacagcatcaattagagacatgtgtgtcttccacgtgttgggcactgtgctgggtgccctgcggttgactctgttaatatttcaagtagaatgaaataatttgcgtcctttgctttttgggcctttattggtgcctcttctgcaatgaatacagggtaccctacagtctgctaggattcagtgttggttcatctgtgatgtggcatttcttacttatagtttaattatgattgttctatgccaacaatgctgcagtgaggtctgcaaatgggctagggaaagcatttgttaaaatataaaaatgtaattaaaaaaagtcagggttgtctttccactagccaaattatatacttgcttacattttaggtactaacttattaaaggggggtcccaattatgtctccctttcacaatgcaagcatgcctttagccacaattatttgttgttggaaaactgcacacacaattgcagccacagttgtctaattgtaggctgaaaatgaagggcaggcagttaattatttctcagatgcctgatgctgcatgtcattagctggctgtggcacaggtcattgcacaaggcgttcttcagctacgaaaggtaagagcctgggtgacgcactccactgggtgtggacttggagagttaaacgcccgctcatctctgccagggtgtgctttgctccgaagagaactgacttccctgtcaacctttcacttaatactagcttacctattctctctgtcttgcttctttgtctgttctgatttcttcaggaatcatcttgtcagctgaagtggatgtgcgcttttaaaaaaaacaaaaatctttattccaatttaaattgtttttttcatttctgtcttccagcttttctcatattagaaagattggagagaattgtttctatggaagtggtgaacatgggacagaagtacttctctcttgataagaccagcatgtgcaaaccaggaagaaaaagtaaaatctccaataatagagagataaatcaaacaggaaaaaaaaaagtctgggtccgaaaaacacgtgcattcctgtagcagagtttatgcgagtttttttttctttttttcttttttgtgatgaggtcactattactcacatggctgtgtgggatagacagagaacatgcataaataacaagaaagcaagcattctaatttgcgcaccttgtttttttaagagtataatcattggctggaattaataggagcagctctgaatgaataacttactcagcatgtaagtgaaataactgagattagaatcctgaattgttaccttgggcctggagcatttacctccttctctacctgcttatctccatctcctccaaggtgtgttaacctcatgataatcaatcacttccatgatcaacaatctcgcttcttttgagatactcttaggatttctgctctaaaaacttagactactgggacttgattttctttgcttttttctcagaaatgtatctctttcttgtccagttgcagcaaaatcgagtgtatgcggagttaaactcctacaattaaatgtgccatttcagttatggtttcttattcagagttttacttttttgtgtctagatttcatctattagttttataatcttcattgtaccccctttgtgacataaaaattctattaaaccagttttacaaacattggaaggttaggagcaataaacattggtacaaaagtcccaattgaaattaagggtttctcataaaacactaccttttaaggaaatattgccaagtataatataattgtcttcactgaatgtatcaatcagagttcttgattgcagacaacagaggccaccc

SEQ ID NO: 58341 - DNA, 1163 bp, Homo sapiens
ttcatcatgtagaccttctcttttttaataatatcctgaagaattttggtaaattttacctgcatcttgtaagcaaatcttcacctttcccatacaattacatcattctctctagtcctgtgaattctttaaaaaccttaatcttttataattatatgaagcttgccttctttaagatgtcttttgttattggttgtaattagagccccctaaatattttaaatgcttctttaataaaatggaaagtcaggattcaaaacctattaaaactctgccaggttgtccagctgtcccggccactcttttagctgaaatcctaaaagctgtctgagatctggaagagatctggaacaactgggacccaaagtgccatggaaatcagcagattggccacactttactctggtttcattctgtcacaatgactctaaactatctatttcagcccaaggccaaaggctctgttgactgaccaaagttacaaaccacagtaaaactttttttgccaattgtccaccgcaagttaataaatgagaaagtttagggcccctggcacagtgttctcttttcaggagtgaaaatgactttttattagccaccctagccttgccttttttttcttttctcattcctttcttgctggaacaaagatttagaccaccaggattgtagtactaattaaaacatcaatttgttaccaataagaaacttaattagcagaaggaaaaatgtaatagtggagataaatggaaagagtgccaagcttccgaaaggtaaaggtgatagctagtattcgtaaagctgtctgctgtttacccctgctgttttacatacttaaccttattcaatcctgacagtggttgctattctcccctttacaggtgaggaactgaaattgagcacttgaatgcctggaaccacatatccaaccaatggcagccattgtcctctcaaagccggttcacttgttctcaagacactttatgtcgagccacagctacttcatgtactgggagcaccactcctgaagaagctgactcagcttcaatgcaaggaagaaagtctgactagttaggtggaacatgggatctgtaaagcatggtgctgtgcaagaggtggtggaatgcatgggcaaatgatctctggagactctagcaatcatt

SEQ ID NO: 58342 - DNA, 3907 bp, Homo sapiens
ttaattaagtgctaagtgttataggtgcacaaaaacgggagtgatctgttttaaagcctttggtaaaagacgacttttgagctgagttttgtcaggttaagaagatagcaagagcctcttgaatagagaaaacatcccgtgaacaatattgaggtgcgagactatgttatatacaaagaacaatggataatcctatgaaattggggtgttgattttaaggagggtgaggtggaagtgaaagctagaaaatggatttgggtcggattttcaaggtttttatatttcaggctaagtttgggggttttactcataaacaatagtcgaggatgcaaaagagtagaaaatgtggcaaaacatgcgtgctatacaagctgtttttcatcagtgaggccaagaatgtcctgcgactcagagctttgtcatctttgatgttttgcaaacctcttttggagccagactccaactgcaaatttcagactttctcttatgtttatgaccttgtatttttcaaaaggtttaaaatttcacattgctgctatgttccatccagtgaaggcaaggttacctgccagaaataatctgaaaggcaaacagtacagttttaccagtttctctgttatgtcattcatttccaagtaaagaatagatcaacaaacagacaaaatcctttttgtccccagacagaatttaaaaggttaattttatacatgttggtagattgttttctcctacatgtggtacaaaccacccgctagaggcaaattacttaaatcagctctcgtaaccacacatacatatttatgcagccagcagtgggaggtgtggagggcagggggattccaggtgactcagtatgtctggcatctgggtcaagaatttcaaccgatggcagaggggttgccaccataataggtgctgtgtatgaactgccaccaaatcactgcatgtgatttgtgccgtgtgaggtccttacagatctgttttgaggctaggcaacccttaatgtgaagcagctttgattttttccagctcattcagcatggacggcctggaggacttgctttcctgctagcttcttaggtgtctaactcctagttagttgtggtaagtctgtcctggagtttaaattttcccagtattgacataaatcactgcacattggaaaatttctaggtggctcaactatatgcagcacatggtgcccaacgtgggggaacgttcatttttctctcccatttcttttaagtgaaactgccatgaaaagtagacattgaactgtattttaatcagtattattcctctttcttgctgtggagatatccagttaccttgcactgacagatctttgtcttaggaagatccatctgcttagccccttttagcaaagggcccagatgttgctgcaaataaattgcaaactggcacaaaagccaaggagattcaaaggagaaggttaggaatgccaagccccttccttctttgagatgttaataaaacatctatactggattaaactggccacagtacaaggccacgaggcagacagcactatgaccccatggagaagctcacctctggagagaacaatgtggcacaagatttcagtttcttcccatggcctgggtagtcatggcagatggttcgacacgggctgatgtgggagaccctcctctctgaccctcctagacactccaccactgtgcgtggccttgaggaaatgaccaagagtgagtttaaaccatatagttctctttctcaaaaacttttagtttttgacttaacatcttaaatataaacatcccaactggatattcaaggccccaaaatctgaccctgaagttcttttcccaggttgtttttccaaatgacccctacaaggttgctctggtcggtcgacttgaatagcctgatatgctcctttctcacctccttgcctttgctcggttgggaacattctccctctttctacgtatcaacaccccgctcaccctctgagacccagctcatatgtaacttcctccaaaactcctctcctaaatccctcccaccaagatttccttctctggtttacttttctcttgcacgtttccactgctcttcatgcacttatgtactggagcctcatctgtttttagcctgtacactgaaagacaccattgtaggtactgtgagttgcagcccagaaacacaggagatctgtaaacggttactgaattgcaacaaattgtgttgtcaaaggtcacacagctggttagcgatagcaacagaggtagcaatcacctttcctgacacctaatctgatagtgtcagtaaaataaactggaatcctcttttcttctaaaacttacatgtatcgcttaaaaagtatgacatgtatggtatatatcataaaaaatcttttaatatgtctttatcacttctttctggctataagtaaccctcccagttgtcaatgagaagcgtgtttaccaggcagagagagcatgcagcatgctggtgggtgcagcaacgctgtgttctgcccagatctccttggatcccctgtaggagtctgtgctcctgttggacttctgtgtgcctgtacttctaaatggcctgcaacggcaactcaccttgagccctgccctagggtaccagagccatttttcccacacacagaaaactgtctgcatacctaggaatgtatgtttccttggggtggcccttagtcaatgagtgattggtgtggatgtatgaaagaccaactgcctggcctccagttgggacaagctctaaggcataattcattctcctgagctgctctcctgcaggagcaggcgggagctgggactttgcctgatatcgtgccttcgctcagatccttctcatccctgtcctgcttctcaaactcccccctgccccaccccggcctcctcacaggccactttctctatacatcccttgcccatgaatccacatctcaaggtctgctttggaagaacttaaactaaggctgtgttgtatggaagacaatggaagatggagcaagacttaatcattgctcacaaagaccaaaatcaaatggaaagtcccctctatggacagttgacgttcctaagtggctctttttggctcacaatcagaagcatccagagttcaaaatgcacagtccagatgatgacacacatgaggactgaggctttgtaagtctcacattaacacaatattacatttggccacatcccctggccttttgactgtttacatcctcagaattgaggggtgtttgagaaggcctgccaccaggaagagtgccggtcactggattattgagtgacattggactctgcctactttcccaaagtgaaaaagtctgttactgcagcaaaggcagtgctgaggagcgaaatgtatgtggatgacattgaatataattgaccatcatttcctatttgccgtcttcctatgtccacaggctggaataccaatattgcccaatcaaagggcaacttctctgaaagaaatagagaaaagagtaggatgcagctctattcctgggtgctccctctcacgtggtcctgaggcacttagcactttcataatcactgttgtaagaacctgcttccttttcttagactgtgagatctctgaggacaaaaacccatcttgcacgtgactgtgtttccagagcctggcacaatgcctggcactaagtaggtgctcaataaatatgttctgactctacatgggagccctttgaacatgaggctgggtccctggagtctgatcacattaggtttaccttcttagaacggatatagattaaaggattctggagttgaggctgtccctgctatgggccacagtcgtcacataccagagaaatggctgctccagttgcctcttgaaccatttccaatgtttctgc

SEQ ID NO: 58343 - DNA, 1387 bp, Homo sapiens
gctgggtgggggtgggatgggaagaaatgaagcagaaagagatggacaggtgacataagcaccaaagataaatgcctgcttcaaaatgtttcctagggttacttctgagcactgttcccttgaagactttaggggcatctgttatcattgtctgcattttcagatggaaaatagaagtcactgaggctaagtgaccaatcaaaggtcaaatgacagtgagtggtggagccagcgtgaggattcctgtctgttggctttttgtattggagtgttttctctcatcagcgcctctgcagccactcatcagcaccactttgactctcacagttgggtgagctccataaagcaggccaggaaaacctcccaagggtcaggtcaccggcagtttatgggacaatgctctgctgctgctcccagtcactacccttcacactaaaacagaaaaccaggctactccagagttacagggtatctatccccttccttttggggataaactcaacctcctcctatgcccatccccaagcccagccagtagaaaataatggaatagtgtgtgacctttatgggcccctctgaggtaggaaaatgtatgtggcaaggtagtcagtctagtgtgaagcacaggggctgtggaatcagctcagtgggtttgatgccgggttccagccccacggctgctgctagcccatttagtgcctttgttcatgttagaggaaggtgtcccctctagtgggtgcagccctgccagcatgtggctgggcaagtgaaacacaggctggattttggcctctatttattcctttggctgccagtgcctttggggcagtgagtgacttacgcaactctatgtaagtgccctatccagactttactattggtcaacctgagcaggttgcttgacctttctgagccttggtttccccatctgtaaaacagacaaaataacagtacctacttcgagggttggcaggaggttaaatgagatcgtgagtgtaaaatgcaaggacggtgccctgtgaatagtaagccagtgttctataaaatggcagctgttattactagctgttacagttatggcttggctttataaaacaagtaaagcctatactttttaatactctgttgaggagcttgatttgcctagacacgcattttgtaaatggtgggcaattatgaaaaagagaagcaagattcataatagattatttgttacattttaatacaaatgtcattatgattctttttggttgcaccatctgaagtaggcatatctgatatggaatttctaattacatgttttgtgcaagagagaatcatttataagttcacaccctgacacacccatgcccctggagaaaacttcaaattttgtgcgatgtcttgg

SEQ ID NO: 58344 - DNA, 1651 bp, Homo sapiens
aacttcattcaagttattatttggtaaattcttgttctgtttcctgagtagtaggatgagggatacaaatgaataattcagaagcaaacactgaggaatgtctgatttgcataggctcgtaaatgagcctcctaaactgggttttaaaagaaaaaaaaaagtgctctcggatagttctcaggccaagtgaggtcccagcgtgtttggtcggcagctctgctgtccaccccaccaggacccgatatactgtattctattatttaattatcctggttggaaggggacatatataatttagccctgggagctttaaaaaaattcttgacaattaataaatagaatagtcttttgtgtgattttaaagtcaccggagggcagacataaattgtcaacttacctaaaagagaaacacttgccttttctagagaggctcacattgtcttccagggagtgcatcatccataatttagcataactgccttgaaaataagtctataatccttaaataactccgtgggtctcttgcctggagtcttcctttcaacttctttcatagaagaatttataatcaaataataacactgattttaaaacaagcaaccatacacacatcactcaagaacttacttaaggttttgggggagccatttcattcaccaatcaaaatgaagcagcaacaacagcaaaagtcatcatggtaaaactttaactgaggagagcacctaaggactcggtgactcagtgttaaatggatgggaagtcaggtcatttccaattattgtggccttttacttcctgtttctcaggatcaaatgagaaaggagtgagtcaggaggtgggcatgataaccctgtatatctctgtggcagggtgccctattgtgcctcaatgccattcagacaggagctgtttatagatggtgactccttcaggtaactgcttgcagaagtgaatgcttgggagagttcggtttttgagcagaagaagagaagaattttgtgtctggcctgggagagagatggtggagggcggataaagaaaatagaaggggaaggcataaagtcccatctattttgctccccctccccaccccccaacactcatacaggttcacactggctggaggggtttctccagagcccaaaccaaagcacctagtttgcaagcttgcagctttgggaatctagacgacatgcgcagcattgggtggtgatagggccagtcttcccacctctaccttgcttccaaaggcaaggcggcttttgtatttagactcagggcagccacaagcattccttcttaagtagcccatcattataattcagcacgaatgtcagtgtgacttgttgccactcacaggctgcgtctggtgaggtctgggctattttggttttagaaataatttataaatcatttagaaatatttataaatgactttaatgtacattacactatctcatttaatcctcccaatgaccttaaggagagtactactgaagagacagggactcaatggccttttttttttttttgagctggggtcttgctccgtcactcagactggagtgcagtggcgcgatctcagctcactgcaacctccacctcccgggttcaagcaattcgcctgcctcagtctcccaagtagctggga

SEQ ID NO: 58345 - DNA, 731 bp, Homo sapiens
gaaaaaattcattttgtttgtgccttaactgaagaagataaacaattaacagcacaaacaatggccaacaccatagacatcccgacttgttcagtttacacaattctgactgaaaatttaaagttaagcaaactttcccttcaatgagtaccaaaaccattgcacccagatcagctacagatgagagcagagctttcaatggaaactggaaacaagtgggatcaaggtcctgaagcatttcttcgaagaactgtaacgtgagatgaaacatggctctactggtatgatcctgaaggcaaagccaatcagaacaacagctaccagtggaagcggtccagttaaaacaaaagcaaaggtcaagagcaacggtcatggcaacaggtttggaggatgcccaaggcattttgtttgttgactttctggagggccaaagaacaataacatctgcttgctatgatcatgttttgagaaggttagccaaagctttagcagaaaaatgcccaggaaagcttcaacagagagtccttctccaccatcacaatgttcctgctcatttctttcgtcaaacaagggcaattttgtgagctcccaagggatattatcaggcatccaccttacagtctgatttggctccttctggtttctttttgtttcctaatcttaaaacatccttaaagggcccctatttttcttgagttaataatgtgaaaaagactgcatagacatggtta

SEQ ID NO: 58346 - DNA, 1848 bp, Homo sapiens
cactgacgggtatctagcgtttacgatgcaaataaaactctgctggtctctgaggatgcagaaacaagacattgtttttggtcttaagccgttcacagaatgcccgggggttacactttgcatttaagcacggacatataacttccacctttaaaagtcctggatgtgagaaagataagaacaacggataaatgaaaatattaacaaaacgtctgagtatgccagaggccacgtgaaaagacggtgtgtggaaacaggtgggacccactgctaagctggatgcgcgagtaggacaaaaaaattggcccccactcccgggcctcacccagacacaaaagaaacgtcctctgccctcagaggcgcagcctttcctcagccagcagagcggctgggctgcagagtccccgcccccggccggcccctgtcgcccgcgcctccctccctcgggcctcggaagtgacgcaagcgcccccccaccgccgctagatccgctgctgctgccgcggcgggcagacctgcaggaggcggcggcggcggcggcggccgaggctgaaggaagatggcggacggcgtggaccacatagacatttacgcggatgtcggcgaagagttcaaccaggtacgtgagagcccaggtccccgccgccgacgcgggcggcgctgcggccgggaagctgacccggggcccgctgcggccgcgagccgaagcgactgcagagtgtgcgcccttgccgcctctgggccgcgccgccgacccctggcgtggcgcccccccgcccctcgttctaccgcgtcgtttcacgggccgcgggcgcggcgagtcgccgcggggcccggagcgcggacgcgggccgctgtgcagctgccgccggctcctccctcgccggcgctgcctcgctccctattgttggcggcacccggctggcgcttcccgccgcgctaggcccgggcggtggggccgcgtgtaagcggcggagagaactggccgccgccgcgccccctcccccgtcgctggtcggaggaggaagccctggcggggcgcgtgcccgccgccgccgccccttccccgccgctgccgctcgggctccgattcctcccatcgctccattttgtctccctgcccgcgcactgtcgcctcatggaaggccgcgttcacggccctttgtatcccgcgcgcccagtccccggggctctccttctcgggtttgcgacaggtttcggcgtggcgccttcctcctcccctcacactttctgaaggcgactgaggtgcgggctcatttgcaacaagtcctttgacttttggagccacagataaaagtcggtgcgctggtcctgcctcattaatccagggcttgcagtgctttgaagcccagtcgttgttggcctttgtgatgaaaatacctgtgaagatgagtggccggggaccaaaaggaagaattggaagcgcgatggttggatggaacaaaaagatgttagctcacccacagatctcatagtgattaaaatgaaagaacgttcaccccaaatccttatgatgtggtttaaaaataaagagttatagataagaccctattttcgaaaacaaagtgttaaatccccccacccccacccccgggccccgtgttaccttttgaaaggttgagcgaaagtgagaatgcaaggttttcctgaacgacgttgcttagaggtaacgcggggctgtgatgtctgttaatgggcatccttgcaaaagatgtcgtttgttgctagtgacgtttaaggtttgaacctgctgttcgtatctactgcattttatgtagtaacacatttaaaacaattaaattgtgcttaactgcaatgttcctaaaa

SEQ ID NO: 58347 - DNA, 582 bp, Homo sapiens
aggacttttatcaagaatagataataaaccatacatatatgagaacaatagaaacccaatagaaaaatggtcaactcgggccgccgccgctgccgctgaatcatttgagctgcagcgggcggtttcggctcttggccaggagccacttgtgcggctgcccagagaaccagaggtcctcgatcccgtgtcgtcttcctcttcgcccccaggaggagcgagagggagccgcggttgatgtgagaaatagacttccgggaaatggcctctaaatcctggctgaattttttagccttcctctgtggatcggcaataggattttttgttgtttttttttttttaacgttctcagctatttagtattttgggagaatagggtgacacccagcctaatattcttcataatgatcctcatgcgaggcattcagatgataatggcacaatcatctagaaggacaaatgaacttcaatgctgattctagccaacataaagatgagaacaccgacatcgctgaaaacctctatcagaaagttaaaattctttgctgggttatgacaagcccttaaaacctagagaaaaaggcc

SEQ ID NO: 58348 - DNA, 1957 bp, Homo sapiens
gttttcaagctgatcaagtttatggactttaatctggccaacagtcttgaaaacagtgacccagtagttgggaaactgaattcaggactcttttagcaagtagaaatcaaaagactatctaatcagtgggttacgacagtcattcatgcatatgctttcactacacttacatacaacttttcttctaatttaacaaatatgatttagttaggtttaaagttctcctttaaagggtaatgtgtggttttacatgcctagcttttaactactctttaactaattcatcggccttctgtaatctctctcccttcagaggttactgttttacctaaattggatttggagagctacgtcaggggtaggagagagagagcaacagtggccattatcagaaaagaggtttttcaaattcttacattttacttaaattttagcagagaattataatctgggatgtcgcttgtaaacaaggagcacttgccttgggtcacctgcagagctagagagctgagccggcgggtccctgggcggtagctgttttactcttgtaaaagcgctgccttttgcctgtgctggctctgtttctgtgaacttccgggctgccgagcctttctttttatttactgcttgctcggctgcacggctttcggctcctaatgccttttttcttatctttttataaacatacacctgattgccttgccgattctgcattactgggcagagtaagagctctgcttctaatgctgcccgcttaagacagggactgatagctgtagcatatcctaggtcttttttcctatctattggaggaggaggctcaggtataaacccccgtttcctctgttatttcggcccggtgatattagggtggagggaagaggaggtgataaggcaggtgacattttctcctccttgctctttttaggctcttctgcgtgtaacagagctaaggctgctctaattaaagcctataacgttaaagctgttactgggacctgttgcctttgcacatgttaagatttctccccatttgttcccagagttctacgtctagcgttccttcttccgggaaccacgggcttgggatcacaagagtttgcattgcaacagtttgtctagcatggatgattaggtcccttaattgagcctgtgaaactgaggctccgctagccttaagtaactgttttaatactttcatataatgtttctgctgtgctaataactgtggtcccatgatgaaaactcagcttgacccaacttcccccagaacttggtaactttgagtgggcaccaatgacttgctgattactcactgacttgaccgcgcggttcctttcttcacctttgttttccggggggtccgtcgcttttccttcacgcttccttcgcagctttcctcatgagggcagtcctcactcttcctaggcagcttgcctcaggaggggctccaactgcggggagtctgtttctgcagacccctgactggcctcacacggctttcctcacagggctttcctcacacgggtttcctcacacaggccaccagctgaggtattgctcctcacacgtgaaggcattagccgcggggtctgccctcagaccctgacccaaacgacagatgaataaaacgtacactgacacacagatattctgttttgccagtccagctgagtgtccagccgcctgcacacctagagaggtttgtcactgtggacggccctgagcagctcgaactccaggcatttatttagtatacaattaacaacagaagctttgagtaaacttgagtaaacacactttgagtaaacttgagtaaacacacttgtggataattaacatggttaagagagtagttctaggaatgattaaaactcaggtaccacggtctcaggtaaatactatcaggcctctcagcccaagctaagccagatggcctgaagcaactgaagatcca

SEQ ID NO: 58349 - DNA, 626 bp, Homo sapiens
tttgctgactctcttcagacttagcccacctgcacccaggtgaaataaacagccttgttactcacacaaagcctgtttggtggtctcttcacagggacgcgtgtaacaaataccattagggggcaatatccttggtagacctccccagagaaggccatctggctcaaaggttagttaattgaagttgggtaaacagacttaactggggaagcctctgttgtcccttgtatttaccctatgacctaatgctctaaggtaagaactggccgccttggcctgttcaattattacaagctatgtaaactttcggccttctaaaaggtttgtgactatttcctataactttccctaatatttccctttattctttctgccaccatcctgagtgaatcccaacagttttctccccttgcaaaatgtaccacgttcaaaagtttgaagatcactgtctttattatcatcttgcctttcattttggccttccttctccaaacacgcacacacccccacacacaccaaatcactttagtctgtcctagcaaaaagtgatctatggtcctttttggcacacaaaaaaatacaattgtgtcattccttttactcggaagacttcagtttttacattg

SEQ ID NO: 58350 - DNA, 498 bp, Homo sapiens
gacctttagtgacctcagcgtacagttttttttctttccttattaagtcaaaaactttcaccttttcacttaaaagaagcacttacggcttctctttggcatattcaaattgccagcatcactactcttgcgctttggggccattattaagtaaaataagggttactttgaacacaagcactgtgatactacgacagtgaatttgataacaggctgactactaagtgactaataggcgggtaatgcagacagcgtggatctgctggacacagggatgattcatgccctgggcaggatggagtggaactgcaagagattccatcctgctactcagaacagtgtacaatttaaaactttatgaaactttctggaattttccatggaatatttttggactgcagttgaccacaggtaattgaaactgaaatggaaagcaaaaccgtgaatacgggaggaccactatataaattccacctattgaattatctgatatgagtt

SEQ ID NO: 58351 - DNA, 1208 bp, Homo sapiens
tacaaaagccaagactgtgtatggggacaggtgagggagaggattcactgcctgtgatcccctggccagtcggggatccatccatttcacacatggatgccgagaaaaagatgtctgagagggcagtgggcaagaagaacagttgtggccgactagcgaggggatcacaggcagaaacatcaaccctttaagatgccatgagcattgctgcctgaaggtggcatctctcactctgaagaattcctgtgaagattaagaagccttgcaatacatttttggaaggtcagttcacatctgttttctatttgtcatattctgtcagcacttctgtgagaactgagccattacaccagccttggaagccagaggcagctggatccttcaggcctggcatctcccaggcccgcggtcctacctcagtggaggaagagtgggaactgctgtgcattccaacttcagttccctgtgtgtgccgctgccaccatcgctcacctgcaaactgcttcaaagagcaaacaggcactaagaattcagcctggtgaatccattgttctcctccccataaaacaacaaacaacttagaggcttttcaatcctctgatgtgtttaatttgttatctagcaacaaaaagaaggaaaagaaaaagaaattctcccaaattctatgcaatttacagtcctgcaactacatacggaactgggatttgcctgagagacatattgcaaaacaatcggccccaaggaaaattccagaactcaacaacactcacagtggcctagtgatggttatcagaatggtgtttctaaatggtgcttatcagtgtgcagagtcacttatcaccagtaggcaaagagttccatggatgtggttcaaagggcagcccaagaagcacctgggtcacattcctgcccatctgcctgcagccctcccacgccagtaggtaacctagacttgcttcacagggtcggggtttgggaagacaaggcatctatgacaggctacttcgctcagatcaatgtgtaacaatcaatgcccagtgcttaattttaacaataagaattttatggtgagagatgaacagtcaatacttaagttggtcagccggtggcggtggctcatgcttgtaatcccagcacttcgggaggccgaggtgggtggataaggtgaggtctggagttcgagaccagcctggccaacatggtgaaac

SEQ ID NO: 58352 - DNA, 1047 bp, Homo sapiens
ccaccacacctggctagtcaggtcttaaattatcaagatcttgggtgattactttgaggcttctgagcagatgagaacgtatgaccgatgcctgaacataaggctgccttggtaggaggctaaaaatcctgtgactctacagaaatcggttacagaagtctaattatttgtgttcactagtaattctgtgttgttttagaactagctttaaaatgaggaaatacttaatttaatgatcactacccacgtactgtgtttctgtgactatttgttggtgtttctgtgaaaacaacagcagccgcttgttactgcagaaatggtccctttggaaatcagcagcacttcgtttaacgctggcatttttgttgcgtgtctccccagaaatgcttggcttaatattcttacaatagggaaaaaaaaaaaaaaaaaaaagcaataaaagcttttgaagccaaatgccccttaaaaaaactgctgatggggaaatcttttctcacacagaaagagatttcagttaagatgatcaaataaaataagctatatttaaagtttctggctctttcgtttaccttagtcaaataaagcttgtgtattttagagatgaaatcaaaggtcattcttctgatagagacagattctggggattgtctcctatttgggaagccattttagcagtgacttcagccttggcaggtgataatgctgttcaagtcatattcagtaaagggaagagttccaaaatctttcatttctgtactgaagatcctatgcttgcaatatgtataaggcattatttactagccagcctggcccataaagtaatgtggtgaaaccctgtctctactaaaaatacaaaaattagcggggtaggatggcacacgtctgtaatcccagctaccagggaggctgaggcacaagaattgcctgaatccgggaggtggaggttgcagtgagccaagatcttgccactgcactccagcctgggtgacagagtgagactctgtctcaaaaaaaacattgtttattggttttctgatctgcaccaaa

SEQ ID NO: 58353 - DNA, 1712 bp, Homo sapiens
ccccaaggagtttggggatgattaaataagttaatgcacccgaagggacttaatacagtgcctaccacgtagtaagcgttcaataaatgttaactattatcattattttttaaaggaggcagattggagcgtagagtacactgaagggagtcgggaggccgggtgtaggcactggattcttgcacctaattctccgagcctcggtttccttatttgtaaaattagctggctggagtaaaacaactcaaacagcagttaaagcaaagggtgcagcagtagccggggaatcgaggaggcgcggggcggaaagggttagttaggagcccagaggctgatctgtgggcgcccggcgagagaggccccgccccgccctggaggccctggcagctccgggctgagagcagttccggtgccaaaacccttccctcccccgctcccccggaagtgcttttccaagattcgggccggagagaggccttgtaggcacagcggctgagactcgatctgctccaagtaggggctccagcgcgggtcggagtctgggggttcgcgcccgccgacccgcgccctgctccctctcagcacctgggcggacggtgagtggctagggaaacggactgggacggccgcgggcccgcgtcggagctggcgttctcgtgcccccgctgcccgcttcgggatccgggctgagggctcggctgccggcgtccggggaaggggattgtcgaccgccgcggacttctccgggccagcgggacgggaagagctggctgtgggtccatggggtgggcggggcggagccagggagggggttcccagagctgttgttgctgttgggactcgagagtggggatgggctgggcctctgttcgtccgtccgacccccctcatgtgtgctgccccaaacctcgccgctccctagtttggtattctgtgtccggcctggggtagtagctggacaccagactcaatcttgggctccagttcccgacttttcgcctcctctgggtctgtcctggggtcagtaattaacccgggtcccaggggtgtcgtcttttccctccagggtggggcgctgcctgtacatgccagggatcttttgcagggcttttcatccagatttgcttcagggttgtccgggatcgatttggactgggctcggaaccggtcctggatacgtaggtcgctgtggcaccagcatgctctgtatcatctttactcacttgaaagcttgctgaagctgttgttgaagtaaacttaaagaaaaaacttgcttaaggaaaatcagtagtttagacaccccctcccccgcctttttttgcagacatactaaaaaaaaaaagatgcttttctctaatctacactcttaattcttttggctatctgatgtcacagttgtatgatgagttcattcagaggctgtacgaattgattttaaagagttggacagttatatcctttctcccaaagtttgtttaccttcatatttggaactgtcatttttcttaaggaaaaattgttcttggattttcttgagagattccttacactgttaaaattgttgctgcaatgcagagtttcacacaggtgggcagagatgttttgtttaaacttattccatgaagtgtttacttcggataaactgaggatttcctaggggagaaagtgatgtaggtaggtttagtgaacagattttaggtagtaaactttac

SEQ ID NO: 58354 - DNA, 506 bp, Homo sapiens
caccatgttgaccaggatggtctcgatctcttgacctcgtgatccgcctgcctcagcctcccaaagtgctgggattacaggtgtgagccactgcgcccagctgaagattacactttttaagtgtcggagatgttgacggtggtactcttactagaaatacgggcaaggaggtacgtaatgagatcagttttggatttgttgacttttttgtatacttgccaaacgctggaaatgtccaaaggcttttggaaatgtggatttgtggttaaggggagaggtcaggactaggcatatattaaacatgggtttagtgaataatacaaataggtgtactggttgaatctgtgtaagaagatgaaagtgccaagggagaatgtagaggggaaagaaaaaaaaaacttctgttttaaatggcatctgtttaaaacagaaggaaatatgctaagtgatttattttatgcagtgggtaaagaatttgatagtatgtccactgcttcttcacactg

SEQ ID NO: 58355 - DNA, 696 bp, Homo sapiens
aatgaggcttagagttgtaactttttgagggcaagtttattatttttagactgagttaccatggaagtgtttatttccttcttgagaattaatacattccttttgtttttcaggaatatgttttccactatatcacaggcacttgggaatgtcgaaagagtcctgtgtcagtgttgttggaggcagggggttttgtgtgtgctttgtctgggctgtttggcttagtttcagtaagcctggtattaatgaggcaaaggtcaggagttccatttagcttcagtctaaatgatggccagggagtacacccctcactccctccagctgtcttggaaattccttggttgtcattggtcacaaaggtgactagatgagggtggattgttataccactggaagaatattagaggaaacttaggataatggctgggacctctgactctagaattagatagacccgtgtcaaaatccttggtattcaaccttgggagagtccctaaacttctctaagcttacatttcctcattattgaataggttaatatttggtttgggcattacgtatcatcactttccttttctcagtgggagctagccacttaagcttgtggctcccgaagtgctggactgtggagtagtgtcagttcatgacagagttttcctttgagtgaaaggagaatgtagttggcttctttaaagc

SEQ ID NO: 58356 - DNA, 491 bp, Homo sapiens
gtcttatatttataaaagctttagataggaactgctatttttctaaaattgttggtttaaaaataattgttacatttgtgcattttaaaagttgcttctaacacactttgggtatgcttgagctcagccttttcagcaaagtatacagacatttgggcatcagcctttttggtcttattctgtctcagacgatttatggattgtggatgtcagggatttgataagctcccattaaaatatgatgtggtttttaaaattgcttaaaatgccctttgaacctgttaaaatgtgctgccgtcatctgaattaagaaatttagctgccgggcgcgatggctcacgcctgtgatcccagcactttggaaggccaaggcgggtggatcacctgaggtcgggagttcaagaccagcctgaccagcataaagaaaccacgtctctactaaaaatacaaaaattagctgggcatggtggcgcatgcctgtaatcccagtt

SEQ ID NO: 58357 - DNA, 1386 bp, Homo sapiens
caataatattatctgggaatatgatagtaaatagcccctccaaaaaactgaaaaagttgaaagcagttttcctggagacaggaagtggtgaggcagataaattatgtttttccttattggtatataacactttaaactgtgtacatgtgtgactttaatagaagtgtttaaagattaaatttaagaaaataaaaagtgtgagcaagaactccatttctatggcaacccgcgcggcagccgcctctttgttctggagcggcggccacgccccctccagtgtgaaaggctgcgtttccggcccgtggggctccaatcaaaatgggacgcctgctggcggtaacgacaggccggggccccgccccccgaagtagggcgtgtggcgtcacttccggcttccttcagtccgctggtcccgagcacgagctgtgaggggattcacttgtgtgcggaactcctcggaaccatggtgagcctgactcccctgcctcttgccctacccctgctccgccgtgctcttgccaccccactgcttcctctgtcctgctagggtcgtaggctccgtttctgtctccccggccctccgcacatggtgcgagccatgcgcggggcgtgcggcctgcgccaggccagccggtggagctcaccacgagggggaggggtggaccgcaaagccagcgtctccttgtgcctaggtctttgcatagtcccggcagcccaggtccgcgcctcacccggagcgaagaaatttctagtgtgggacccgctccgccctccttctaggggcggagcctggagcgacggggtctgagccatcagagggtggaggggccgcagccttccgagggtggaagatggaggccgcgttccctcgcccgcccggcaggcgtcaccttgatggcctgcaacccctccctgcctcattcttagttcaagatcgtctttagtctcgctgtacgtaactgtcaatctcgctggtgtataatttatactcccgggggccttgtaaatccgaaaagccatgtcgctctcctacaagtccctctctcccacttaaatgctttctccgatgatggaagcttcatttgattgaaaacattgttgtaaatgagttttctcttagatgtccacttgtaagactagtggaaggcacctcagtgtatgtgttagagtattggtacttaaacggaatgcctcttggttttccttttcaggcgtccctttcccttgcacctgttaacatctttaaggcaggagctgatgaagagagagcagagacagctcgtctggtaagccttgttctaagcattgttttaaagataaaactggaggccaggcgcggtggcttactcctgtaatcccagtactttgggaggccgaggtaggcgg

SEQ ID NO: 58358 - DNA, 884 bp, Homo sapiens
gctctgtaaagtgcttgtctggctggtctccctgatggtggacagctctcccatgctgaagtgcagcgtggggcttccttctgggaagcaggatttcttccaggtgggtgaggccctgggggggtttcttgagggcacatccagtaggtccctggctgggctgaggtcatctcggggtaagaacatggagctgtcacttgtctgcctcctgtagcttcttcttctggggctggaggggtgttcgtgggcactcaggaaccgcttgactcttcttatcatggaatgccgatggccatgcttctcataatcccacagccactcctcgtcaggaaagtcggacccagacagcctgaaacacacaatgacaagatccaggcagagtagcttcgggggcctagctttgggggcagagtctcaaagttaagagatgactttggtatttttgccttatagattttttaaatgggggtttgaggacttgagatagtctagcagaggctcacacactttttgatctcagatcccttttaaactcttaaaaattattgcgtatcccaaagagatttgcttatgtgggttatatctattactctttactgtatttaaaattataactgtggaatgtctgaaacacaagcacgtacaagcacacattccgttgactgctaagtgatgacatcaccacatatcttgtggcctctggaaaattccactggacactcttgacagaatgagaatgaaaaaggcaaataacatgttgtgctattatgaaaacatttttgaccttcaggactctctggagtggtcttagggatccccagatatccccagactacactttgagaatcaccgatctagagacttggacattaagaaatatctat

SEQ ID NO: 58359 - DNA, 656 bp, Homo sapiens
agcaccctgtaagtgggtattagatctcaaatattgactgcaaaaatggagagttagtgaagagaaagcttaaatgtccaatagcagattatttcctcaaacttgtttggtgttaatttcgcaaaagcagccgtgaaggcaaaccttatggatgattctggttctattgcaagcggtggcttttcaggcatgcctctcagcttggaaacactcccatgcagagtcatcggtgtcatcctaacggagacagctatgtggctgcaatctgcgtgtgacctatacttaccaagcacaaaggttactggaatttgttcagcatatctgtcacagtaaattgataatttttcaaagtaacgtttttggactcctgtaagtaacaatctggagcaaaaataaaatgcacagccctttatgatattatacttctgcacctgctttgcaagtgacattaagtgcaaacaattaagcacaaataatcttttatttttgaaggatcaataattttttccttttttcttaaactgatgtgtctcaaaagctttttaattgcttaatgtctcaagtgctaacattttgtaaacatgattggctattaaatagtgggattaattaatcattttattttaaaaactttatattttaaaagttttatatga

SEQ ID NO: 58360 - DNA, 1754 bp, Homo sapiens
cccctcccatctcccgccacacacacacacgtcgtaaggtgtatatggccgcggagtctcaggttggttctaggagtcctcaacccacggcaaaggtgcctcttctccctcctggagagcccaacatgcttgaagttaacctgaggccgcctctcgggcccggcgaaacagagcgcgggcccgacgaaacagagcgcgggcccgacgaaacagagcgcagctccggctcgcgctggttcccagggaaaccgcccgcggaggaacctcgggccagggccgtgacacctgcgacgagccccgcctggcgccagggggcgcggaagcgcgtccgcccccaggccccatgccgggctcgccccgcccctgccggccacacccccctaccccgccctccctccgtgaggaccggccgctcccggctcccggcccccggccccgcttccggcgcaggcgcagtcccgcgttccctcggcggctgccggcgtagtgagcccgccgccgtggagtgtagcggaaagggctcgccgtcctcctccgtttctcgctgcttcgggacgcgctctctgcggctctgtgagcgcccctgagcgccggcagcggccgcggtgggttcttcaggtgagtgcggccgcgggagggagaggcccggagcgtagagcaccgcccccctcggcgcccgcgcgcccgcctctggcgagtcggccaggaggggcggccgcggcaggtgcaggtgctggcgccgtgcagggcgcggcacgcgggggttcggggggatgcccaggcccggtgagctcgctctccgcctgggcacttgggctccgggcccttgggggcggcgtgtgggggggactttggcgacccgggtcagccggccgccccctgggctgctggtgggcgtcgggcggcggctcctcccccgggcacgggcgcgttacacattaactgcgcggtcccgcgcgcccggggcagggagcccgagtccagcgggttacctggcggcgggcgggcgcggccgggagcggagggccgcggtcgcgaagaggatgaagagagagttcccgaacaagtcggaagcagctcacaacaccggacgccgcgcggcagggctgtggacctggggtggtttcgtgtcccagtcttaggaaactacgcgcgaggcaccgtgctgaggcgtagaggtcaccctcgggaggtttcggtgaaacctggtgggaaattccgggcaggcgcccggagtcgcgcccaagtaggcagctccgtgccgccagacttgtgttcgggggagttgagacgaactgcacgggtgggattgcatggctctgccctcccagcgttgacaactcgccccgaccgcccaggaagcgcgagcttactggctccagaagtgatgatgctgggtggaagtcgcagcatgtgaagagttgccggttgttatgggattaaaaaagatgaaagggtaaggtcttgaaagacacgagcgctgagttagttagtactgattactgagaggcaatttagtttcatggaaatgttgcctgttcggaggctacctgttatacactctcctgtttcaccccaactccttccgttcagtgtcgggttaaaagccttgtaatctcttgcagtggaatgattgcataattggaggaggggcccataagaggattacaacaaaactgttccattgtaaatcagttgaaagacccagttcttgttcattatcctttttctcattttgttgttcatgaaggttt

SEQ ID NO: 58361 - DNA, 1049 bp, Homo sapiens
ctgcagtgttcctgcctgttgacttccctgtgctcccctctcctgccttagtgctgctcactgttgtatccttgtgcctagcacactgctcttcattacatatgcaataattttgaatgaataagttcatttagcgtctagttgaaataaagatatacatttcctccgagagtctcctaatctgccggtcaggcagctgaacaggaaaggcaatgaagcccatttgcatggctagttcttggtagacacatgcaggtttctggatgttttctgctgttcttagagtccagcagccaagtttttaataatccttgccaaatttttgcatctgtgacagttttagaaaacccacgtgggggttgccatcctgttacacaatgtgcttgaactatttactcaagttgaataaaggttaatttttattttatctctcaattatcaggcacataaattccaggtgattcatgtcatgtgaaagtccagccagagacagtcttttaattcagttattatttccaacaatgggtcacgttacttccgtttgaaataactgattagattcttcttgggtcagtgtaaaactatctgcacaaggagactgggagattcccaggattccaggttgttaggtggagtttttcttgggggcagtgccctgctgctcacttctatctccaagagtacagaagagtacatggccccatgcagataaactcatgctccttccccggctcctcatccagttctctcatatttgctatttcaagtgaccagcatgaccatcaagacagggactggggaatcacctagatttcttacagtcagtcacaaaattcaatggcttatcctcccaaatactagccacatacagtgatgtggtaaatgtttaatgagcaactctctagttttaggggaagggaaagttgggaagcagccctgatttgtagcatttgctcatttccatggtgtaaatgctctcactatggctgatttcaagctactcacatgatgttaaatatgaagttggaagagatgtgcacaagcttgta

SEQ ID NO: 58362 - DNA, 837 bp, Homo sapiens
aaacattttgcaaagttaactgaagcaaaatcagtttatttctgatttccagaggcaagtaaatgatgacatgtgatggactcctcactaaactatgggtcatgaaattcaggatttatgttcactttcaccactaattgattgagtgcattctttttaacctctggagaattgtagcagtggcacttgccacatttcctactgaagtattttgcagattaggtcaaattcttaaagtactagcactttaatgaaacgtacttgctcaaagattaggaaaagcaatggagaagctgtttcttgattttataaagaatccaggaagtgtttgaaatacagttggatttcaacagatcttgattgtgaccttccagagaggcattcataggtctggaatttcccaggatgctttgccaggaattagtgttgaattaccagaaaatcagtatgacacgtagcacacacttatctagatagtaagtcagcacacacacacacacacacacattcacacacacctttcattgttggtggagctgcaattcaggagaaaagggagtgtcccaagcagagatggaaatgattcattttataagttgttctataaaatggtcgctagctggaaatatacctttattcataataaaatgcaaattccttagattctgtactgtctttcatatttattttatcttattttagatttattttcataactccccatgcaattctctcagcgctttctagtgtctcattaatataaactatgctcaatctaaatcatctccattattttcctccattttcttttctttcattccgtgtgtatgtccttgg

SEQ ID NO: 58363 - DNA, 652 bp, Homo sapiens
tttagggagttcaatctctggacagtaactcacgtaaatgctaaatgtttcagtgctctttttttgcttctctccaagatgatgtctagggttggggagtagtataggcagggtttatgcgtcaagatgggtgtccccaaatctatgtagggctctgacctcatggcttcagatgtacagtggctggaacaatggcagggcaacccttatctggtaactgagtaaggtggggtagaaaggctttgccaattcagcagattgcaacacaataccgatgagtcattcttactccagaatttctcttcgggttagctgaggctttgttggattgcatcacagttcaacttcgccccttgaccagtcctgcttcctccctctttttttcacaggtattacacccaaactctgtctcaaaaagccaactcacaaaactcatcaattcacctgtcttctgccactgccttcataccatccctacacattgtgaggagctaactttgaaggctgtttccaaacactcttctttggaagacaaagtcttcctctgttcaaaggatgtatggcactattcccagtgctcttgtcctccttttcccatttgggtaattttaaaagcaatccctaacctcttctcagagcctgtcattgaacg

SEQ ID NO: 58364 - DNA, 2776 bp, Homo sapiens
ggactatttgcagaagacggggagaaagaaaggaaagacactagtatgtgttgttcctcctcgaattttcctgaagtgaaaaaaaaacagtgaagtagagtgtttgatgaaatgaataaccaagcaaaacattttctacctacaccagtaccactaggagttgaaataaattcacacaatgtctgctgatatgtcaaaacaccttaccttcaaaaacatgacagttaccttttattttatagtatgcttgtgtttcttcctatttcttgcttttgaccttcaatgataaatgtaaactggattacagtgattcttttgtaagtaaaaggtgactttttaaaagaaacaaccaatggaaatagaaattttatttacttcaaattaactgtactttactcaaatagaaaagaataattttcacattatgaagctacacaattccaaaatacacatgctgaggctctttttaagtccgaattgtctagtaattacaaaaaagtgaagagtttacagatatacaaggaaataaaggcgaattattgcaaagaaaacaagtttaatttcactttgaatgacaacgatttttctggaaagcagatacttcactcctttaagtttccacccaagccacaataatttcaaacggtcttgcggatgacccagctggtcactcttgtttatgtggggactggaggtaatgagagccaaaaaaagtgctataaacctaatttggctagagcaagttcacacgacacgaccgtgctttaaaaacttgctctccattatgtacttccttccatcaggttggggaaaaaaaaatggtggggatggtgagtaaacacaccagtggtttcatcagaggggaactcactactcaggaggtgacggtgacgtggtgccggtccctgaagtacgcgcacaagctccggaggttgcgggagctgagggaggaaacagggacacgatcagattcgctccaggtggcgggagtgaggaggggaggagtgacgaggcggacgtgcgggggcgggggtgtccaacacaaacacaaacacaaacacgaacacgaacacgctcagcgtccccggggagggcggactgaagccacctcaccattcatcgcccctggaccccgcagtccccctcggactcagggccagagccttctgcgaagcaacctagccccagggaaacggtagcggccgcagaagccccgctctctgtaacggccgcggaggagcagcaagcctccctgtgagtcggtgggagacaagacggagcggcggtaagggcggtagggaagtgaagcgcctctctccaccttgttagaagcgcgctgaaagcggcctgcctacccaccccatcgctgccgttttgcagtcgtcgctcccaccttccgctgccgcctggagggaagccggagcgacgggggtcacggcggcggtcagagggtaaaggtcttgctcccagcagcctccgcggtggatacgtcgccatcttggatccgcgggacaagaaaattcatgcggtgagtttttggtaaattttcggaagtctggcagcggggcgcgcggcgggggcggcagattcggggcccccgcaaggcgggggaatgccccggggccggtccggtcgcgcccagggtccgccggtagcgtcccggcccaccgcttcccgttgcttttgtctcggctccaatcgagagacggagagcggagcgggcggggaggggggtggcggcggtggagggagggagggggtgtgtatgggggtggtggtggaccggacgtaaagcgtcgctgtactcgggccgctgcagcagcagcagctccagatcctaggcccggtcccatccgcgagtggtggggcttccccagactccactcccctaggctcccgccagcgcggaggagccgctgccgccgcgctgcttcctgggggagaagagaaggcggcagcggccgtggccgtggccgacgagctcgagcccgctttagacggctctgccgccttcccggcagctggtgctgtctgtggcttcttaccttctctcaatacacgtatatcatctgccagttatgtgtatttctgttagtgtgtttgcaagtgtcagatgggagacactggactggctaacgggtgtcaggatcctgcaggccctgggataccgaaggctgtgcatggtggagggagaaggaatgcaactgcgatgccgcctctgccaccgcaccaggaaggtgaagcttccgtagtgtcgtagactgagtccggatgatcctggggcggcggaggaaccacagacgcttctgtctgtgaagttgcaagtcctgggtttctacttccgcaggggcctctccaccttttgctgtcgtaggtctcgcttaaaagtttaacagaagaaaagagtagggttaaaagaggcctttgtagttcttcattgaagcactgttgtctgtccgggtgaaagctgataactcttggtaactgtggtccttagcaaaagagaattggagttttcttttatacaaagtatttccaaggttttagaccttatatttattccaggcctgtaggtacggtattactaccacaaaagtcttacattaagggtaccaccctctcagagggaacctaaacatcaacttccttcgaatccttggagacatcttcacttttcaacatccggaagactgagtgcaacatattttgtttcattttcataaaagtcttggtcagagaatcccactccttttaaaatcgtttgggcaattcctca

SEQ ID NO: 58365 - DNA, 558 bp, Homo sapiens
atttttaaaagtaccctttaatatctatctgaaagattctagattccatctcagtcatttgatataaaaagcagatatcttaagtcattaagcagggtacatcaaggtctgcctttacctaaaatgaactctcaatcaaaattatgaaaatctactctctccagagtttctccaaatgtttacccaagaacagtaagttatttaaatatacatctctgtgtttgttcagtgttcatttaaaagtgtaccacccgccatgtaatcgtgggctttggtcagttaggtgctttgcaaataaaccaggatgacctttgctccctacaagtcactggcctttcaccttggaatttcagagtagggagtggcttctttttggccagtggagagtcaatgactttgctgggttactctgtggccacagattatatttaaagtatcatcagtcttcaggtggaaggaaggaaggcgccaattacctggaagggctgtgttagaattaaatgaagagaatgcacttgatttgatcaccgtgatcagattcttgccagtataaataca

SEQ ID NO: 58366 - DNA, 671 bp, Homo sapiens
aagctttttctggcatcactacacaacaacagcacatcattttcattaacttgaacaaacaaaaccaagcagagattaaaaagcagcacagatgtgatatgactctcttctcctgtcctggactggacagccttgtggagtcacttcccttaacaaggcaggaaatgttctttcagcctgcccccggaaaaacagcacatggcaccaagatacaaccacaaatacacaactctgggctgggtcacttgttctcattctgctccttcccacaaggctcctttctgatgactgatatgatcctggcattctctcctccatctctcacctttttattccttttggtgctgaccttcatggtgtaccccatacctgaaaatatcttgctcccttagggctaagcaactttccctccttcctctcttatcaaactcttcctttatctgagccttccaaggctgatctcattgcaaactatgtttgaacaacatgactagcttttatattatctcatgaatcatgaccatctgaattccatttccatttccttggagaaaagcccagtctggtatgtgttccacatagcccaacatgaagagatggcactcaataaataacacattgtgatgatatcaataccatgaacatatactgcagaaatatttcacaatgaa

SEQ ID NO: 58367 - DNA, 2773 bp, Homo sapiens
ctgcagagatttctgtatccacggcttcagagcagaaagagaaagcaaagaagtagagggaggaataaaaagttattaaactggataaaaaaattaacccacacatttaaatatcgcaaaggctattaacccacacatttaaatatctcaaaggctattaactcacacatttaaatatcgcaaaggctatctccaggcaagtatgttcctttgcttgtcatagctcctggggcactgggccaggatatttatgatcctttctcaaaaactgcctcctctaaagtaaacagatatcaagtgaagggaatggcactggatcaggcaagagaatggcacagtgctactaagttcttggctttcagaaaccactgcctgacttccccgccctccatttcaactatggggaaataaggttgttttgttctgagttaaatggacattgtatctctactcatttttgcattgcattttctcaatactacaaaattccttctaaatgcaataaaatgcatttagaaatctgcaaaatatcaaagcttagacatagcaacctgttatcattaaacctagaatagtaaaataaccattacatgtatctgccctccaaaacatctaaatttatttcaaaagaattccagagctgccgtaaatacaccacagaaattgcagagggagaggcagccttgcctatcatgataagaccatttgctttttatctttatttctttatgatacaaagggaaagaaatcataaagtggcactgactgcaacattgttttcattttataatgcgtagtcattctgatagcttggtttgtttttaaggtggacactgtaatttccttcctctgataaattgtatctagcaacagctgttctccaccaactcagtttctggattccaggtcctcccggacaaaaaaattcaaaatgggaaggtggtcatggatcagtgaccatagattttactatttgtttctagtgctaatagaaggcagctgtctcaggtaaaggcaaaatgctccgacatcatcagggaggtgtggactgctttgtgtaaacagcctgggtcatgttagtttccacatcctgcctctcaaagggagttcttctccccctaaataaaagaaccctctactttaaaaggttgttgagaaaattattctttagaatctttgctaagttttacacgataagcaagcatgaactccttacaaaagaaaaatattatttctaattttcactggcatacaatgtttttgaaacaattctactccctgactacaaatacaatatattttaatgcattatcaacaataatatatagcgttaaaggccaaatttaggattaattccaaaaataatggcttaatatataaatcatcactaaaattgtttgtgttctctttcctactagaaaatggatagtttcacaaccttctattgagatattttgtatatagaataatccaaggctgaaagaataatttcagattgaatgaaaaccaaaattgattcatagtcccagaaatgattatttatcagaggctaaaattaaaaaaaaattacagatttaaatgctgctttgttgaaaagaatgtattgaatactaccaaattttagtttgaaatagatattttggtggatgctgaacatccttaaaaagaatactgtgtagtctttagttgaatcactcttgaactctgtaacacaaaaatcaatggatgtgtttgtacaggagaatgactgtgtaatagaacccctagtctaattcaaaacctatatgaaacagttcactcctggaaattcctattcctattaatgttataatcacacaacactctcccaggctgaatttgtacagatattttgtatttctctttctttccatccaatcactcttactggtctgtgtagctcctaaattactgtcaaaactatttcttccatctcatccttttgcatttcattattcagtcctttatcatttcttacttgagctgtgtcaatagaatgagaattaatttccctggcagtttctcccagttcctctctgccttagcactttaaaattctttttgagaaatacttattgattaggtaatgataatgatgaaaacccaatctaaggatattttccttttacctacaagataaagttcagattccttaaagtagcatttacagcacacagcaaacaagtcctccacccactttccagaattttgtccctcccctttcttcctaggcagcctccacttctaggctccataaccacagaattatttcccaggcctagaacacacctttggattttatgccttgttccttctgcctggaatatcctttcccaccttctctattgcaacatccctgtggagccttcccttcctcatcctctgcccccactctgggcagatttacttgcttctcagtcctcaagtccattattatttgaacagaccttaaatctacaattgccactatatcacatttatttgtgtctctcccccacatttgattctatatgcctgaaaagcagaaatcttaccctattcacctctgtacctacagtagctggcattagagctacagagatttgcaatggcagccaagctcctcagaaagttcaactagtgatttcctcattaggttctctagggaactaccaatatgctacctctgcctttaaaaaatctattaggtcaagaaaaacagtttattaatttcaggacttgtcagagccttcaactttctaatattcaaggaggt

SEQ ID NO: 58368 - DNA, 2014 bp, Homo sapiens
agattagagatgctgtggattcttattaagcctcactatggcatttatactccttttacagcaggttaagagaccagctgctgggtgggaaccagggtcaggtccttggcttggcagccctgaagctccactttgccagcttttccaggggtgatctgcttcttgggaaagattcaccttaaaagctctcacaggagccagaatgtcaatttcctactttatcatgagaaatgcacccatcagactatccatccagcataagacagtagctgatcagaaaactctctccctgaaaaaaaaaaaaaaacagcacagaagccagagccatacacagatggtgtcttggggcatacatttggcaaaggggtcagtgttgccaagatatgatacgctgacaagtctagaaccaccccagggatccaacagtcaaaccttccagaggagttcagtggtcttagcatcctctccctacaattgctgtgatacaccaccaaattcgttcttcttgaggttgccttctctgtactccattcagtccctgccccctctgtggccacatctatctccagataagagtccatgataactgactaggtttccatttgccagactgtaaatacaattcagtcctgcttccaaggtcacattttaattgcattttagatacttctaaaattcttcactcacacaaaattgatcacttggttcatgcctatagattttactagttgatttgtcagaagtcgatcttatttttcttctctctaaaccaggactcgtgccaatgcacaggctgcaatactcaacaagaaaacggagaatacaaagcagggctttgtaatcaaccacgtcaggatcattgaacagcctatttttgtgctttattatttgcctggttgtttgctttttgggtttaaagtttaaatgctggcctgcttttctctgagttctctctgaatcagttctttgtttgccaagttcacaaggtacacattaactattaaacatgattaggttctaatctggcttaacactacctaacagtggttaagaggtaggaaggtgagtggaacccaccaatacagaagaaaaaaaaatagactagggtggcgatattaaacacttgtatgagacaccagcttctcaaactgcaggagccaacaaaatattacactgaatttaacacagccttgtcccatgactggtcagaaatagacactttactcaaaatgctaattaggatctcacaagtgactaattccgaattacaaacatttattcagtctcacacagtgggtatgtattgcatggctatcctagttcccaaggaaaaataaaataacaggaaatcattgttaagaggtcatttatgaggaaatcccaaacctccatttcacacctttgtaagaagcaacaaaatatcccaaataagctcaggtagaaaataactcaatctctggtttgaaggaatttctctgtagccacaaagagggatattttaggtttttcttgagtacttggaagacctgatttgcccttaatgtgagaagaaaatggaagatatggatatcccaggaaacctgtggctgaatgcctgaaccatggttccctaaaagagagagcaatggcctgactccattttcctccactgttgtcccagatgaatggaccatcccaattttaatcatatcaaataaaagtgcatgtctttaaacatacaatatccaaatgcagtctttccggaattcaaggatggaatacaccattcctctgagaattctcttttggttcgtttctccatttatgatcaggcattaaagagtccctcctagtaattatttacttattaatatcctggttgattcagaaattgcctcacccacaaagcccaaacatgtgagaaagtcagattttttttttatttttttaattaggctagccttgagggttattcaagtgcctttaggtcaaacaaagcccagagattgttttgctttacacggagtcacattga

SEQ ID NO: 58369 - DNA, 763 bp, Homo sapiens
aggcattgagcatagaatttagtcaataaattcttgctgaattaagttatttttttctctatgcaaagattttgttgattttcagagatataagtctctcacaatacaataaaaatcactcaaggagacaaaacaacctgtttattgacaataaagataattccagggaatttattggaatgactaaggttcaaggcagtattccacacattctagaatgaattccatgaagagtaaattgcatctcactgactcagaacctataaatatttttcaagtaatattgacacaggatgttgaattccaaacaactttttaaaaccactaatcattcacatttcccctcaaatgtcacacagtataaaactaatggatcttttgtgacttgatgacatttgtctccatttttaaaggtattataatggaaatgtggccttctatcatcctgctacagttggtataaatccactagatacttttaaaaaatattttgggaacacacagtcatgcaaaccaatgtctgcctgtcccagcaggggatagtaaaagactttacaaacaccagatgggatttaacagcgttaataaaacattaaatgctccaaaagtgctaagtcactttgtgaacaactcaaaaaaaatatatttgatttccattatacatatttttctttcctaagaaattctaaaattttccagtaaaagttttatcatagtcctctgacagttaatttctcttaatgttaaactataattatctacc

SEQ ID NO: 58370 - DNA, 491 bp, Homo sapiens
aggacactttttgaagcaagagcatgcattttccccctggcgctctgcagcggttctcagagcccagtgtcactcacataggtgggactgctctcagttcagagagcgctgggacacttaagatgaaaagtccctggaagttagcaaacagccatctgtcactctggcatcgatttactaaaagtgacttctagggtattctaaaccacttttaaaaaacaaatgagtcacttcgacttcctcaccccgcaagagataggaaggcagcagtggagtgctcgctcaggagctgtatttgtttagcgattagcctagagctttgattttagggcaaaagcgagccagacagtgcggcagacgtaaggatcaaaaaggccacctatcattcgccggggacgcctgcctccttaccctgataacgtaactatttctctgcataggattttagtttttgtgtttttgttttgttttattctgtttaatcacttcaa

SEQ ID NO: 58371 - DNA, 881 bp, Homo sapiens
tcgcagggcgaattcctgcaaatgcaggcatttgcgtgcggagtggacatttgtgacccagagcctggtacccaaaggcaggctgccatctggtccccgccccaaccgcctctctgcgtctagtcgcattccacgaaaagatggtctgtagaaagtttccccaaaggagaaacaacttgcccagctccaaagggtttttagtctgcatcccttgcactgtgacgtgatgtaacctttttggggttttttcctcttttcctcccttccttcctcccttcttccttccttccctccctcctttctttttattttctttcttttttaacggcgtgattaaaatgtggcaaccacaaaccccgattagagctgccagaacgttatctttacctttggctgcccgcgccgccctttgaagtgcccgcggccgctgtgtaatctttaaccatctcttcccccggggaggaaaggggaagtgggctgaaggctgttgggctggtaaacagcggcaccgacacccaaagggagacctgaagctctctatcatccctgggggattctcccaccccttctctccccactgcaacttccaaagccctgaggcggcggctcattgcgtaattttttctgtggaaaacccaggcccgaaggtaacaggtagttgggtgaacgcggtgacccaggaggaaccctattctcggagaccaaggcgactactctctccacccccgtgcaaagcatctggggcttcattccttccagcagagaggccaggttctaggccactctgggaaacaggtgctccttaccacaaggtgaaacatttaggttttagatcaagacattgcagcgagcccaccccaagcccatgcagtcccagtttt

SEQ ID NO: 58372 - DNA, 666 bp, Homo sapiens
ggggaccccaggccctgttccactcttgttcatcatgcatggggagggttttcctgcaaagttgaccttctgcttgggctttgctctcttttccattcttgctttctttcttccacaggcgtctggatgctaaccacatcagctatgtgcccccaagctgtttcagtggcctgcattccctgaggcacctgtggctggatgacaatgcgttaacagaaatccccgtccaggcttttagaagtttatcggcattgcaagccatgaccttggccctgaacaaaatacaccacataccagactatgcctttggaaacctctccagcttggtagttctgtaagttttattgattttgctctcttttaacagtttctaatgtcactggaagaccttggccttaaaatgctggctcttcaaagctcaaatggggacattttaagggaggaaaacctcctgagcccctccccaaaatgacttataaatgctccaattgtgtaaatgacttaaacaatacttatcaattacctgctagatgccaagcacagcagggcatacaaagataatgaaatatgacctgtgccttagagaagccccttgcatgttgcacaaggagtcaccgcactgtacagttagtacagtaacctaagttaaacattccttattttaaa

SEQ ID NO: 58373 - DNA, 3192 bp, Homo sapiens
accagtaatgaaagtctttaaacaatttttgcaatgatcacagattaagtcaagatagtgttttacaaacccattataaaacaggaaaccttcggatgattgattcctctgtataaatgctgagtaaactcagtaatgtttaaaactgagaataaggttagaagtaggaaaaatctggaatgttactatttcctttctcaacttacccgtaatctccaccctcgcatacacattcctccactctaacgtattaaaataaaaatgctgataagtttatctttctctctctggccctcatttagtcagcacgaagttacacaatgtgcaaaagtgaacacagatagaaacgtaaaggaggtaaagtgttccaaaaagatcaaatgaatcaaaaagctctgaaacagacttggtaaagacaccagagttgttttttttttacccctcccccccccactttaaaaggcagcaaccggaataaatcaagataaaaacagaatcacaaaaatagtgcaggactgtgcagattaaaactttacaattttcaacgtcaaactgcaatatgataaagcaacaatattacttaaactgtttatgaatattttttctctaacaatccaagtcaacttcatataaaacacaaagtttctgtaccagcaaaaatacaaatgctaatgaaacttgggcttctaaggtattattacaaatcagacttaactgtcttagatttcataagcttaacccaatccacagcacgttaatatacccaatgaagcagtcttaagaataacgctatagtgtgacacatggggaattaccaaagaacaacttaaagtatactgacacagggagaaataagcggttctgatgattcaaagttacactcgtctcacagacctagtaatgacgctaaagggaactttagtgacacacccagcgccgaccgccacgttaaggatacagctcttccgaggtggagagggctctcgccagctctgactgctgctgaacccggatcctgctcctcctcccagaggaggtctgcaccccggcttgcctcctcgctcacccactcctcgcccccgactccagcgactcccaccccggtaaggcctgcctcgaaagcggaaacggtccaaggcgaggtggctccgctcccagaaagacggccggggactgctttcggacagtgagctcgaaggcatccgtacagaaggcggatgagaccggaacggttctttgggtcggtagctgctgggtcccctgaggtggccccgctcagacgcgtgccgcgagcgtgagaaattcctcagctgctgctgagaagaggacgatgacgaggaagagccaccgcctccgccagatccaccgccccgggccgagtgaggaggccttcgccgcggatagggtaacagcccgccgccgctgctgctgctgctgctccgactccgtatctggctgttattatcgtcgtcactgatttccccatcttcaagctccccttcttccttcggcgagaggccactggaggccggggccggagtatctgcggtcgccatccggggagcagcgccttccacacaaccttagccctccgtccggggatccgcccgacaattgcctcgtttcccttctttcctaacggactgggtcggtgcggtcttaccctactcggacaccaagcggcctctgctccccaacttccccgcaccccagcaccccagctctctctcgccggaccgtcgcaacccagttccctttcctagcgcccccttgctcctcagcgatcggggttcttccgcctcgcgagaaagggactctggtagcggctgtacccgaaacgtcacttcctgcgacacgcaggaaacaaaggctcccagttcacgcgataataagaccaactcgatactcactaggatttgtagtctttcgtctttcttcgggtttactcttccggtcctagggtcacacccaccgcagggtctggcttggtacagttgggtgcatgcagaagtaggtggagctgctgttgcagccttgagagagttttattgtaaaactcttgtaatttatagtaatcggaggggaaaacacctcttccttttaattgctctgaggaccgctgccaaagaaacgcagtagatccgctccctcttgggggcggggagaaagaacgggttgtgtccgccatgttggtgaagtcaagcgaaggcgactagagctccaggagggccagttctgtgggctctagtcggccatattaataaagagaaagggaaggctgaccgtccttcgcctccgcccccacatacacaccccttcttcccactccgctctcacgactaagctctcacgattaaggcacgcctgcctcgattgtccagcctctgccagaagaaagcttagcagccagcgcctcagtagagacctaagggcgctgaatgagtgggaaagggaaatgccgaccaattgcgctgcggcgggctgtgccactacctacaacaagcacattaacatcagcttccacaggtaacctgggcagggagtgggggtgacggaaactggagttcctattgtggctatcgcttgtgtggaaggaacaggaggattctgctaattctaataactttcccagctggtagcagggaagcatcgtatgtcctttgtgtttctcaaatctgcccaattgttctctgctttcggggaagctttactcattttctaaaagaaatccaagtactgtttggtcattaccccttagtaaaaaaaagtaacaggaggatatcgtaattttctactgttttattcctctgttagaccgggccttgacatgaatgacgccgtaagggagaaagagatcttcccaatcagcaatcaccgtaaaagcctgctgtgttcccgttaaaattaggaaattctcactagatgaattgacatgggaggcatttagatttctaatagtcacatagtaattctgcggaggaattgagtcatctttgatagccatggaattaagcgatgttaattaaagtgcaaaagataacctttctgttcttactagaatagagtaataaaaagaacctaggttttcttttgtttgctggaagaaaaatcaaaattctttagttctgtcaaaccagaactcttgaaagcactttgaacaatgcctggaaaataacaggtactctgtaaatg

SEQ ID NO: 58374 - DNA, 939 bp, Homo sapiens
gacagacatggtgtccgtcctcaaggttactggaaaacagtattccatttctttattcctgccctcaattgctccccaccctctccctaaggcccttttagaatgagctcaacctaatacaacaaatccatcttcaaattgctccctagtcttttaaaatctatactacaaacatttaaaaaacaaaatattcgggtttaatgtcaagaaggcatatactggttggatgcagtggctcacacctgtaatcccaacactttggaaggccaaggcaagaggatcacttatagccaggagtttgggaccagtctggacaacacagtgagacctcacctctatttttatattaaaaattttttaaaagaggtgtctatttctcagatgaattttcagtttaataaattatttagcaaacactccaaaatgtgttatttctaactcttctccattctcttgaacttcctattttcatgttctttttaaccaccaaacaaacctttacaaattgcccttgtttagcttagtcactgagcaaactctttgtcatctttcaattcttaccttggatgctcccctctcttgtgtgacaccatccctaaacataccagagtgacataagtgcttttctccttgagtcctgtttatatatgacttggataaagtcatcatctttttataatgtaattgtctacatgtccattttcatctgctatgctccttcaccacacatacacatgtggtgtatgtgtgttggcactcaaatcactcaaatattcgcacatttcagaaaatctaaaccaatccctttgaattagattcaaagggattgtaaataaaatctgataatttcctatcacacagtaagtgctttttgacattaggataatttttgtgattggtattgaatataaatgtctatcatagaaaaatccaaacttt

SEQ ID NO: 58375 - DNA, 1358 bp, Homo sapiens
aaaattgataaatattatgtaattatcagttaattactgttaacccaggcaaacaagttaatttcacataaaacatgaaatcaggccgggcgctgtagctcacgccattaaacccagcactttgggaggccgaggtgggtggatcccctgaggtcaagagttcgagaccagccgggccaacatggcaaaaccccgtctctactaaaaatataaaaattagccgggcgtggttgtggcgcctgtaatcccagctactccggaggctggagcaggagaatcgcttagaacctgggaggcggtggttgcagtgagcagagatcgtgccactgcactccagcctgggcggcagagagagacactgtctcgaaaaaaaaaaaaagaaaagaaaagaaatcagccacgattcagatttttaatgctaacaagacgttttgctttctaaatgcacacacctttaatataaggggtgtgaggacagatatttccacaatctaagtggtgttatgacaataattacgagagctcagtaatagaaactatgtttaactttacctcgctagcagccaggagtctagcacattataggtactaaacaatgttgtttagtacctataatgtggttttggagaagcagtgcaaacgcagccggccaggatgccagcagtgcctgcccacgtgagctaggcgacatccccctaagcggctgcggcgcatgcccacagcgggcgaggcgctagaggcgggggcgccgggaggcgcgggctttgctcctggggtctcggccttggccggctggacctgaccctagggcggcttgcgcagctgtcgggacgtgactgcgttcagccgcgtcgggcgtgcttcccagacttgcccaagttcgggtgccctagctgcccctttgcagccgctggcctacccggcccgcgggtgagaaggttgcgacgggaggtgggtggaactcgccagcgccgggaccgcggattggctgcctcggctttctcttttccccgtgggctccggcgtgaggcgctgaagcggccggcagccggcgaccggccctcaccgtccgccgggttgcgctctgcttttgcggtgaggcgttgaccacgcccatatgaattggagctctccgccagtaggagtttccggaaggagtttgaatttttgtgatttttatgcttgtttggtcggtggaatatgttgggatttatgtttgcctctgaacaagtgtcttgctcacatcgtaaatgactttctctccgaaacgctaaatattctttcccgcaggagctcatatccttattttccatgacagatcttaacgacaatatatgcaaaagatatataaagatgat

SEQ ID NO: 58376 - DNA, 920 bp, Homo sapiens
tggtgaaaccctatctctactaaaactactaaaattagctgggtgtggtgatgtacccctgtaatcccagctaactgggaggctgaggcagaagaatcacttgaacctgagaggcagaggttgcagtgagccgagatcacaccactgcactccagcctggcaacagagtgagactccatctcaaaaaaaaaaagaacaaaggaaaaaagaaaaggaagagtcatcagagctctctcttgctttctgccatgtgaggacacagtgagaagacagtcatctacacgagagtcctcaccaggaattgaaccaactggcactttgatctaggacattccagtctccagaactctgagaaatacctttctgttgttcaagccacccagtctgcagtattttgttatgatagcgcaatcagatttagatgatgtttagatgagactgaactttagactttagaaatcatgctggagtgagttaatacctttgcagctgttggaatggactgaacatattctgcatgtaataagggaatgaatgttgggggttaggggtggagtgctatgagctgatttgtttccccaaaatccatatgttgaagccctaacccctaatgtgactatatttggagacagggcctaaaaggaggtaattaaggttaaataaggtaataagggcagagacctaatccaataggactggtgacttattaaaagaagagacaccagagctgtctctctctactatgtgaggacacagtgaaaaggtggccatctataagccagggctcaggtgatcctgccacctcagcctgctgggtagctgggactacaggtacctgtcaccatgcctggctaaattattattttggagacagagtctcactgtcacccaggctggagtgcagtgacatggtcacagct

SEQ ID NO: 58377 - DNA, 2129 bp, Homo sapiens
gaatggaaggatgggggaaggattgggtggtcagggacgcggtttaagctgagacttgaaagatgatggagtagttgaccaggcggtcagaggaacttggaagcgctatgattcgggatcccacagagagagattcaagggcaccttggcagatatggtttacagtgacctctggtgtgacagatcattagcattgtgaacatgcaaaaacgatgaagttctgcccttcatttcaccagagctgggctcgcctcaaattcctggttccttattcccgctggctcccaccaactgaaaagcagaggtggctcgcaagcggcggggctctgccctagattgccagtaggcgctcgactcacatccagctccaccccgggagatgccccagaagccccgcccacgtccaggcacgttcttctggggctagtcgcaggggccgccccggcaccggcgctcacgtgacccgaggtgtgacgtaggaggaaggagacgccattagagggaggcagagagggatcgttcttcgcttttcctccggtgcctgacgtggtgggctggggcccttcattctcggactttccctcagcccttccaggcctcgcccgaggagggcgtggggacagcgcccgggtcggcggggccggggcggtgggggctgagccggccgtggctgtgaaggcgctgccgcggctgtcgggagggcggcgcgacactcgggctcgggcggccgggaagcgacgggatggctgcggccggcggcggcggcggcggggcggcggcggcgggccgagcctactcgttcaaggtggtgctgctgggggaaggctgcgtggggaagacgtcgctggtgctgcgctactgcgagaacaagtttaacgacaagcacatcaccactctgcaggtgcggacctcggggagcgggagggggcgcctcagggcccctacccctccggggctggggaaactttgccgccctggtcccctggatgtaggctggcaaatctcaggcctgtcatctccgccttcggtttacctttccgaattcgccctggggaatcaccaggtcggggcagcctgtagacgcgaggacaggctgttgggagggaagtggaagggccctgaaaagtccccagtgttccccgtggtggctgcgcacgttgtggtctccgtccgtgggctgttttttcccatttactgcagttcctgggtcccaggtgtcagtgttgcagtctccaaatgttagctccttttctttctttcagaattaggaacttagctgcgtatttgattttgcgaattaggtgatttgtaacttcagcgcttactgatgactaagtgtttatgcaagttccattttgtcctgagtaacaggaatggcaaaagagccatctctggaggttttttgaaatgaccgcttgcctaggcgtgttacgcagtttcattgcagcctgcgtgggtctgacttgcgggtcactcatattctgcgaggtcgattgacccacgctgaaacatcaagtgaatactggccaacaattggtccccagactaaaagccgctgctgttactcagtttctttacctgtaaaataaaaggtcggctttcttccacaggtacattggaaaggtgttaaaatgttatcattgattgagagtgaagccaggcctttgagggagttgtactcaccccacctctcccagagaaatcagttttgatgttattaggagaaatttatcctactaatttgacttaccaatttggtcaaaggcagtaaagtctagtggacttttgagcctgattgtccaggttcatgtctcacctccatccatttaactagctgtgtcatactgggtaagttacttaacctgtctgtgcctgtttcttctgttaaaatggccataatagtagtatctagctcatagggttgtcaggataaatatacagaaaaagcactgatgacctggtccagtgtaagttgtctgcctttaattaccgccccaacttgcacaataggtcttaattagtaaatgtgtagtatgtgagaacatcgacactacttaatagaatgcgtaatctcctaattgttgtgacattggatgtttgatgctattattaaactactgagtctagaa

SEQ ID NO: 58378 - DNA, 2101 bp, Homo sapiens
tgttagtgctgctctttcttggatcttcaccgcaacgccactatcttgattttactataagaaactgaggtttcgagtgcactggtgatttgcctactgccacaaaaccaggctaatgggctgggcgcggtggctcaagcctgtaatcccagctctctgggcaaaggctgaagcggacggatcacctgaagtcaggagttcgagaccagcctgggcaacattggcgaaatctcgtctctaataaaaatttaaaaattagctgggcgtttgacgcgcgcctgtaatcccagctacccgggaggctgaggcttgagaatcgcttgaaccgagtggcggaggctgcaatgagccgagatcgcgccactgcactccagcctgagcgacagagcgagactccttttctacaacaacaacaaaaaaccaggacaaatcttgctggcttccagtatggtattcgtttcatctcaccaaactggcgtggcctgcgctagcttcagagtctcgacaaactccaatacaagtaaggtacacattattttagcagtcttccttggggaggacgtggggcaagcacaagcgtagcgttaggcctgagactccaccccagccgtctctgagcccagttcagcacgcacgcgtcaggcggcttttttccgcccggctcctttcctccactcccttcccgccactccccgcccttttcccgcccggatgttattctagttttgccggatgttgttgtatgtccgagagacacgtgaggttctgctacgtcattaccaggcacgcgcaggaaacatggcggcggcgggtgttgtgagcgggaaggtaggtaacggcctccaggaagacctcggcttttctctgggacggggatgcttttgctccctggcagctggttgggggagggacacgagggactttctgtgtccggacaacccgtggcgtctgtaggagaagactgggtggtaccagctggtttcccgagaatgccagttcagccgcggagttatagagccggctactgctccaaggccagctaggcctcggcgctcttctgccccagagcagagaggcttttattcgtattacctttactaagggacaggtggctctctagttccttttttcccccgattcactgtttcttgactctagttctttatgtctactcttctgactccagcgtcttttctctctttgaagcgttaacccgacttgcctctgtcttctttgctacagtttggtgaagatgtttatgcttccttcgggaggagctgaatagatgctaggcagctagctgtgcgcttagaagaaacgagtgtattgggtctgtttttaccaagctgctgagttggttggtggttgtgagcagcaggacgtgtttcctgagagaaatggagatttacaccatcctgtgcttgtctaggaaggcgtccaaatatttatttcctaggcatttcagtaggagtattggtcatgctggtttacggaggtggtcagtgacacgcctaatttcgttggaaactagaattacgtgcggagatttcgtcgaatagtgcctattcgcgttccgagggcacatcttatgcatagttagggctatcagctttatgatatgccaccgatagtatttcccagtgcaggagtatttcataaacagctggaatcaactgaagtgactcatcgaacactaatggttgtttactcattgcagatagcgtcctctgttccttgagtttcactcatgtctccctgttgctttccctaccccattttgaattatttgacagcgtttgtggtttggtgtttggagtattagactaggcggctgaatgacaaatatgggcttggttttgctgttaatctgaagtatgaccttggaaaattgggcaattgtgacttttgtcttttcgcgttctttatctgtagaatggaggagatgccaatcattatttcttgtattggagttgttagggttatataaatttttttttaaaaaaacataaaattacacacttgtacctactggctcttttaaaggataggtgggcatccttttttggattattcgtgctccttggttgtcttgtcagttttt

SEQ ID NO: 58379 - DNA, 939 bp, Homo sapiens
catcacatgtggagaattaaaaaatactgatgccagggcctctgggaatgtggccaggtttgatgtattatttaaagctcccaggtgattctaatattccatcactgttgacctatttggggtagctaattgagtgtcaacacaaatttagctgagcactttagagttcaggctgggtcttcaatttcctttgatttcaattgagagagggagggtgggtactctctggctgctagggttgccagatttagcaaataaatatctaggatgcccagttaaatttgagtttcagataaataaggagtagttttgtggtataagtatgtcccatgcaatacttggaacatatttatactaaaaagattatttgttgtttatctgaaattcaaatttaactgagtgccctgtgttttatccggtaaccctatccctggcttcagttcagaatggatggccaaggaatgctgtttctctgtcactactagtgcagctagcgtccctagtttactttgccagtccatggttcaatccaggaagttctggatcgcccacaacatttgcgtaatcaccgccacactaagctaatgaggcatgatgagtaaatcgctctcttgcgtccttggaaaaggtgcaggtgtttgcagaagagaggcagttgagattcttcaggaggcccagcagattatgatgccgttaccatggtgtccagtctggcaggaaccggggaacagatgctgtgcttttcacaggacgcttttccttttgtcatggcctgttttctttttgaataataaaggtgcttggaattctttggttttaccatctcaagtagcctggttttactagtgagtgttgaaacaagtactttctagcatgactgcatctaccctctccagcaggagacctttttaaagggcacagatctatttgtgaatgtgg

SEQ ID NO: 58380 - DNA, 1157 bp, Homo sapiens
aataaattctagtataaacaggaaaaaagtaccccatgattagataatgtgatgtgcatatagacttgcagttcagaggaaatggaagtgtgtggggggcagatagcctgtggaggaagaggaaattatgactgcgatgtagtagttgttaggtttgtctgaaactgtccagttttctctctttagtgccttcatatttgaatctcagcattaacattgctgcatttctgtggacttcacaattactatattgttgggggaacaatcagtgatacgttttttcaattgactagaaataaacacatttttcttttgggggctgttacaatgattattcctcaacaatatgcatgcatatttaattttttttttcgtggggatggtggtagttatttcaatccatcttattctcttggaaagaggccctgagctcctactttaattatgccactcttgtttgcttaaattgattttgaatattattgtgattgtgttttattatgaatgtacctactcctggttgaaagtaaggtagcccatgaacctcatgttcttctcatggggctgcttcctctttgatttatttatttttatccatggaatctgaaatgtaaataggcaactacaactgtcaataggtaaggtaaacaagagagtttcaacatgttagaatttccaactctaatttaggttagagttggacaattccttaatttgccaagaaaactcatttgatttaaaattcaccgattcaaatcatcccttaacattgctcagcctcagtttttctcctctgtaaaatggagacaaaactatctcttcggcctctcctgggaggtttttttaaggattaagtgaagtaagtggggcattgctatacaatgtactttgttatccttattaaaacaagaatcaaacaatctagaccaaaggcatggggtttactcagacccctgacaacataaaggccttggctgcttttcctgtttttctttagatctgagaggcagcgtgtgaagctgttaagtgtcaaaagtcggagctgcactgcctggggtgaatcccagctttaccatttactaactgagtgacctgggcaaattgtttaaatcttctgtacctcagtttccttatctgtaaaatgaggataactctag

SEQ ID NO: 58381 - DNA, 2549 bp, Homo sapiens
gtataggatttggagctagacagaattaggtttgaattcccgctctaccacttaaaagctctgtggtcatgggcagtgacctagtctctctaattctcaagctgtcatcttaaaatgggcacaacaccttgcatgattgggaggattagcaatgattacaggactcagagtgctgactggcacaaggagatattaaatctatgatagatatgattattagtgtcatgtggtaaatagctaattgttcttcaatttcatataatcaattgttaggctcatttaaaatgagtaaaggattttttttttttttttttttttttgtgagacaggatctcgctctggtcacccaggctggagtgcagtgtcatgctcatgggtcactgcagcctccacctcccaggctcaagtgatcctcccacctcagcctcttgagttgctgggactacaggtgtgtgccaccatatctggctaatttttcatattttgtagagacacaggtctcactatgttgcccaggctagtcttgaactctggcctcaaacaatcctcctgcctcggcctcccaaagtgatgggattataattgtaagccactgcaccagactctaaaggatcttaaggagtaattgaattaaggaatttcaggctccataatgggctgggttaaaggaacttttaaaaaataggggtgtgtgggtgtgtgtgtgaggggacctcccagcttcacataaatcatgcacatagtttgcttctttaatctggaaaattgccccctcaaaggccttcccaggtcaatgtgtctcagccagaataaggttggaggataagctcgcaacagggctatgttggactcatccctgaatggctcattttggtaaaaatgttcattatgttgacctctcagctaacactttcagattgtattaggttccttttcttagatcctgcactgtgttaaacgtgtcacttgattttctgtcatttaaccacacaacgagcccttgaggtaggtgccattattgtacgcactttgaagatgaggaaactgatcttcggagacattaagaaacttactaaaggttacacagctgattgtgccacttgcatgaaacaccaggtatagatgcttaaaattcctctgaaatggagcagtaaattgaagagcagaactgaagcaaatatttatagtactagggtcatttcctggatggccagaatagtttctgagtaaggtcacttttagaggttccaagaatgcctctggtagaatctaaatgtctgctcaaaagtccacaccgttttcttttttgttttctgaagtggcttcagcaacttccacttgacataggtggtttcatacacaagttgggaataacagtgacagaactaagtgacttggcatttgtaaaagttattctccttacagaattctcagcatatttgaaatgcaccatccttgtaagtatttaatacacttagaattttatggactcagaactcaaaccagtcctgtgacactgcaaacctgtttctcgcaggttgttggggacatctgccagggtctggcatggcagaaccatgtctccattctgtgtggtgatttttccctctctcccaggccccatgctattctcctcctacccaaagcctgaccctcgtgagatacagaatgaatggaaataaacacagctgggctgaggcttgaaaatcaattgccagggatgtgtcactctggtttttactagttgctagcttatctatttcttgatttttttatttataaaattgcaccctttgtgattcatttgctctgagtgtaagtacacagctaaacagagaccctaaaacaaaacagctccaacagaggactagcatatctgaaaaatgcaatcaccagctcagcaggcacattcaatttgggtgagcttgtgaatattctactcagctctatcagagagacagagaattttctccttttacatggagtggtgttgattctaaccttctattctcatcgaagcagagaagggcattttttttttttttaccctcctcttcctgcttatactgccaagtactacatgatgtcaaaacaaaaccctctgggactgagattcagtactgtgcagtgcattttaagatatttgagtagatacataaatatggaatggatgtaccttggaatgaacatattggatttccaagccagcatctcacttcttaggaggtcttctcagtttcctctttcactagatgactcagccataggtctgcaaagaaaaagaaagagacagatgatcagagactaataagggtagactgcagacttggagtagagctgttttgctgccctgcttctcgcgtcctagtgctcagtactgtgcgcactagggcttctccacttgcaggtagctgtgacagtttagctttgtgtctgagctaggggattactgatgctgagtttttcctaagaggcatttgcaattattgcaacttgcagaaaaataactggggtggctctacctctccacctttccagaaatttcagtt

SEQ ID NO: 58382 - DNA, 504 bp, Homo sapiens
tgaacaaccaaagtgagcttaaaaattaaaccaacaactttagaagaggaggcaggttacagatcagtaatgaggcagagcctctccttttctcaggtgattctcacaacagcagaaaatgggctcggagaagcccagggccctggaggtgagcaggcttgtcagtggagagttaggacttgaactttggttctctaatccctggaccagacagagcttatggtgtttggaaactctcagaagaagttattgtgtaagaggctggggaaattgcaatgtgttgtgaaagtaagcaaaagttttattatttatagagttctatgaagtaacctcctataaataaaatgcccaatgctttagtagctgtatgatagttaaaacctcctataagtgaatgtataaattattcactttcttactcctgacattagatatggatattttaaacccccttctaccacttcctccaacatgttctaaagaatacagattaaaaatattttt

SEQ ID NO: 58383 - DNA, 913 bp, Homo sapiens
gtctctgagtggtctactgatacctattaaacatcatcaaaataatttctagatatatttttgttattccttttctttgttaccagactttgcttttgaagctaaatcaacattatactggaccagcagcaattttaagtcattctgtaaagaaaatacctatttgccttcataaagaaaatgtacatggtgggaggagatagttttattgatatttttgtgataaatgcctttaccacttactggtaaattattaacttgtgcattttgctgatggaggcaagttttcctttgcacacatatttcaccgattcatcatcatttaatggtttctttttattttttcctgtgcgaaccttaacacttaaaacagctagttttcatactagaaacttgcacttctccccattatatgtccatctctgatttggcatttacttggtgagactgaaagaaaaagtctgtatttaataaaaataggtagcaggttattgaatagagtaaggaatagattaatcctattcaaaggattcttgttatcctctcttgtccctctttgtgtcacattgtattgttgttaactaatggtttagatagctacttttgaattcctctgttgcacacagtttctgtcttttttactttgctgaaaagcttaagaaggtgcaatgttggttttgactctattcttctgctttcttacgctggctttgtgagagccaaagtggtgatctcatgatatgagaagcttacgggtcagagccatgtaacccttagcttgcaaaacttggctgtagtgagattctgctttcacggctttcagaaatacttctacagctacagttgttcttgtcttctgcttatgcaaaaagcttagttctaatgacttttgcagtgggtttatttatgctag

SEQ ID NO: 58384 - DNA, 1216 bp, Homo sapiens
tttcaactacagaatgagagcaggcctgccaactcaggaacccaccataaagaaacatctattcgtgaatccaaagacaggcttaaagatttttgtcttggctatggacctgaaacaaccccatgtctcagtttcagcccatctcagccatggactggggtaaaattgtcagcccaggaactcatccagtgattcaataggaaccattccagacatttgaaagaaatcacactcataagcacacttggcaaccagactgtgatctgtaaacactgaagtgtattctcatcccagtgccaaccccacagaccaaagttctggagacggtcaagtccacccaggaaacagataacacacatgcctactagagtccctgggaataggcccaccaactgtggtctctcccatgaacccagcatcagctatgtgacccgtatcaaataccactcaactgcaaccccatagacaatttcatcagcccagattatgtaacagaaaaataatttcacttgccaaaatcagtctgtaagactcaaagattggtttactccttcaaatgcacagacaccaatacaaaactaaatgactaacaaagaatgagggtgctgcaggaggaccgcttgagcccaggagtctaaggctgcaatggattatgattgtaccactgcactccagcctgagtgacagagggagactttgtctcaaaaaaagaaaagaaattaagcaaacatgacattatcaaggaaaacacataaagttcaataatcaatacgcaaaagaatggagctataataattgcctaaaaaagaattcaaaataataatcttaaagaagctcaataagatgcaagagcatacagatagacatctacatgaaattaggaaaaccacatataaataaaataaaaagttatctaaagaaatagaaaacatgaaaaagaacctaacagacatcttggagctgaagaatacaatgacagaactgaaaaaaatcaatagagaatttcaacaacagacttgattagacagaagacagaattagtaagcttgaagacaagtcattttaaattagccaattagagaaaaaaaaagacaaaaaaaattgaaaaagattgaagaaaccagaagggatatgtgagacaccatcaaacctagaagtatacaaattattggagtacccaaaagagaagtgaagacaaaggaaaagaaagtctatt

SEQ ID NO: 58385 - DNA, 1706 bp, Homo sapiens
gatatgtgtctccaaatctggaaattatattcttagtaaattttcatgactatactgaaaatatatctgaaatttgtttgaaagtcaaatatctaaaatttgcatgtaataatgtggattaataatcaaagacctaaaaaatcttatacaacctcaaattttggttcattagatgctgtctcccttgggccctgcaaccttcataagcaaccaggagcttcaaggcaggaaaaaagtcaaggcatcattttattgccaaagtatcttggaatatataagtaggcattttcttttcacactggctctattcttgttgtcttcacagggtttaaggtagaaagtcttgtttttccctgtctttaaatgtctatgcctaaagcgttaatacctgccaccacaacaccaatgggtagggtcttaaggagtctttactcatataaccactctcatcatgctgctttcattgtaggatgctgacccttagattgttttctttagctacatagagaagtaaagctccagctagtcctggctcttggaagttatacttcatttcctgttcttctctaagcttcaactcctctggtttatataacatcagaaacaaaataattccttcataatttgtcaagtgtcagcattactagaaatgcataaaatttatcttagaccactttcagcagtaactcccttctcccagggagtaagaactgaaaaattcatactgataattagtccataatcaaagatttcattgctgagaagcaaaacagtacaagagagaatcgatcatcacctgaagtctaaggtcaagacttctgccctttgctctgggtgattcagatttgtatcaccagacaaacaagtctaggatttgcaacctcacatatcacatgaatttgcagtattttgccagtatttcacaatatagattcagaaatgagaatcagttacctaagtaattatttagaaatattttaactaccaactgtaatctcgttgttaatcaagtttgagctatttatatataaatttaagaaaccactgctatatagtcccgacatttgtatctttagaaaagttttgtggaaaagacttaggaatattacttgagcaaaaaatgagactcttttccccccacctcagcaaaagcagttgtttccatggacttcctaagagaaagtattgatttatagtatcttcggtcagtttgtttgtgtgcaaaggggaagtcaatcaaatatttagtcaactctcctctgggaattatgatagaagtgtactacccagagagacagagagaaaagattatatcctgaagatttgcaaacactaccaactatcttttgttttaaatcaagggttcagaaaaaaacctttaacttttcacaataattgtctttggagggttccaaaggagctataatataagaactgttagtaataaagcttactcttttaagtaataataaaggcatttttataaataaataaaataagattaatattttagtcataacttaagtttccttaattgtattttactggaaattatttattttattgaatttctatataaatatgaaattatataattgcatacatggtgactcgagtgaaagtaatattaatctatcagaactgcagtgtagacatatattatgtgccttatgaaaggtacattgagagcacagagtatttatttt

SEQ ID NO: 58386 - DNA, 3001 bp, Homo sapiens
cttagtggttacctagagatttttaaatgtttatataacttcaaaaaccatacatttcatcagtatgtcctcattgtagatacggtgaccatactaatgttcaaacttgtgttaccccatatttgaatctgtcctattgatgttcactatttagtttctcattctttttagtcatgaaccacacaccattatcatcattatttttattttaaaaacacaatattggtttaaatgtgctaaagtttactattttctttgttcatcatttcgttctgtttcttaccacaggtaaacaaattagatatatgttagaacttattacttactctccatgatttttaaattattttaaatattttttattggttgtggagtctatttggcattctaggtaatttcatatcagattcattttctggtttattgaaaatgaattatgcctagcatatctgatgcatagtcccttcattaagatactaattatagttattaaatttaaccatctcaattataaagtataaaacacaaaaagcaaaatacacaaaatgaaaagtaaacaacttaataatattacataaagcatagacatgtgtaattaaacccacatgtattaggttcttctaagaggcagaactaagaggagatagatagataggaggtgatttattatggaaattgggtcatacaattatagaggctgagaggtcccatgacaggccatctgtaagctagaggccctgggatatgctgtatcatggcttagtccaaggccaaaagcctcaggactggggaagctgatggtgtaattctcagtctgaggccaaaggcctgagaatcccaggtagtgggtgatgttggtgtaagtcctggagtccaaagacaggcaaacctggagttctgatgtgcaaaggaagaagaatgtcccagctccaggaggccaggacacaggggtcggggggtgtctatgtgtggggggagtgttgggggggaagattgccttttccttgccttttttgttctattacaacccaattagaataaaaagattagataatacctgcccacattgaggatgaatcttcctcactcagtcctctgactcacatgccaatgtcctctggaaacacccttacagatacaccagaaacaatgctttaccagttctctaggtaatttttaatccaatcaagttgacgtctacaatttaccatcataccatgttagaaaaacaacatgccagcacctcggaattcctacctgtcaatcacaaaccctctcattcacaaacttaaacaatttactaatttaatgatttttacttctttgcttttgacatttgaatatttaaataatcatctttaaagatacataattttgtttgattttaatcatatatttggaatgtattattttgtatttggctaatttcattcaacattatgttttaaaaatttacttatactttttaaaaataggtagctgtagtttttttctctttgatacaagatgattcattgtttgaatatatcacaatttatttattctattatgaaacaaacaatatttttgcagattgaggctattataaataattttgttataaagatttatgtgcatttatcccagtgttcctgaatacatagagtttggggtatatataactagcattagaattcctgggtcaaatatttgtttaacttatatttatacctgtattattgttagggactgtaaagggtttgacattttaccttacctctgaataaacaagttaccctgccataatttcatggattttggcagaaaacatcagacttttgggtcagagataatgatttcaacagcagtagccacagtatcatcattgtttagcaacagttttctaagcctaaattcctaaaagatgacatgagcaaagccaggtgacacacatttagtgagttatagtagaagagacaaaaactgaacttagagaacctaagtattttataatgggtagtaaaaatgctcgaattatgtttcagcagaaaacactagcctgtcatgacttctaacattagacattgtgtctttttgtactttatataaagggtatatatatatatatatttgtgtgtatatatatatatatatacgtatgtatatatatacagtctactactttgaacttcttttactcaatgtgatttttataacatttacttataatgttgcctatagtcataagtgcattgttttaaattttcatatagtttttattttcatcaaacttacttatacaggtaccatgatttaaagaagcaactggattcacacatgctgctaggaaaacagcagggcaatgacaattttcaacctactttcaaaagtgtttacttccatatctctaaataatattcttatatcatttttcctagtttttcagtttgagatattgtctattgacttcttgctatggaagatcaggatttaaccctctttcatacactcccagactcctattttatttacacctcccaccatcccaaaagttatattctaattttgattatatagaaattcagtatttatggtgacatggctatttatagctaaaccaataattgtcttatatttcctttgttttattttctatgttctgttcactaaattaacccaaaatttattgtctcactacactagaaaactttagatcgtccatcaatataatcatctaagaaccctctcccagattattctgattgagtttagtcttatccggctattctttaggcctggtgtgtggacatattccttcacaattttcctaaatattctctgctttttttcttagattagattcgctgttacttgaatcacatattaacttatttgttattttaatctcttgttattacaaagcacattctctaaggaaggtaaaattatacatcttgcatgtctgtaaatatgtcaattctacctgaaatgcttaggtgaaaactcgatgaaatttcaggtt

SEQ ID NO: 58387 - DNA, 552 bp, Homo sapiens
tgaaatcagacaaaattattagtctgtgtaaccctttttaaggaaatcaagtgcatatcaatacagatgttaagaaacaaactagaaaacatctattcatgtataatattcttttaaaaattataataggatttacctgaggtattacattcaacattagtttaccaatatgcaattaaaataaatttacctaatttacaaagtaatgtttatttgtacttacgtaatcttaggaatgattaaagctggctagagcaatccagatggtagagtaacttttcaagaaattgcctaatagagttcctacttgagccaagtgtctacatttctagcttgtttatattccactccatcatgcagcttctgagtatttcactttgaaagtcactctgaggttaagttctgatcagacattttttcaggtgacctgcaagtagcatttcaggtccaaaattttggaagtgttggtttttaaaaaataatttatctttttataaacataatcagttttttatcaaaatcaacattgtcagataagataaatgaacaaga

SEQ ID NO: 58388 - DNA, 1153 bp, Homo sapiens
attttaatatttaagggtggaacaaaagagaataaaccttcaattgactgaaaatgagaagtcagagatgtaagagagaaattagaagagctgcttcaataggaaaatgaagaatgataaaagttaattagctttactgatccaaaagtctccagtaattttcaagttctggtttggtaaaacaatgaggctgaaagataggcatgtgtggtaaggaaataagtcagagagaagctggctatgacattaaacagacatagcagaacttgaggggcttgatattcaagtcagagttttttcttgtttgttttcttaataagaaagatttggaaattgataatctagtgtctcagtagctcaatgttcacagagttttgcaattatattgaattacagcaagccaataaagttcagggtcatcaaagttcaagcaagtagcatagtccaggaagagagccaatataaccaatcttgtataaacacaaataaggtgtgtgaaggtaaagtaaatagaccagctattaacagcatgaagggcatctatatgtgatctgctgttacaaaagttgcctgcctaggctttttattatttactttagggaattttccacttctctgtccttataaggagatatacttttaaagagatataagtaacatataatcaaagttttcaatgtaccaggcaatatatatgaaatactttttcttattataattcttattagccttaattggaccacagatgccaagaattgaattaattatgggctaatggcaagctataaacatgggccatatatgccctcttccattttatttaacatattttttaacatattttatagctcttgtgattctgtagtttttctactctatttttgactgagtgggtaaatttaactctgaagtgaagggttagctaacccattgcttccaaatttctaaaccacattttctaaaatagcatttgcaaatgacaaatctgatatttatatctacatttgtttgatttctacatctatctcttagttctgaattcatgaagagttgtatacaaggacttctcaaacttcacacataacaaattgcttttgattgcaccttggaatattcattcttgttttttttaattagggtaaatatataattc

SEQ ID NO: 58389 - DNA, 1323 bp, Homo sapiens
tgttatcaaattttgtggggacggtggtggggttagaatagcttacaaaagttcaattttctaggtttcagttttcttatctgtggaagaaggaattttgactagcttcaattgttctcggcttggaagaggtctatttcatagggcatttagacaagaaaagggcaaattttgtttgttcttgttttctctgtgactctgggacactattgacagttaacaagataactagtgtgactatttgtaagattcaagatggttcctcccaatgaatgatttcatattggctgtcaattctttgagctgtatgacaccttagtttcataaagcataaaacagataatataataaaggcctagctaaaatgctaagaccactatattaagaaccacagaacttgagtgtttttgatgtgctttatagttgcattattcatgggtatgggaatacagtgctttatagctatttaatttttaaaatatgattgttttgcttttatctatatttcctaatagtctctgctcagcaaagtttctatcattatatgttatctatactttaaaaatattttgtatattttccagtgttttgcaatcagtgactaatagatataagagtttttgaataagagttattgaataaaaactgaccagtgttctaattatttaccatatgttctttttagagtaaaataatattttagtctaaaaattaattttcccctattccataacctttctcaaaactagattatatatttttaaggaacttatgttagcccaaattttctgttgcttttggatacactagctatttcttcttcctttcatttttatcatttctgagattaataaaaagtattattctaacatatcaaccttcctgatagtgaatactgaatttaagtttaaaagtgatttagaacttgaatctttatttcacctgcttataactttatgaaaaaatattttttgagctgaaattttcttttcttctcagcctaaaggttaatattttgaaaagtttagacaaaatcaatttagtaactatttttttctctgtacttaggtgaaagtgaaagtaaattttcccactcagacaaaaatccccccagcatttatttgcactcatattgctcaagagcaactaatgatatgaacctgaaagttggtagtactggagccctcattgtggaagaaaaaaaatagataaatatgtaaattgttttgaagttttttgaaagttataatggtttatatgtgaaagtttatggaatgtattatggatttttgttcaatttcttcagtcataagcactgcatta

SEQ ID NO: 58390 - DNA, 1797 bp, Homo sapiens
tttcagatttccttcctctttaagtcaaaatgtacatctaattttctctctgaattattttagaggtgtatgttatcatctctttatagtcacattgccttaatgatctcataagtgagatagatgccatgggtttatttgatcaatatatacgaattatgactttagtaccaagtttccagtttttccattcaaaaaaagaccgaaagataaactatactgtaatttgtttccttgcaccatctagtggatttaaatgacaactgcagcattgctataaacgattcaccagtcaatcatgtaagtcaaattttcaaacacctccggagaactgttcctaaaatgatgtttcgaatcacaccacaacagtgcatataattattaaaattttccacttttcagaggatatcaattaagcgtggctgctgaattcattagcgaatgtttaaatttacaaataaagtaacataaaatagcatcctcgcaattttttaataatcagagataatggaagtcatacactaagttcatcctgttccttttcataaactcaaacgctctcaaagcagcagcgcgttgagaagccccaagagtctgcgcggaaccagtgcgcaggcgctctgaggggcggaagcggagaggcggggctaggcccgacaggggagcggaagaggcccaggaggctgggtgaggcgctgagacggtttggcggtgagtcctgggccaggcgcagctgaaaggcccgcaacccgggaaacgtcaaaacaaacagaaggacttgggattccggagcagtcgcccctatcgctgctcctgcagttgcggacgccaccgaccccgccgccggaggactgggcactgaaaggcctctaggcctaggcgcggcccgcggagccagacgtgttgctgccgtgagtaaaacgagcgccctctccgcactcgtttacaaattaaaatggaggaaatttcgttggccaacctggatactaacaagctagaggccatcgctcaggagatttacgtagacctgatagaggattcttgtttgggattctgctttgaggtgcaccgggcagtcaagtgtggctacttctacctggagttcgcagagactggtagcgtgaaggattttggcattcagccagtggaagacaaaggagcgtgccgcctcccgctttgctcccttcccggagaacctgggaatgggcctgatcagcagctgcagcgctcacctccggaattccagtagctgcaaaatgagagtctgaaagtggccaggacaataacatagactggtcctgtggcttcgaggagtaagctaagtagaaaaaagtagaaaaatcagacaaaagttttaattcccccttgaagatcctagcatttaaaaacccaaagtggataatttaggaatcctttttttaaagtgtattacctggagcaagctctgaagccctgggcaggaggagctgcacagcctgcgggccatgcagtgcctgttgatctctaaacacaccaggatgtgcgcaagatcctgtagtgcccccagtgcacaggtgagcagttgtgtgcccagcatataaaatttttggttcctcagcctttctgtctgcctgatgtcaagggcttcttggacagtttggacgttacagttcgtcaggccgtgatcagtggcctgcagtgggactgctcctttgatatctgaacctctgttatgggcttctctgagacaagtaaatgtcaggtgcaagatctggatactaacagtttcagtttgggaaatccaagaaaaagaattat

SEQ ID NO: 58391 - DNA, 1106 bp, Homo sapiens
gattccacttccaaaagtaaactctcaaatgccaaattttcctccctctctctctctgtctctctttgtttctgtagccataagaaaatgacttcaagatagagaagccacacaataaaaggagcccagataatcaagtcaccctttcaaaaagagattttcaggtgatccacactactaacagtagattatgacatgaggaacaagatttatgaacacacataaagccctttgatttgggggaggtttgttatggcagctaacagcattcccctgtctaatatgtgactcatacatccttgtatatcttactcaaatctcacttatttgctcatggtttttagcaatgccaaccccttaatattatgtagggaaagggtgtcagatcgatacaaaacatgtggcaggtgagatagagtcaccttcttctagcatctgcagtgataggatattggaattttcttttccccactggaaaattctgatgaattcaagttatcctccccgtctctttcctgtcctaaacatgtgtgtgtgcacacacacacagaggaaagagagagaggagagtgtgtgtgtaatagaggagagagagtgtgtgctgttcaacctctgaggtattctcatctggtggtaaggatgtaggataacactgtttacggttgatgacttgctcacacagcaagagtatatctcaaaaattcagccacccagaaatcacaaaatgattgcaccccatttggtaatatagaatagcagagaaaagtccattaaatgaattttatccactctatatgaatataaaaatatgagccataacgcagggcaaatctctgagtaagccagaggagctcaggctgattcctgatatgagtctaatgatgagtcatggccaagctatttataacagagtcagtcccggcaagaggtaagagcctgtgcaaagcttcactaaaaccggagtttctgctggcagctaccatactaaagaaacacatgtgataccgtcaatgcagtgtccctgtgtaataaaccaacaaacccttcatattcttttagtatccatctatggaatgagaatattaacatagttacataaactagcc

SEQ ID NO: 58392 - DNA, 1427 bp, Homo sapiens
ttccatcaaattataagataatttagagacaataatgagatgaatgaggtataactaagtaaaatgttagttatgttgttggaaaaactagatcagtatatgtaaagcaattagaaaatgtagaatagtttgttactcagtgctgaactatctggtatagattataggtctctaggagttcaaacaagggaaggattaatgtagcataacatgattttgcaagattgcagagatttgaactctgagtcctaaagggtaattaggatttggaaaggaaaaagattaaaagaaatgcttttatacatttaccagatagaaagattatatgggaaaaagaaaaggtaaataattttattacgtacaatgtgttggtttcttatcagtaaaataggaatcaattgtataaaattgttttgaaaatttgaagtgataatatgcataaagaattcatattaagcctgagacattagcctaagaacttaaataaaatactttttaaacatacacctaagaacttaataaaaaggattgcttaacaagagtttgtcagttaaaaattaaattaataagagcaaacagtgttaactggttgccacacaccgaaaaagcaaataagtgttctattaggtagcttagttttctgttcctggaaatgacgaaaaccatttggttacttattaaggggaatatgaagcaatgttatattgtggaagttgatgtgatgaattcctactagctcttcctttaatctttcagttttcaagttagcatggctctatcatggattaacctgaggtttctgaggaatatgaaccatcttttatctctagaatataagaaaatggtaattcttgttattacaaacttcctcagaaacttgcagagtatttactttgctgaaatttggctacgtgtgtatttgtatgtacatacgcatgtgtgggggtggatatgtgagttgtggttttttaaaaatacttattgtctgaatggggctgaacataactttctcggaaagaaattttatttttatttttctacttacaagagagaagtttttctaataaaactttagtatatattattttatagtaccaaataattaataataatccacgatggaaaaaatcctaaacaatacttttgttaaattaatttgaaatgtatataaaaagaatgttctaggctaaaatatctacaatgttttttctttaaagggccagatggtaaatattttaggctctgtgagctatatgggctctgttgcaactactgaactcagccataaccagttgtagaaaacacacagatgaatggatatagcaacgttacaataaagccttacttacaaaagcaggttataaacaggatggatttggtccacaagccttaattagacaactcctgttctaggagcacagttgaaa

SEQ ID NO: 58393 - DNA, 392 bp, Homo sapiens
gtattagccacttcccttagacaaaagagacatataaccaatatatcacaatcccaatcacttttaaatgataaaacagctatgatgtaataactcttttcaggaacacgaaaggtagaagtgggttaaagcagtggtgtgccggagccagcttatactgattggctcaagagaaatagtgtgtgcatttcttaccaatttcaaggtcaatggcatcatgctggtagctttaattcagctacagtgagcatacttacaccacagaaatctgcaaatattgtcaatctaattttccatcgaagctctgatactagttgttaaacattaaccagcacaccattggattgaggtaaaatgcagagcacatacccacatgaaagggacagctgcat

SEQ ID NO: 58394 - DNA, 1005 bp, Homo sapiens
cctgctcccaaattatattataattcagagcacctgcagtgtagcagaaggaattccccatcccctacctaactgggattcctggacaggacaggcgaggggcacaagagacagtcagcctgatttcacctaacaagctcggtaagaagaggtccagagttagaagagttggaaaaggtataaactagcgcgattcctccaaaaaccgcattcagaaagctttagacaggacagtctagacagtccaggcccgcgtctgcaggttgcccggcaacaggcgccgcagcgcagggcttctgattacactctgacctccagggacgaaaaggtcgtcggcccaagtcccttgttcgttctacgccacctcccgcccccgccaatctgcctcctcagttccgctgcctggctgaccggaactgagcttgtggccggagaccccgccacgctctcagaagtacttgctggctggaaaacccaaaggggtgaaacctcagctacagccgccgcagcctcccagggaaccggctccgcggcgcccctaaaccccggcgaggagccggagcggactcactcacccgcgcttctcctgagcagggaaagggccaaagcccggcccggatccacggcggttgttgtgtaattctttgtctaattgaattctgtttaacatatttcataaggcacctgtctgtgcacagagcccagaatgacgttttgaggagaagaaatttaagcatatgctacaatatctgctctcaaggagcttgcacttattttttttaaagactgtaatatattatatagagatacatagatattagacatggatattactttaaatttgtgtgactatgtacatatagatgattacatgaataattgcatatatatgtatgtgtatttgtgtgtgtatatataattaaaatttaaaatgatgtgtggaaagggcaaaggcctagaaatcaagaaacctgcattttattctttgcctttttttttttttga

SEQ ID NO: 58395 - DNA, 635 bp, Homo sapiens
ggaaattattaaatgtttgacaagttgataatttaggatcactgtatgtcactgtataagaattgcctattcttactctattcccaatctctgagggaagtggcaatatgattctagattatttagaacaataaaaatctatacacggaagctgcgtctaagaaacgaatatatagtgctttgcactcgactggcccattgtcagcatcccgcacttgttctttacctaacttgtgtggcttgcatattgcaatctgtattacaatccagacgcgctctgcagattacagattggatccacagaaagcagtttggatggttgaaattccctccaccagagggcgactcagagctttcccctgtagctcagagctttgtggaaggggaaccctgctgcctgttcttccccacagcgacactgacaagttgatccagccgcgctgggctcgagcctgtgcggcaggatggagccaagggagagcgtggtgcgggggcgtggggaaatcgggttgccccagccgttactggtccgcgcagtcagggcatcctccgcatcctccacatccttccatggctctgaagaataaattcagttgtttatggatcttgggtctgtgtttggtagccactacatc

SEQ ID NO: 58396 - DNA, 2284 bp, Homo sapiens
acttaaaacttactactatgcagtcatagtagtaagtattcaagggcataaatgaaaccatcttacataggtctattgtttttcaattgtgtgcatcacagacaatttttaaaagcacttttctttttataaatgtttggctaacctgttacaatgttttgtagtaaaattctctcccaatgtcaattttccatatctgcttaatgctattaagcacaatatgtaatatgcaaacgtgtattccaaaactaatacttgctttttttccatgcttagaatttaaagtcttcaaagcaagttggttttgttttgttttgtttttgaggaaaatgtttggaggtaaacagatcagaccaaaatcagctagatattagccaattttgtctggaacaaaaaaagaaaacaaaagagttcgttcttactgtgaatgccacaattagtgaaaaagatgaatcttgatattccgggctgtctgaattgtgctgatgagagaagaagtagaaatgttttaacctttgaagagtttggtgatccctactctcccttcactcccatttattttgtggtttcccacaaaggttcatttaaaaactgaaaaaaatctcatcaattaagttggccttaagaacttctttggccttaagaactagcaatatttctgtattccattctgtccctgaggaaaataaaaggcaggccctgcaccaaatttccaactcaacaggtaatggggaaaaaaaatttaattgaatttgtatctgtatcgcagaaaaatcatttcacctggcacaattagaaggttcctcagacctgttactcagcaattggcatttaccatacaaactgatgactcattaataacgacatatcattcagtgtcagaaatcaattcgggataacatttcactacattagtttagtgaaaagggcttactcacgtaacacaagtctttctttagtttgtcagacatctattaccagctttcttcactctgcaggtctagctttcccctcctctccccctcccctacccactctcccctccctcttctctcctccctcctccttaccccctcctccctcctttgtttttccctcctccctcctccctttctccttccgggaggcgggacaaggcttgcttgcgtcctccgtagattggcaggtcactgggacggccagcgcgtgcgcactggcctgtcagcggccggtggaccatggaggccgcaaggcccttcgcccgggagtggagggcccagtccctacccctggcagtagggggcgttttgaagctgcggctctgtgagctgtggctactgctactgggttctagtttgaacgccagatttttgccagacgaggaggacgtagactttatcaacgagtacgtgaacctccacaatgagctgcggggcgacgtcattccccgagggtctaacttgcgcttcatggtgaggccggaaggcggtttgccgacccttccactaccgttgccacaacgcctccctggatctcgggtagttggggccactgctctgaggctgaaggatcgcggagaaccgcacttttagcttggtttttaaagtacacgtgaagtttacacagagaaaaactgcggacactctaacacatgcttattaccatgatattacacagggccaggactaaggtgatggaggcactggcctgaagtgcagattttaagggggcgccaattcaagaaaatgatattttaatgcaacgggtttttaaaaattaaaaatcagtgcaaaaatatcaatatcaagggtaaagaaaatgttaaaaaatttaacaaagacaggttccttgggtctggattagggaaaaacaagtgcgacactctcagggtggtgcaaatcaagatgagattctgtttgtatttgaaatttttatttttagctttttccatcatcgatgtcacattagctttgccttttaaaaatgtttgttatcttgattttttttttttgtgcccattccaaatttggctcctaaggaagtgtctcagtttcctcaccctagtcttgaccctgattttgccttaccttacaatgcggttcttgctttccccctcttttacaccctatagtcatttaacaactcaactattccctggttgctattgagttttcctgactgtcattaaaatgactgaaaatccggcaaataaataactgtcctcttagggaattagaagcttcaaacttataaattatattgcaaggactactttcctagacatgtcttttcttccttcagcatt

SEQ ID NO: 58397 - DNA, 3459 bp, Homo sapiens
tgcagtgacctgactatagctcttcacagcctcaaattgtggggatcaagctatcctcccacctcaactttctgagtaggtggggctacaggtgtgcctggaatgtttctttactttttgtttgcattagaaatatttccccacctcattccattttccatctctcttaattttctaaaatacacgtgttttctaaaaccaggtctaaaccccacctacagctaaaatcctccaataacttcccatgactttggtgataaaataaaaaatcattagcagaattgagaaatccttcctgatctgactcttaacttctctcccccaagtggcatgaaagcatcatttggattctgaattccatgacaccaggtatcaagttttctaccagtcagaatcactacttatttacagaccatatttacagagggagacaatatggagaggttcttgctctattcttgccataacaccatgtcttcaatttcacaactagatatatagttcctatccctctaattcccttctcctctccagcgctttttcacttgatcaacacctagctgattctagcctcagcaaagacctcacctgctgtatgtaggccggctctgccgtttccagaatgggttaagtatgctctcttgtgtgtccatatctacctgtgctttcctatatccagatctccaacagcccctgttgtaacatccttgtcatcaccatctcacagctcttaccactgtaagctccttggggccagtgactgtgtttttatttctgtattactaaggtgaatatacaaggcaggaatttaatattagctagttcatttgatcctgccaaacctctgtaattaaggaagcagaaaaggtcccatagtctcattcaataggtggctgaggtttagagagttttgtatcctgtccaaggtcttacagctagttagaaacagaaactaaattctcaacttgagtcctgtattctttctactattctccctctcaatccctctctctctttctctctctctctctttctctccctctctctctctcacacacacacacacacacacacatacacgcttacatgtttctaccatcgtgaatgaattctaggtcaagtttatgatgttaaccagatattccaaccactatgtgttgatatgactctaaaaagaaaaagatttctgaaagcattttgcgaggcatttatagaagtaagagatattttcattttatcaccgcaacctccattaaaaattggagactattattcctggagacttcagaattttctttggaaatatctcccaattcaaaaggaagtctgacacagcctcataaaaatctatgtcgtaataggtgctgtgtcactgaaaaccactgaaaagacagggttaagaacacaaagtgagctgcacaccatatatggagaaacccgtttcttaaaactagtgatgaactcatgctctgttctgttttctcaaagctgaagtcggctaggtttgcaaagctgtgggctgagcactcaggcaatcacactctcagaaactgcggcggctctggactgcagcctcccaaggctccatgccagacaaagcatgcgtgtcacacttgctacaatagcctggatggtttcttttgtctccaattattcacacacagcaaatattttgccagatatcgaaaatgaagatttcatcaaagactgcgttcgaatccataacaagttccgatcagaggtgaaaccaacagccagtgatatgctatacatggtaaggaaaatatcattaattgtggcgtcagtcagtcagaaacaactaatgtgtattgactttggtgttaataccttcgtaatactgaatgatttttttttcattgtgattaatgtatgcagtaaattcacagtctgtgatcaaaacacatccagtttagctctgtctacccaactgttgttataagcaagtgccacagcacattttacttctctttggacacttcctgttttctggttttcagtggattttacttctctttttgttatcttcctccctgttaatttttgtgatttggttttctttttttttttttttttttgtctctaaatttactttttttgctgctgacaaagtactgagttgctcaggtaggcagaatggcatctggggaaaggatgggattttgattcagtaaggcttgggattgaatttcagatctgtggctttaagctggtttttaacctttctgaacttcttaggatatgggctgttgtggttatggaataatgttgtgaaacacggcacacactattttgcccacaattagccttcagtgaaatgtcagttttcctcacttagattctaaattccatgaaactaaattgtcacgtttcctaccagccctactcagtgcttgaagaccatatttatagaggactcatatgcagtggtatcttctctccttatctcacctcgttttccattcaaattcccactgtactcaccccagttacatttcagatgaaccccctattgtttaatgtttatttttgcagacttgggacccagcactagcccaaattgcaaaagcatgggccagcaattgccagttttcacataatacacggctgaagccaccccacaagctgcacccaaacttcacttcactgggagagaacatctggactgggtctgtgcccattttttctgtgtcttccgccatcacaaactggtatgacgaaatccaggactatgacttcaagactcggatatgcaaaaaagtctgtggccactacactcaggtaaggatctgccctatattatcttgaaactgtcttttcaagtatgaggagaaaaattgtactatgaagttaagaaaatgtatagtatgctagtatacctgtaaatataagggagttaaatagaacagcctccaagaacagaaaataatgcttgaaaagtttagttgtgtgaactaaacacataataggtaatatgtgaggcccaccaacttggacaggctttgaacaattcctgtaacagctattctcccataggactttattccatttgtgagaaatcaaagaaccttatgagtgaaaggattttcaggttccagctgtagcatgagttttaaatgaaatttgagccaattgttttgggactataaaattggaagaaacaagactctcagacagaaacatcaataagaactgatgcttccacaacctctcattctctcaaacatcgactgaaaacctactgtgtgccatgcactaggcaccacgcacggtgctacacaaggagggagaaaaagtcagtcccaggccaacagagaggccaacgtgtaaacttatatgaaccattctgagggtattctgcccccagaatccatattattagtcccaatagccacattcagagccacccattgagtttttttttttttttttaatttttac

SEQ ID NO: 58398 - DNA, 1546 bp, Homo sapiens
tgctagtttcccgcatggttttattaaactctatataagttgtatcccctgctatgtacgttacataatcatttaatgagcaacaacaaagaaactttgaatactttcccaatgcatctaaattgagagttcaatgtttttaacacttcctataagcctggttgaacagatccccaggctatttatgacttctctatcattcacactgaagaaaacgggtaaaaccagactacaacgcaggagttaacaattaaaaggtaacacaacctaaacagtaagggctgtgtcgtctaatattttagcatctgacaaacaggaattgataatctttcaaaatgtctttactgacaaactagagctaaggacatgtcggatagctcctttccccatacctcaccccattatcagggtccactcttgtatatcatgactacctattcccacctcaccctattcctcattccgtcagtgactttcagccacccgcaggcttacaaggttctgcgtcgccctaggcattttcttaatactcatccttttacaaaagacgtaatccgcaacagcttcgctttggggaccctttagcaaaagcaatgaattaggaacacctgggtggcaccatatcggccagccgttcctgtgggcccagccaaaatcttatcagcgattattcaggtactcaactacacagtacaggctccaggtggttttataagtccacgaggaacgaaagaaaaaaacatcgcaactcaacgtacacaaaccccaggcttcggttcccacataacatcaccttggttctccggcttcggcttctggttacgaaattcactttttccagcgcctttttctggccgctccagcgagggagacgccatttgcaagctgcttccggtggctccggaaatgaaactgttcttaaaccctaccggctaaaacgcctacactcaaaatgagttccgcggaactcagacgaggagatctgcgcagtctccgtgcgtacgtgcgttaagcccgcgcttttacacaaaccacagcttctcctacgtggccaatgaagagccggagactttctcccagtatgccctgaaaccatggagtttgcgtactgggacttgtagtttagcaggcggtataggcaaattggatactgttttatccgtagtttcctcgtggcctcacggcctaacctggaccatcggacagcggagtgctaccaacctgtcattgatgtcattcattctttcgataaatatttatatgttggccaaatatgcgctagatgttgggaggaagtacaaatatgagaatacaatgtatattgggcctccactgcaacaagtgacaggaatagctactatttattgtgagactactttgtttcagtactttatttacattatttctaattttaaaaacagtgacaaaattaaacttttcaaagttgtttctgatggtaatcttcccgagtgttggtatttctctaagtcagagggatggtaattcaacatcctgacgtttctgaagtatttcaactagcctaaga

SEQ ID NO: 58399 - DNA, 1185 bp, Homo sapiens
agctccatgagggacaagattcttttcttttttgttcagtgctgaatcctgatagttaaaaagttctcaaaaaaatatctgttgaatgaatgagtaaatggagcaaaaaagctaacttctgggtgccacagaaagagagtccatgttattgttgacatccttgtaaagaatgcaaagttgtctgagcacttcagcaatggtttctgcaagcaatgtgcaaatttggagacagccttccctgttcttctgagcaggcctgggatgacctctgcctgttttcaaccattattgatggtaattattcatgtttgaaattaacattacatttcttgaaaaatgtcccttaattagaattttcactgtttcaaactagccttatcccttaattagtccaaagtggtaactgaagtttatgtcccagctcaattcattctccttctttaccttaatctcctgttttctcatttgtcccattaaccataaatggggctgagagaggcacaaattgttttctcatgatgaaaggtctgaatcgactaattaggtcagtcaattcccagagtgcaaaggctaaattttcttgcttggatatgcaccacatatctgcaaaccacagcacagttagttatcaaatattctgcaaatgttcccatgcggagctccctctgagggtgatcagggaggcttggaacagatcagaaagaattttgtccacatgtttatcatgcaggagggaactctgtgagggaaaactattcttcaacttcttttatcactattaatatagaaacaaagcaaaagaagagcggactgtgctgttctccctgttctgagtatctggacatgggctttatcttttttatggaaagtacagggttgtggggtgaggggtggaaccacttaccattcatcttcctgtattgatattcattatgtaggagtaagaacatcttgccctgacttgtattaccccaggcaacaaaaccaattaaactcccttaatggacaattcctaaatgtcctatatatggagccaacttggcacttcccccactgtgttatgagcttagtgaaaagtcccacagaagtatgatgctggggctaaaaatgtccaatggcactagcgatgaaaaagtcagacagaatcttggggttctcaagtccatgtttcccttgaatttcttt

SEQ ID NO: 58400 - DNA, 1911 bp, Homo sapiens
actcgatcccccagccctccaggagatccaggtagtgggcagggagttatcagagtcatgtcatagagaagtctaagaaacccagataaggagatgagggatgagtgtcaccaggaagcagatccctgtatgagaatcagtatgtggcaacagaaatcaaaccactttcaactagacccaaacttaatgtaaagacacatcttctaatatatcccaacagggctgaaattaatcctagagatggagagttttgaacctgcagggtaggataggcaaatgattacacttgactaactaaatggaccttgaggttgacttgccaacacccagacccactatcttacctacgtttttgtccatggaggcaaaccaagaggacaggggatgctgactccaggctggctccacacataaagcatgctcttagggcctaaaaaatcagagtatttttaccatctggcccaagacaaatatttgggctgcaaggcaggagggagcatttgcctgaggttttgggtcaaatagtaacaggtttttcaggcagtgggtgtagacctgggagttgttggcagccatgttgggacaaaagcatagcagctttggcacaaagctgcatcactcaccactgagtatcagagaaaaggacagaaaccaagtccttggtgatgcaattttgtgactggatcaaaccaatcctgacacctatacacttctgaatttccagttatgtgagccaacaaatcttctttatggcataagccagtttaatttgtgttttctgatatggtaactggatgcattctaactgagacaaccttcaaagtgatcaggtaggtgttcatggagaacagaacctggcaaaacatgctggagaaaccagggaagtcaaagatcagagaaggctggtgtagccaatgaaaactacacaagtatcttgagaagtgtctctgaagaaaaggtagatgtggcagatgaggaagagagtaggccttgccatctgcaagaagggtgtgacccaccacacaggaatgggctaggaccagctgagcatggcccttcccttcccttgtctgacagttatggaaaggaattctttcatttcctggtgagcagcagctctacccattgcatcagcttgctgtgctcgcctggtgtctgctccttaatcagacatgggagccagggcaagtgaatgccaagttgtgaaaatagaagaacaggtaaatggaagttctctccaatttgcatctggagtaacacaggggtgatagatgtgagaaagccaaattgctaggtaatgtacacatcaggcatagcttgctgcagtatgatatggtcatgaacaactttctttgagaaatttgcctcgactatcaaatgtggttttcttttcctttaatgttctataattagttaataaaaatgtctgtaatccaaattaatatccataatgtaccaatcaaaatcagagatgtatgatatactcagactggagatgctgctcttccacaattctacaaacaggcatttgccccaggtcctcggtggctccacaagccccttgtgtgaacatgaaacagcccatagagcagaaagaaaggcaaaaataagactcagtgggtcgggcacagtggctcatgcccgtaatcccagcactttgggaggccaaggcaggtggatcacttgaggtcaggagttcaacaccagcctggccaaaatggtgaaaccccacccctgaaaaaaaattagctgggcatggtagcgcatgcctgtaatctcaactatttgggagggtggggcaggagaatagcttgaacctgggaggcagaggttgcagtgagccaagattgcatcactgcacgccggcctgggcgacagagtgatactttgtctcaaagtaagtaagaaaga

SEQ ID NO: 58401 - DNA, 1641 bp, Homo sapiens
tttatatctcctttcttcaaaagaggcactattacatgaggctaagaacaggctccagagtcagacagaggtgagtttaaatcctaattctaccatctacaggctgtgtgacactgggaaagtcatttaacctcttgggcctcagtttcctcttcaataataatactgatttcataaggttcttaaaaatttagttggaaaacacatataaagatcaatgttcaccacataaatcttcaacaaatattaattatttaatattatgattaaagaggccatccctaaatgagtgagtcttgataacaaatccagatttcaaaaaagagactctgattgatccaacttgggccaagtgcttccctctcctctatcagtaacagccagagggtagagtcacagctgagaaagatggctagcacagacattcctgtggtagagactcaggagcctgtctgcaactgaacccaggagagaagataccagaatcagagagaagaggtgcggagtgaaagtcaggcccctaacctgctgaggggacagctgcccgtggatcccaggccacagaagaaaaaacttatttgcggcttttgggccttagctaaagagactctctcagttgatctttggaacttgtgctactgatttttaatttagtcaatattgactagttaacctcctggactttgaaatcattgtttactctcttttctatcactttagcttgtttggattattcttttattctctctgacctttagtttcagattttcctttatcttagttgttcttacctcatggtttgcttgctgccttctgcttttttttttttttttttttttttttttggtggcagggaggggttgggttcatttatgtaacctagtttcttgtatcattttatctttatttaactgttcttttttattgttttattgctacttttaaacctttttattatctacaatttttagttttctgaaattctaccagtgaaaagtgaagaggaaggagttcagctgacaggatgacccctttgaccccaaaagacggatcggggctcatttccatttcaaccatcctgtaggggcccccagaccctgatgctgatctacagaaatctcacagaaactctgcataatttagtttagaaaggtgtttacagatcccctcggttaaggattacacatcaggctgcttctcaccatactttgtttctgcttttctaggataaagtgcctcccttcagcagattgagtaggcggtgagtcctattctggagaaaaaaggtttgtagctctgccaaagaatcagtgaaacaggatgcagcattccagatgaaagaggccttctcatcactgtggagctgcagagctcagccctaggaccttctcttctctgtcttcattcagttattgatttcttaggtactatccacatactgatgactcccaaatctatattttcagaacacaacctctctcctgaactctatagtgctaacctcccacttgacatctcaatttcaatgttcaataggcatctcaaacttagcatatccaaaactaaattactgatctttccccctgctgaaccagctcctcccaaagtctttcccatctcagataatagtaacatcatctt

SEQ ID NO: 58402 - DNA, 1226 bp, Homo sapiens
attttttgggagtaactgataaataatgccctaattactattgacttccactgataaaaactgaaaaggcaaagtgagagactgaagagttaaatggctgggccaaaattctaagtccaatgctggctttgagctcttccatccagtgcccagacacctttccctgatcctaaagagcctgcctctcagcataaatattcactttatcactggtatgcctgtcttaatgtataaacactattgatggtttactctgtgcatttaattcctatagtccgcaattataaatataagagactttgttccagtttttgttctacattccacagtgtctgtgtcacacacgaatttccctttgaaaccaatgagcattctatgccagaagatatcctggggatggaggaggaagggagggaggggagagagagagagaatcagagtcaccatctgttgacaatactcttgtgcagagccagttttgaaggttaatgacatgtcacgcatcctccagcgtctggtaacaaaaataggctgctctcccagaattcgttagggagttgtggccccatggaagatgtaacttgtcagccagcactccagtagggtccaggaagacaatttctgccaaaagctggatgaaatttaatggagatccaggaaaaacaacttttactaaaattcaaatgtggaagtgatcatttttccctgaggccagtaaaaaggctataaattattgactttccaaaatgaccctgcgtaatgtttataaggaactcttgcatttcatcgcaattcttcaatatacatctactcctttctctatttcttttcagaaaaattaagattgtaagcttgtaatgcaaacaggtccaagggttcaccaaggatctgcccatggtttttttagatggttaaatttttggcagtgcagctgatccacggcaaatctgggtctcagctttattgacagcctactgtttaatgactcactttgctgtctcatcaagaatgcacccagtggaaaggctacaccttctcaagtgtaattgcatgctttctccacatctcttctgggctctctttaattttcaaagccccactgagcaacctttaaaaatctgagccctttcccacctggtgctcgatgctttaagaggaggtgactctgactgtttttctgttaacctaagaacaaactgtcttgtcccagcatggagtagagtggc

SEQ ID NO: 58403 - DNA, 695 bp, Homo sapiens
agttatatccacagaattccccttagctaagagttggaaggtttttgtctggtttagtttttgctggcaaaaagacacccttttgtgaagctgcacttgccccctagagaatatggcagcaccaaataattctccttcatttatggtcaagcaacattgctctccttactgcaaagttctagctagttgtctaggagttgtcctcttcaactaaaagccatgtgcctcagaacaaaaaattattcttcattaggctgttgttaagacaccctggctagcacagcggtgccctggctggctacctgccctctggaccttatgtgactcaggtattctgacctcattcacactggcaggaattcactttggctcagttctacagtttctagcaaagactaattcttgagacaaattagtggagaagattctgaataaatagcatttagaaactgttcttattcataagcccttgattaagaatggatggagagataaatataataatcctttgaacaatgtctcattagtaattccacaggtttgcttccaccatggaccaggatgtgatacatggagtaatgggaagtctggcaaggcatgttcccagtatcttctgaaccatcgtttcaaattatgagcttcctccagccttcatttgcttttccatccagcctcacctccctggtccatggctg

SEQ ID NO: 58404 - DNA, 1850 bp, Homo sapiens
tatgagtattgacaatacatgtgcttatttgggagtatttcccgaaatttatcagaaaacaaaggaagataaaggaagaagaatccagatcttgttaaaccatgtagcttacatggtttttcataagctgtaattttatcttacatagtttcatttagagggcattaaatgtacactgcgtggctgggcctgtgttggataatttacggacattttaaacaaaaagaaagcatgactcctccttctgggaagtaggacttcattttctatttccagttggaaactttgaaaagttgaattttatttcaataggacagcatttactgagatatttaggtaggaagcaagatcttagccaagaactgctagttaatcttcagcagcttatacataaaaagatattactggaaacactttcagatttgtttatcctcaaataatgtgatctattttcattttgggaaaaaaaaataaagaattccacagaaagaaatgcttgcatgactttctgagtcacactgtgtagattttttccagtaagctacattatgctggatgctgttcaaaagggaaaatgtcaaacacactggggttcagtctggccagtgggtgggtttactcaagcacagaaatcaaatataggcgttcaagccaatacctcagaaacgacagaatgaattaccaatcagagctggaattttagaagttatttttcagctgaatcccacaaatacaatataaatgaacaatccttgtgagcattacaatggcatttatcgttttttttcttagaatcctaaagttgaaaaaaactagacattataaaatttaacctttcttttataccatatctctgacacatctctgatagattttcctacttctgcttgaaaacttctgaaaacggagagctcactactttgcagcacagtcccttcctttgtcagatcaatgaaaggcaaggaaaagaacctggaatgatataagccaagataataacagtggttacctaagggtgggcaaaaagatgcatttcttgttgttgttcttttgcttgtattttctagcttttctataatgggtttctgtttttataataagtaaaagataagtactcttcaaaaccatgaagaattccaatattaacactggtgttgtcccaacttttcactcgaaaaattaagtcagagtaagattcaatggctaaaaattagatacaaaaattaccaatgttccaaaaatctatgactgggaaatatctatttcaactgcatcaatatgtcaaccaaggttatgttgatcaaattgtttccagctaaattgctctggtcaaatagtaagatagttaataattcttagactatgtaccctctgcttctatcaaaacattctaaggatgccaaacattttagaaacagtatcattccatgaactctaatcaagttattattgatctacaccaccaaatttactgtgttctataattatctaaatggtggttttattattattattattatggaacttaacatttaacccttgttaaattgattatatcacctttgttctttccttcttacaaggtgctaagtggatcgcttaagaggttatgggggaaaaatttgttcccagatgagaaagatcatgttctgcagaattactcatgcatcttcatgactgttcctgcttccccgcctcccaggtccttggccttccctccttgctcccagcatattattagccagctcctagtacataatatgctttcaaacaaatcatatgtattgagcatctactgtgtatctaacacttccacataggaagcgttattcctcaacagccctccttat

SEQ ID NO: 58405 - DNA, 659 bp, Homo sapiens
ctttttctgctttcaaccctgataaatccctgagataaataatcacaaagcttggccaacattaggggttagtatctccatttgaaataaagcacaggtagctgaagtgatgtgtaccatgtgttggaggcaaaacctagacaaagaagccaggtgtgctgattgtaggcaagtgtcctgtccaggatgccaccaaattgcaagtcagagagcatgcagcaaatgctggctttggaactagcaggcaagaaactgaaggctcacttgtgttttattatcaacactggggaagctgaataaaaccagctagtggtgggcagggagccagcattggcttgattagatcttcactctgtggttaccagccagtgccatccagggagagcctgaatctggaggagaggctgtgctgccagtgcagccagcacctgtgtttgactatttctactgcttgtttcaagcaaacaggcagtgacgcaagaaaggcaggaaagaggactctctgagcctggcatctggtgaggccaagttttactgagcatgcacattgcttttctaccatcttgaggataaaccacttgcccctcggtcagaagctctcctaactagaagatgtcttattttggaaacaaaagctaagtaatgggttgactccttgg

SEQ ID NO: 58406 - DNA, 2850 bp, Homo sapiens
aaacttttttttaacacaggacctgatgagaaaaatgagacaatatataaggaaatacaacctcctatgataaatgaattgaatccatataccttacttattgtaagcaaaaatacgtatggtaaaatataaataatcacaggtttaaatgtcctcctctctagaacattggtaaagcccttaaccaggaccacttgggagagaaactctgtccttatctgagtccaaatctgcatcttattttatagttttcatccatgaaggtcttttttggctgtttcctgttgtcagtgctaatatgctcattgtaaagaactttgagtttttatgtctacaattactcaaagtccaatgcctaatacacaggttttcttccatttaagtcatcaactatatttctagtattgttccagtctctgctcgtaattgcttttgtacgagcctgtataaccaaagaaacttctaaagatacagtcctcttatatgaccactttcaaatggaactgttccgctcaaagcttcagatctttcctcaggtgaggcagagagagaaatcacttctaaattgagcatttagccttcattactatattccctatatcacaatgtactgtaaatggttcacttatcttgcatttatcccaaggtactataaatttatgtttaattatttgattgtttatctctaccatgagttataataagtctaggaggacagggagcatctgtattgtctattgctgaatcacctatacctaacttgatgcctggctcacataaatgtttcataaatatttgttgaattgaagaatggacggatggataattgttccctgcttttccacagaatatttcctacaaagttactatccacccttgaggccccagagaacagacagggtagcacattcatttgtgtgtgtcctcagtactgagaccaagggctgacacagagtagttgtataatgaatgtttgatgaatgactgaataacctaaggcagagttcactaagccatatgattcattgccttgttgttcaataccttccacaaaagagttgcctaagcttgtatataatctgaatcaaatcagaggattcagcagaaattctctgaacttgaatagtctggcttgtgaaacagctgaatatctaaacattcccaagttcccaaattgtatgtagactaaataatttgcaaccaggaattgtccttgttagggagattagtgctgagaatatcccaatttgtacactactaagtccaagaaacaaattacatgtctatttgccagagccatggtttctgtatggcatcatctcagatgagtcaggaccaaagaggtcatcagtatcagaaatgcagtgactgatttcctgcaccgttgaaggctgagaaataggatttgggaattgagctttatagtccaaatattccttccatcaccttacccccccataaatgcatgcactcaattgaagtcagattactcaggctgactataaaaggcaagattttcctgtttccattttcaaatataaaatagccacctataggaaataaaacatgattcacagttaggtaaatactctattgttagtgagtcaataaacatgaatcagtcgtatacttataaagacaacctgaaagaatttgaggcataggataacaaaataaaaattagagctaacatctgttgaacattttgctgttcaccaaacattgcactaacaatatggaatatatgacagttaattttaggtatccactagactgggttgggaatacccaggtagcgagcaaaacattattcccgggtgtgtctgtgacggtgcttctggaagagataagcatttgaatcagtagacttagtaatcagcagacttccatccaggctctgcaccgactagatgatgatcacccacatcctctggataaaaagccagagggagagtcaattcattctcttctgggttggggatagccatcttgtcctgccctcagacgtcggaactccaggttctcaggccttcagccttggactgagagttgcaccgttggctcccctgttcccaggcctttggactcagacagaattacactaccagcttctctggttctccagcttgcagacagcatatcaggatttctcagcctctataatcacatgatccaattcccttaataaattccctcttatatctatatatatcctattggttctctttctctggagatctctgactaatacagaatatatcttttaaatctccatactaacccaagaggtaaagtctattattatcaccattttataaataagaaaactgacatccatagaagtcaaataattttccccagatgacacattatataaaagaggggccaggatttaatcccagaaagataaaaaggtaaaaatctaagccaatcatttaacatctgagtcaagaagcagagaaaaatcagtgaacacctttaaaagttcttttggggttaagggagtctggcatacaagtaggatttccacttctatgcagttcagacaggaaaggagatggtcccaaagtggtaggtgtggctgggaatacaaccaatttgaatcaaaaggaggaaagaaaatcagttccagatccagaatactatgtgtctctcccaaggcctattcccctcccacaaaaaaattgtccaatttttaaaattttctcttaagggtcacatctataaaacaaatcactggaggctcagaataggtactttttacaaatattattagctcctgaatataggtatcttacttactactcttaatacattttgaaaccatgagaatcactaaataaaggcaga

SEQ ID NO: 58407 - DNA, 846 bp, Homo sapiens
ctgctgatagaagaacaggtaaaacagattttgaaacacacagctatattaatcaagacccccccttaagcaattgaagacagtcagatattctcctaatgtttctaccaaaccaaacatgtgttttgtacctccagggacaagaagaaaccagcaggagagaacatttggatcaaagagatgagagtggagaagagaggaacacagagtgattctctgccaaagcaaacatatataggcagagggaagtgagggaatgacatttccttagtagattctctaaagtaaaaatacaaagaattcatctggagctgaaacaacagctgtagggtcttgatgagccccatgtgagggcgaggaacctgtgaagtttgctttcactgtctctatcctggcagaagaccagagctgcctctggctggtatttacaaagaactggtgaggagccagctggctgctggaggcatgtttccgtatcattcctcacatgcaaaatgctctgcagctggaaaagagtcacaatggctgcagccaatcaagcctaggcaatatgtccagcctttcctccctttgtcccctcaaccccttcctcaagagaacacaattggcaaaaatccagcagtgtccaatgaggaagggactgaggaggccatgggaggatggttaagctagcagagacaacttgctgtgattgtcattcactaaatatttactcaacatctactatgttctgggtccttgggatactgataaacaagacagcatgtatattctggtatttttgatttggaaaaattttgtgcccttggctcttcacatcaacttccagtggtgagggaaggaaat

SEQ ID NO: 58408 - DNA, 1479 bp, Homo sapiens
gattcagctatgaaacaatgctttgtctaactgcctggttacatggtgcctgaatagagggtgaggatgaggaaagagatgacaaatccacaggaaatgatgaaagaaattcagcccaggatttgaaaattacaataagtaatctgcaatgcagataatctacataaagagtaaagacaaatcactgaaaacaggctgcatgcggtggctcaagcctgtaatcccagcattttgggaggccgaggggggcagatcacctgaggtcaggagtgcaagaccagcttggccaacatggagtaaccccatctctattaaaatacaaaaattagccgagcatgatgatgggtgcctgtaatcccagctactcaggaggctgagacaggagaatcacttgaacccaggagatggtagctgcagtgagccgagatcacaccactgcactccagcctggggggctgagcaagactccatctcaaaaaaaaaaaaaaaaaaaaaaaaaaagaaaagaaattactgaaaacagctaacttcaaattcagcaaactaagtcagattccgctatggcaaagagtttgccaaaagttatacttttgaccacagtattagaataggaaggaagtaatactgaagacaaaattcactaaaatattttggtttcagttggaacaaaaacattctcctttaaggaactggtattgtggagacttgatgatattctaggaaatgaaatgagataatgttttcgaaatagccccacgataatgtcaatgagtaatttcagttcttatcaccatatgatgtggttagtgagcagtactgatacggaggggaaaaaaaaggtgtcagaatgttaaaaaaaaaaaaaaaaaaaaaaagcctccctctctcaggaaaacagcaatcaacagctactgctgctggacaaaaacctaacacttctcagtcatgggggaaaaatgtctgaaaatgagtttcactgtttctcagcaaatgttggcttaaatatcttggctgtgcccatcagaatacctatgcccagcttcataatcataaagaaaacaggattccaggtcatttgtgctacaagagactcaaaaggtcatttggcccatgtccaaattgacactaacttttctctattacacagcacacaaactgcagagtcagatctatggaaccaggtctttctcctcttccttgatctatttctcttcttcttttaaaaataacatagattggccaggcatggtggctcatgcctgtaatcccagcactttgggaggccaaggcaggtggatcgcctgaggtcagaagttcgaccccagtctggccaacatagtgaaaccccatctctactaaaaatacaaaaattagcgaggcatggtggtgcatgcctgtaatcccagctaccggggggctgaggcaggagtattgcttgaacctgggaggaggaggttgcagtgagccgagatcgtgcca

SEQ ID NO: 58409 - DNA, 2592 bp, Homo sapiens
actggacaccctactacccatacccagtttaagatacagattacaaccaacaccgttaaagcccttttgcatgcccttctccatcccagccccctcctaaattttgtttataatgatctcgcttttcttcataattttacctccaaaatatgcatctgtaaacaatatgctgtttttgcaagcttttgaacattatataaaataaatcatactgcatataaaaaaataaaataaaataaattgaagaagtgattcagaaaaggcgtaaagaagaaccttaaaatcaaaaaaggattagacattaaatcaggttacagatgaaattcttgttaatgacaatctcaaatattggacaaccttatgttttacataaattctcacatcactatcacagcagcacaaggatccaggtattatgattcccatctataagtgaggaaatagacttaagattaaatgacttgcccaagagtatgcaccaagccaggtctagctgacactaaagcacgcactcctaacctctccactaagctgctttgttgaactctgtgaaggaaatcataggatgtaaatatagctccatctagacagacaagaagacatgagataccagtggtgggatgtctgagattctgaggagttagaaatgaaggagaggaaatttttataccctctctctggtccctggtcttatatttatgaaattcctactttcagcaaagaaaaaagtctgaatgggggacctgctaagagcagagaaaatccccccagggatcattttaggccactgcttataaaagaacaaaaataaaatgggaggaactccagaaccaaagtcctagagtccctatttgcttgtgaatgaaagagactagtatgtaaataagagctttgcataagccagacattctttcaagtccagtttatctgcagtatgagtcacttcctttttaaaagcaagaactaaaagagaaagaggcacatagtcattacccagcacaaaccttcttaacagaccttttcttcctattcaaattgcaagaaggtaaaagactcttgctctaacaaaacagcaacatcattttgcatatagtgtatacactgtttggccagttaataccctccttcagcagagggaaatgaacaagtgagattaacaggcagatgagatgatacaaagcaagcacaggtccagccagggttaacctgacacaaaggaatctgaataacaagaagcctttgaatgactcaggtaaggtttatctcctccaaaaggaagttaacaccatgttactcacagtagcaaaattactcatgaactttggaggaagtctcagagaaggctatggtcagaaaatggaaaaggaaacaagccacaggctcatcttcagatgaggactctgcacagggcttgacctttcaatcgaagaacaaccacagtagtattctgagatggccaagtgtatgggaaagtgactgcttctctcccactccaatgtctactgtaagtcttgttcagccccgagacagatttaccagagctgattcattttgcaggagttgaagactaaatttgaagagtaaagtaggaaggaagagagcaggtacgtagaaaccgaaggacattcctattaccttgggagctctagaggcctgattcatcctttctctaagcccttcatatgaaactatgtccggcaaagtctcagactcacccaacccttcccatgtccacattcacagctaacaggagccaccagcaccaaagtttaaaggccttgggaggcctgacataatacaacaatattttattgagtacctactatgtgctaagcactgtgctaggtgccaaggttacaaccataagcaaaataatagatcattttccattctctgggtgctacagttcaatgggagacactgacagagtggtgcttccaatgccaatgctaaatgctctaatgtgggtggaggaggtggaacaggttattctgagagctcaaggaagggcgaaggggacaatcttctcaggaaatagtgtcctccaagctgagacctaaaggatgaagtggaagcaaagaaaagacttccagaaggggagactcaagagaaagccggagctttgactctgggtatacagaaaaactggaatgccttagatccatctcatacaagaaaggaaaccgtgtcacctcagaatggagtgtttttctctttttagtgttttattaagtaatcctcctcatgggttgtgaggaaaaccctacccaggaagcagcagtcttttgctctctcaacaagaattttccctaactttgcttatctggtaattggtgaatctgaagattgttcttatctgataagatttcagagtattaggaagacattccaattcttcctgactttatcaaaaatgtttttgaatgtactgttaagactagatacgtgggccgggcatggtagctcacgcctgtattcccagcactttgggaggtgggcagatcacaaggtcaagagatccagactatcctggccaacatggtgaaaccctgtctctactaaaaataaaaaaaattagctgggtgtggtggc

SEQ ID NO: 58410 - DNA, 3439 bp, Homo sapiens
agcaattctcctgcctcagcctcccgagtagctgggactacaggcacacaccacgaccccgagtggtgtatttttttagtattttagtagagacggggtttcattgtgttgcccaggctggtctcgcactcctgagctcaggcaatccacctgccttggcctcccacagtgctagtattacaggcgtgaaccaccgcgcctggccggttgttttcttttttaaagaactgatttccttccaaaccaattcagtgtttcttcccaaaccatttatgtgagtacatgtaacttttaacacaaaagctagcaaaaaccctatatttacaagacctgttggttgataataagtacaaaactacataaacacagatttttccctgtagataaaaatcctagattgctgtgaagaaacctcattcactttaacttcctttaaaaacaagaacggatttccatgcactgatttacaccaggaaatagttttgttggttatttacaaatgcttttgaagaatgcaggtgggattacacatgaggctgccacaaaaataaatgttagtaaaatcatgactctattcagcattaatcaaagagcagaagagaagttattatgaaaaatcttactcagcaaacaataaaagataaaattccactagttaaagagcaattttaaaatagttacaaacatgagtcaaataatgaacacatgttaacacatattcaattcactggtggggagccagaagcatgatcaagctggtttaaaggccatttggggacctgggtactcagaaaaattagtgaaatttgtaaaagagaatgtatgaataagattactagttaagtcaaaagaggttaatgtcctacagggcaatgaaaccataatctttagagttatcttttataccggacataaacctaaatgaacatgtgacctcacagagtctaggccttgtcagtagtaaataatgagtaatccttggtggccttttaaacattttcccattgtgacattgataagacatgctgttcctcttctttttttttttttttttttctgagacaaagtctcactctttttgccaaggctggagtgcaatggtgcgatctcggctcactgcaacttctgcctcccaggttcaagcgattctcctgcctcagcctcccgagtagctgggattacagacatctgccacagtgcccggctaatttttgtatttttagtagagatagggttttaccatgttggccaggctggtctcgaactcctgacctcaggcaatctgcccacctcggcctcccaaagtgctgggattacaggcatgagtcaccacgtccggccccctcttttttctttatttccaagtttgcaattttttaaaaaaacctctgaagctgtgcttaaataaaaattagattctagtactacacatcagaagagctattattgaaaagccattcctaaattttgggttgttctcacccctgatttgaaacaacgattccccatctcacaagccaccaagtttgcctcccttttgtctctccctattctagtaaagccctgaaagtttactgcgaaagccatctggttctgtcctctgcacacgagcacagattacacaaattgctttcccacttttagaagaaatatcacaatctgccacactaacgtcaaacaaattccacctgagagaaaaatgcttcttttaagcaaacatgagtcttcactctcttgtcctggccatgcactaatgaccaatcagctacctttcttagtaatcaccttcattttattggaaagccaatactactctccaagcaaaataatcactgtacctttaacttcctcctaggtttagttttccaattctaaattctctttggggacccttttaaatttgtcttaatctgatagatgaaaatgctctcctaaaactcctaggacaagcactcccacaaatactgaaatagattacatttcctttgcctgtttatacctcctgtcagagtaaaacatgcaaaactcagaaaagaatgtaaatgaaaaacaatagcaaaaaaataaataaataaaaagcaagtaattgctttgggctgggaatttgctgtttgttgaatgtgctggattttttggtgggtggtagtgcccctgatctgctacaggagtccatggcaccaagctgggaagcaccggcctctgcctacagcacacgcactccagacttcctcataaatgaggcccatgaagaccaaaatgaagggaaaagcctagcatgtaaatatctcattagcctgggcctgggctggttgcccagcactgattgggttcccagtgacttcttttaggattggggccaggacttatttttatgttcgatcttgaagcaatttattcagttcccacaaacctcctggtattgtgaaaacttcagagtccacagtggcagtctctgagaagggtgtttgagtagactagccaggagagagaaagacaaaatgccacaaagacacataatgaagtagagagccgtacccctattggtgagaacagtccaagttttgatctgccagtcaatctccagagctaaattcccacaccagcttgagtaatcagctgtcacaccctccaagggaaaacctcccatgtaggaggtcatgagggaaaagaggcaatggacagggaaatttcatgtaccgatcactaacacattcccaaccctgcacaaggtgctttagctaaattattcttcaaattaaccccatgaagaaggacaagaaataagaacctatagccaccgtgtcatcaacccccatgctcacctttaattcaatgaacaaactcaggccatgtataaaacttgggaagccaacttcagtgccagaattaattatgtaacttgaataaaaccagatttaatgattccttttcacttgactcccatcacaggctcattagtaaggacagaaatttaccccaaagtgaatcacacgtaagaagggctactcagcattcttggaggatgaatggtaaatgtcctcccagttgcctagagacgctgaatatacagacagctatggctcatggagggattttttttttttttctccctctgacctctagccagacttgggctgaatatcaaaggccaagttcttggtcacattcatatctccctgggcctctagaaaaaggttgagtgggttagctgaggtgcaatagtcagcacttttcagcaggcaggaaccatccgtgctgaaggaaagatagcacacagggtgcccaaagtcataggtttcttgaaagtcacaggatttttgaagaagacaggaactatgttttttaacatatgctactaaaactccaacctgtgatcctaagaagctgaggatatggaaaaaatctgatggtactaaagctttccattcccaaaggaagc

SEQ ID NO: 58411 - DNA, 4420 bp, Homo sapiens
gtttagttcctcattatggccatttctaactacataatgatgtttagttacttaagtgctctgaaatgcagtggcctccattacaaaatggagccaacaaaaaaaaataagtatctcctggtgttgtatttaataagataatggactcaaaagtgcctggcacaaaataggggtgtaataaacgttaatttccttttctgcctctacaaacctgcctgagccaatcaaggaagagaaggaaggcgaggaagtaaaaatggttaagaattacattttaagtcccatttccactcagctgcttttcctagctcagcagagaacatgtcagactaaagaagatcaaataatctttggggtgagttgccctgataaagaaatatgctgaaacagcctgtatgttctcaaagtaagaaaccaaaaggggaaagttcaggacctgtaaatagatccttttcatgcccaagttctgcagattttacaacttgctgggatatttcccagggaaatcagagagaggggatagtaagaggtggcagggggttggcggggaggatttctatattcccatcacagatcatttaactctatttgcagctcaggaaccccagagcacaggagacagaccactgaaaatttcgtgcttattttacctcttcactgtcattactttaaacatgtgtcttagcaggagtattattagttcatgacacagtagacatggataagcatttttatggaattttagggtggggagagaatagatatataccactctagcccaaagtcatcctgtggtcgctacttaatacaagtgaattacatagtgccaccggcagaagatggaattgatactgctttacaaaataacaaccttgcatacataggtggtaagaaaagcaaggaaatgactaccacaaaaatcagggtagtggatacctcaagacaggagaagggaggtacgtctagaaggtaaacaaaggagggacgtctgggctggccatgttccatttcttgatggagggtattcactttgtaattattcattgtactatacacttatgccttctgtttgcatattctatttcataatttttaaaggtttaaaaaaaagaaaataataacctctcttcattgagaaaataatactttgctgtaggtttcagccctaggtattgcaacattaccatcatcctcagttgatgttcttgttcctcccatagatttttattctggaagaagaagaggagggtagtatttttttttttttttttaagacagagtctcactctgtcacccaaggctggaggccagtggcacgatgtcgactcactgcaatctctgcctcctggattcaagagattctctgcctcagcctcccgaatagctgggattacaagtgcccgccaccacgcctggctaatttttgtatttctagtagagatggggtttcaccactctggccacgctagtcttgaactcctaacctcaagtgatctgcccacctcggcttcacaaagtgctgggattacaggcatgagccgctgtgcctggctaggagggtggatttttgaagagccacaggtagactgctgttaatactcctgtatagataacataccagggaatgttttaatacaggaatatgcttgagatatatacacacaaacataatacacacacacacacacacacgtaatttttttttttttttttttagagagagacagggtcttactatgttgcccaggctggtctcaaactcctggcctcaagcaatcctcccgcctggcctcccaaaacgctgggattataggtgtgagctactgcatccaggcttttggggtatatttcaaagagtccaattactcttgagtcagaactcagtgaagctctacaagataccaaaatgttctccaaggggtacgcagcattcgcaaatcagagtcatcagatgcaaagaaagggaatacaaatgggcttatgaaatcattggaaaaaatacacaatttttcaggaaatattaagaactcagttcctcctccaattcagggcatagcagagcctcagggcctctatgtgaagaaaatccctcctgtgtttggcatctgagtgactcacccagaaaaccatccactgcgtgcagcaaagaggaaatgaatcatggaagcttctgacctttgcacttgtcatctctgcacagggaaaccacccacagacagtctcagcagaactggagtcagggcagtcaaacaaagcacacacagaaatgatgcaaattcactggcagggaagagcaagagaatcagggcaagagaacgcagctcaggggttgcaaatacaggataaacattggttttgtgatacagaaaacttagcagttgaaacggcattgaggatgatttggcagtgcccactgacctgttgttttaagcaggaatctgaacccttaccctgctggctgggggtgggagtggagtggaatggcatggaagaaaacaatgacctttgaatctccatcttatatttggtatttggagaatttgcttggcttgcgttagaggaagtaggccaaactaatgccagtatgagagttggaatggatttgatagagtcacatttaagaagatgaaagccaacgactgcattttgaaaaggccatgagttcacaataactggtccaggagtactaacacaatctgaagaattatctacagccatagtccaatacttcacgttgtgatttgttttaaacaaaatcagaatgcctttaaaatgctaatttggaagataactatagttcatcctaaaacatgtacagagtagaaagcaaacacctagcgaggacagaagggcaaacctcaaactgcctacattactgaatacaagtgcatcaggactgtacgctgagatgcgattgctctcagcttgtctgctcacccatcaatgatgagggggataagtgactacctactgagttgcagagttcaaaggcatttcccttcaccccaaggtgagttttaaatgcaatttcccttctcacatgggtctacaaagtacagcttcctaaataccttttttaaaaagaatataccatccctcaaaaaacatcacccaggcctttgccctcaggataaacttggcaaggaaaccttgtccttactagttagaagactgggaattaggcactcgtatgccacacagtttaatacggagctctctcctgtgcttgataactcaggctgatagaagacattggatattggatggtgttctggtcacagctcaagaaggaagatttggggctgatcttagaaacttccctgtcccttccatcccacttctcactctggctaccttcatcttctctcttcttacccacttcaacatcactttactttagagaaaggagattagtcatttccaagtagagaggcagcatttattgccctgcaccctgtagttgcccttagcatttaccaacggaaatggaagtgattcagtcttctctcacatcacagaactatagtgtgatcctttgcacaccgttaagtgatttacatacaagtggtaccagggagtgctagtattctctttccactcccttatgaagttccatccccacttctatcagtatatgcaactaatgaactagtatatttctgcaataataataatttttaaaacagctatcataaatttgatatttaccatatgccaggtacactgctaatttttttttacaaacattaatccttttaatcttcatagtaaccatattagattggtgctattttcatccccacttcagatgggaaatgatgagtttaggggattgtgtaacttgcccaaaatcaagccaaaaggtaaaggagccaggatttaagcccagagctgttcacctccagaatctgagctctcagccaccacactataggccctaggaggctgagggcaggaaaagaagcaactgaattctatttgttgctacagtgattctggtcaccttttctttatgtaatcatagcaggcagtagacgggaaacataatgaagtcttatttccaagaggacatctcagctgtcatctatgaattttcgatatttctttcttatgtataagaaatgagaaaggaagaaagacagcagcagaagccctagaagtttgtagccttatttccctattcctggataatggggaatttgacctttctgaaaagatggtctttcaagcttgaccaataaaagccccatcagaaacacctcatcaagcacacatagaaaggggccaattgggttcaacttctcattgggaattcatcgtctgaccttctgttgggaacaacatttacgataagataaatcacactctcatcttctcccaccattttgaaccggaactaacctatcaacaatttagtgag

SEQ ID NO: 58412 - DNA, 1753 bp, Homo sapiens
aaaaattgccaagttctcacagaatctacagagaatgagagaagagaacatagaagctgacaggaagagtcaagaagaaaaccgtgggaaaatgcgaaagcgccttgaggaggagccaaattttagtgggtgggagagatgaaatgataacatccgcagggacagccgagaggaaagagtcaggagtcgccttggagaaaagaaaggctcctggagatgtgggaggaggctgtgcttagtaggagcaggttcctagacatcacggagatgaacatgactgtggttgtggacaagagcaacaacacatatcatataaagggctttattggccaggtgcggtggctcatgcctgtaatcccagcactttaggagatgagacagatggattgcttgagcccaggaatttgagactagcctgagcaacataatgagaccccatctctattaaataaaataaaaattaaaaagagtttttccactcctccaagaaaagattttatttttttcctcctgaggtaatttgtacgagagtaatgcctatatatgtttttctttttctttgcttttattttttgctttgttttgagacaaggtttcactctgctggagtgcagtggcacgagcaccgctcactgaaacctctgcctcccaggctcaagcgatcctcccaactcagcaaaggtgaaggtgacagaatccttggccacaggtgcctaccaccatatctggctaattttttttttatttttgtagagaccaggtctccctgtgttgcccaggctggttccaaactcctggactcaaggatcctcctactttacctcccaaagtgctgagattacagatgtgagccatgcccagccatatatatttccttacagctcctctgttatgaggggaagtggcgagaatgggttaacctgggcacactacaaaaggctgtgggaggataactgggaggtggtggcattaagtgactccaccacgccttggcagctggaagcatggagacgtgaccttcagctcagctcttctacatgccatcggagagctctgacagcctgtcttccctgggatttgagagatcaccaagcattggcagcttcccctagttatcagttcccaaagactgtcacagtcctcaatcaagtcccccatagcagggtgaagaacatctttttcttccaaatattcctctttctcacccattcctcacccttactttcattttccttttccacttgagtgaaacgatgcaattccagattttgctattggaaaagacatatggaatgccaatttgtttccacttggacatgatgtcagatagacatctaacacttaacacctcacatatgaacttatgatctttccctatccccacccctcaaaaaaaccttgctgcacttaaagtttccccctttcacttaatgccaacttcatccctcctttgactcttctattttgcttatgccccatgtccagtccatccacaaatgctattggcttaccgtcagaatacaccaggcctccggcactcctcactagctccatcgcctctcacctggacttttgcagtcacctcccagctggtctccctgtttctgctcctgttctctgacacacagcaaagccagccacctggtcctcttaaacttcaagagcagtcatagcacttctctgctctgaaactctcctgggatgtccagtctcagtaggagtaaaagctaatggcctcacagtgccctaaagg

SEQ ID NO: 58413 - DNA, 837 bp, Homo sapiens
ggaaaaaagtcgtctagaaacttaactcttgtgcatactgcaagccgggttccttgagtgcttctgggaaaaactggtggacacaggtgttccttagactgttaatgcagaagtggttctcagcctcagcaactcactgcaatcacctgggggtggttaacaattactgatccctagccctatcccagcgtttctaacataattgactggcatgcaccctggaccctggaagttttcaaacctcgtcacctgagtctaagaaacagctgaggttgagattactgttttaaaatcttcaaaaaaatgcacagcgaaataaataaatcttttttagtttcctacaataagccacgtttccaggtcttaaaactcctctccagaatacagcacagcagatgagtttgaaaggaaaagaaaaaaactctcagattttattgaaaaaatcgatgtgtactgtttgaggttgggggaaaattcaggctttaatataaacaaaggcagtctcagtacagcagccctgggaaactccccaatttaacttagcctttcaacgattctcatctgccataactgtggcagcaggaataataactgacaatgtactctttattcacaccaaacacgccagtggacttcaaaaggaaatcaacatttacagtttaattactgtttattccctgtattcaaatcagctttctttggctacccccttctaaatgctcagaaggggatttaatcatctgatctaatttttccaaagaatagaaagttatcattacgacagcacgctgaaaaaataattaaacaaatgcaaaagaaagtgtaaaaaatataact

SEQ ID NO: 58414 - DNA, 794 bp, Homo sapiens
gttaataatatttgttgatcacacttgaatggatcactctatctttaataactgcagtatatgaaaaatgtttgctcctacttcacaggcatttgaaagaagcttaagaccttttcatgatcccaggcggcacattcacaatattatacaagatcctgacaatagactcaagcctcttaagcaatgcaagggactaccattgtagacaatgtttttataacaccagagacacttgagcctattcttaactttcaatgacctttccaacaggacttgttcaaatttaacctaagtcaactttccatagtatctagaagagatccatgcaatctttatctaggcctctctccacacactctttgaagttacattatttcttaatcactcttcagccattggtaaatacactgccttctccaaatcaaacaaaaagtctccatgttctccagctagtggatgatgtcagaagaaaaattgaaggaaacgtttatatttatgccacaagtcaatacattgtgaccttcactttagctttcaagaaaagcaaatcagataactagaaatggcgtagtttgtcacaagaatgtatttcaagaactcagttatcagttttgtcattttctaatatcacaggagtgtagtcattgtgtgctctgcaaatataatttgccttctttgcagttgcttcatttttccatgcacagagctttgcatttgaaagtatctttgcacgatgtagcagaaccctgttaaaaaagattagaaattctaaaggctaaaggacacatcttttc

SEQ ID NO: 58415 - DNA, 5236 bp, Homo sapiens
atggaaggagaataaagacatctgtagcatgtaattctatttttatttcttgactacataacctagcagtggtctaatactgaccgtttcaatttaaatgctggaaaaatactgaccaagactttctgtgaaaaagataatggaaaacagaaaccagttagtaaagccatgcaaataggaagtgattttcagccccaagaggactttgtatcatctatggctccatttaaacccaagtagcatctgtcctggtggattttgaacatccttttgatttaacacagaagaaggtttgttctacctttaaaagcatatcctcttttttcccccaacagactcctcaacaagtggcttctaagacaagactggggttgttttcttactgaaaatcctgtgtttatccagtcttttccttttcaatttctgagtttagcttacctaacagcaaaacagaatcctcaaatttctcacagagcaatgaaaagcaaaacagttggtttctctgatcaacatcattttcagtatgaaaacaaaagttatgactcctagacctttgaaatatttacaaattgtactttaaacaacgagatttttcagtgtgcttctaaaacaaagtaaagggatcagaaaatgtggttcaagtcaagtgtgcaaagctctcgaagaaaggtcctgcagcctggacaggagtacaaatattctcttatacaagttaaatgtactcttttcctccacaacatttttgaaatgaaacagcaaatgcatttatactcacaaatcagtcaaaaggcctcttctccttattaagccctttacacacagatgataaaagcaaggttttcctacaatagatgtggccctaccacatattcaagatacaatcatcctaccatcagttaggttatgctttaaatattttgaaatcaggtatccttaactactgatttccttttagaaactatcttgagtgttagattttcataattacaccatttttaacttttagctttttaaacttctagacaaactatatgtttaagcaaaaacaaaaataaaaatcctcaaaaaaagtaatatcagagttttaatttcaaccagctggcacaacaatgaaagtgtcagactttctgaaagtactcgagaaataatgaataaattcttaatgttttcccctccaccgcccttttttattctccaagattaggaattactacggattaggtttttgaaaataaagtttcctttttggaaaatggtctacattcagaaatgtcttagaacaagcatttaaaaaaaaactaataaataatcataaatcaaaatacattaaaataaaattacagtacatcatcgctcctagaaaattcaccatacaagacgatcctttcaaaggttcataaataaaagtcttcttgactcgaaatcgtttcctgcatcgtgatgaaaagtatgcagaaaactaagaagaatcgcaagttttcagtagggtgatgtccaaactacttgatctggtgcggggcggagagactgttttgcttttgatccaagtgaagacaatagaaatgtgctcgtcccacttcctcaagtcctcaaaacctggaaagaaatgacaccgagtgaagtaggtggctaagaaccctccgagaccagttctgttcgggccagtccgcctgacaaagcgggctcagaaagacaccgtggtgtttccctcaactgcccaaacatatagtcaagtggggctgggggacgcaccacgggacaaggacggtcgtgatgggcgcgggcgcgggcgcggtccgcgaggccccctgcctggcccggatctccccagcctcccctctctgcccagctctcctggccccagcttgtttctgtttcttccattgccccagaaacttggtatgagttttgatttctccatacaggagccgaacctgtgaacaagcttcctactcctcccaactcactacccccgagacccactcctcgggagcgcgagtgccgggaccttaccttgtcttgcccgggagctgcccctttcaggcagagttggaggtgctgcggagaagccggtgcccgtgcggctgcgagtgcggctgtgggtgtgggtgcggtatttggtgcggatgcgggtgcgggtgagggtgtgggtgcgagtgaggatgagagtgtggatgtggatgtggatgcggatacgggtggagctgctggggctgaggcttgggttggggctgaggctggggttgtgattggggctggggttgcggctgaggctgaggctggggttggggctggagctgcggctgcggctgcggctgcgaggggggctgctgctggaccaggtgctgctgcttctgccgcgtggatttgaccgccaggatggcctgacgattcttgtactgcaccatctgcagcgtgatctcggcgttccagccctggtcttgcgggcaccgaaagtcgatctccttgccctctgccatcaccacagtgaagtacatgtacttgcccttgcgctccacacagtccacggtcttcatgttggagaagtgcagttccttgagcttgaccggcggctcgaggctggcgacagcggggccactgggttgggacggctcggccggcccctgcccgggctgttgttgctgctgctgctgctgctgttgctgctgctgctgctggtgttgcagctgcttgggcgggataagcagcagcccttcctcggtgaggatgcaacactttttcttccagagctgcaacaacccgtcgctgcgcttctccagcacgccctccttcagcgctttgcagccgctactctccagcatcctcccagcataagaggggccgccgcttggctcggcctctccgtttccagccgcgcgggccgggggcagcagcagcagcctcgcgccgtcctcgccccagcggctcccacggccgcctgcccggagcgcgcagaggaggctaacacgcaggaggcagagcggcggcggcggctctgggtcccggcagagggacagccgcgtcctgatgcgccacaaggtcccggagctccgagctgccgggcctctgccgtcctcttgcgagcgctcactgaagggcactggccgggccccctcgcggcgcttttgaatgggccatcttccccacccccgagtgacacccagcggaaaaggcggctcctggcgcccgcaccgcgggggaaagcccagctccaagaggcgctcggcagccggcgcacgcctcattaacttggggcctttccaaagcccgctgcgtccacgccctccagcgtctcttgctccgcctctcgccgcccacttgcttccgcgctcgttcccctggaaggcgacccggacccgagccccggaaactcctctcctctacccagggcgatcgcccaaggagccctggctgcctgactactgccgacgctcacagggcgctgcgaggccatcccccgcgtcccgcttctccccggcccgcgggactctctgctaacagcctcagaaagtgaggacgggggcgcggaggcgggggcagcctccaggcagtgctgcctctcggttcttgggaattagcccgggggattcgcgctgggctccgagagcccgcagaaccagcgtcgtgtcctgggcgagctgggaggccggggccgagtcccgcgagtcccgcgagtgtgcctcccccggacgcctaggtaaacaactgagcgcacagaggccgagaggacatcgtgtcttcccacgcatattcgctcacggtcactaagtagctcttcttggaaagagggcgattgttaaagcaatagtgcgactgtcgggcttgccacgggtggagagaggcggacccacgtcaggtcgcatctcgcctgcttttctcgaccccgaccgcaggcgctaacccgtcttcggctttcttcttgacccgtacggtttgcaacgtctcttaaaacagtaactcaactctctacaaaccggggtaatatccggtgctgagatcccacactgcaaggcgcagttccaaacgtctggtcggcctcgcaggtccctctttccaaggcctagccagatcttggttttggaatctcatttatctgtgacctggggaatgcaatacccccagctccctcctactcctacatttaaacaatgcctatagaagccgcttcctgggaagtaaggcataaccgagacctagcctcccggtagggaagttcatccgtttagtaaacagccccaactacgtgcggaccctcacggggatacgaagaattcaaccagggctggacaagtcagagtgggccaaggtaagagttacggctgctactgtgcccacgttggaacagatagattagttcatctgctagttgtgtggcaagagcaaagaattcaagaggggaagagaaagtgagaggagcttagagagctaagcaagaatcgaatcctttgtgtgtcatggtaagaaattcgaacttaataccaaggtagtcagaacaaaggacaacttttatacacgagggcgtcctgaatattcatctaagaaacaatgtctgatcaaacgggacaatccagccagcaatcctgagtcccaccggattatgcttggccagctttctagccttcacattgttaatttattagcaatcttttcaggagaaaggcaattattaaaattatgtggacttctagtaaaattatctcgaagatttacaattatgtataccaataacaaaaaaactacatgttttctgctcccctgcctttgtaggacaagtgagcattccagagaatttctacatgaccagctgttcattcttttaagaggatgacattcttcagctcatctggaaaggatacttcctttaagtctgttattcacagtctccaagggcaggtgtagttgggaaagacatttcatatggaaaaacaaacttgatagggtaaaaaaaaaaaaaatgagatgtaatctggaggcccaagtcattttcttaggagaaactcaaatgtgtttggtgttatctaaccttctgcagtttatcagtctgaaacaaatgcattctattctcatttgaaaatgtctgaacagccaccaattttcaaaatcacccatttaactagagactttaaagcccagaatttgcagttacgtatttcagaatgatttagtaattttgtgagcagctcagaggttaagtctacaatgtctgactacggtgcattattgaaaatatcagtag

SEQ ID NO: 58416 - DNA, 2482 bp, Homo sapiens
actaatttataagacagccaagaacaattaaagtcataaagggccaaacattttattttcatctaagaaccgtttgcaggggtggtccgatcttttggcttccctgggccacactagaactgtcttgggccacacgtaaaatacattaactagctgatgagcttttttttccaaaaaaaaaaaaaaaaaaaaaacctcatgaatttgtgttgggccacatttaaagccgtcctgggccgcgggttggacaagcttggtttaggggtttagatcgatcaggatcaatactccccaaataaaaaaccctgatcaagacacccatctaacagtacctgggaaacacaataacaaccttttgctaataacagttaatataagcgctatatacgcgttaactttttaaaatactagcagtggaggcccttccttatcatcagctaacatccacaatctctggtaccaataaaaagattaagaccaaagagaagcagggaagagtttgaaacccagggacagggcttactcgcttacccttccttttcacattccaccgtctctacaactttcaaagtaagcacagaccgagggcaagggtctccaaccaggcccagccagtggccatgaagcccattaccacgtgtggagcgaagccgccgggggtttcccctccccgcgcggccgcccccaatgggcggagagcccgggagcgtcgcagcctcccccgccccctccccgcctcggggactcgtccctccacagcccctccctcccgtcggaattcgcagcctccgccgttcttttcatctcccagcggcctccctcctggtattatttttgagggaaaagcaggggggtgtccaagaggcggccggctctgcactcggcccggcccgtacgccgggggcctcccggtcctcgcggcgcagccgagtctcagggcacccgggcgtcaccgcggcctcgctccggtccacgcggaaaagacggtggagctcagagaaccttaggcctccaggccgcgccaacccctacgtcgcctcagccgtccccgataaaagcgctggtcggccccggggcccctctcaggctccggggtccggactccgcggtcctgtccgacctcacaggacgaccccggaggccacgggcggccagcggccccgactcccggctcccagtccctccatccctccggccctcccatctgcgcaggccgcccagccaacaccacgttcccccttcccttccaggcccccatccgttaccggcgactagtatggggagccaggcggccggagctgcgcaggcagtgactcagggcggcagcggcagcagcagcgggaggagcaggaggcggcgccgcgagcagatggcgctaaaaaagacccaagagcccgccgctcgcgctcatatacaattagcgtcagcacgtagggccctttcgccgccctcctcccggccttgtagtctcccagcaacgcgagcgagaggcgggtccaggccgggttgcctagcaactgaaccgtcctccttccccggcgacctccatacccccaccgaggactcctgcagccccgaggcccaggcgccgcgcttgggctcctctggttcccgccggtgtctaacctcctctgttaagcaccccaccatatcttttctccctgctgagccggaaaggaaatttcaaccccatcagttgtggggaaggcctggcccgcgtgcccggcgcccggcccgccccgcccccttcggcgttgtgctgggaacgctcagggctggcgccagtcgcctggtccctcgctcgccgcagcctagacggcggacgctccctgtcaaggcctaattcctgcaactcgccggcccccggtaaccgttttccttccccgcctaagaaaaacagttttttcctctagaccacttcggcggcctcttctgacagttttgcttctcctatgccagcgggtctccgcgcctttagggggtgctcgtcatcctttgccccccaaccccccgccacatcctcgtaactgatgtacagtccgtcagttcggcttcagttcttttgacggatgaaaatggcatatttgtgcattctctggatgcgttataatgaggacactcagtacgtccgttgtttcatctttctgaaaaagtaaatcacattaaatcctcaggcttgtaaaacctcatagctaattttcaagtgatgatgaattgactaatactaactcaaaaagttgttctcagagtatggtctgagggtccccagaccctttcatggggaaggtcaaaactatttccatattaatgtcaagactgccttttgcattctcattctctcacaagtgtacagtggggttttccggaggctacgtgacatgtgataaggaaacagactgaaaatagaagcagataggagaatccagtcatctgcggttaaaccagacgttaaagagatttgcaaaaactcgatttgggggca

SEQ ID NO: 58417 - DNA, 1486 bp, Homo sapiens
agtattttgtagatgcagttaagatataccaccagttgactttaagtaaaggagattacccttgatattgttggtggacctcatacaattagttgagggccttaatagcaaaaacagattgttttggggaagaatttctaccttaagactgtaacatagaaaccctgcctgaatttccaacctatggaattgccctacagatttcagatttaccagccccccaccaccacagccttctaaatattcacattattttcagtgttcaatttttgcagtgtatagtagcttgcttcataacaaactagtagtatatgttcgcttcattgtcaaatccacttaattaacatatcatcatgatttgcattctttgccctttaaagtgttttcctatttttcattagttcttagtcattgttgcacaggaaatcttctacaacttgccgttctgttttttaagtcatatattgttttgattctgatactgtatttttcaagacagatagcaggatctatcttctgtaataactttacttataatattattgatttcaacaggcacttccttttcttcctttccctctcttcattgttacctataagggcagctttaactcttctcaaagagtgaaattaaccccaaatttcaaaataacaaaaatgtacacagtagacatgatagtgctgggtaggggctctgagacataaccaatggtcaaaaaggtttttgccactatgtgaggttttttcccacactggcaaaagagcttctgtttttcagagccttttaaattttataattgtggagaaaggattatgaatctgtacctgtctcctgctaaaatgtcacacattttgaaatgtacttgtccttgtttgactaagcattaagacaaagtgttctctgcaacgagagctcttcttgccacccacttgtgttacacatagtacattaatgaggtgactgtgatctcatcctcctggcttgccttccttggctcagattccagagaagcagccgtcaggtcctccagatcctttgggctgagctgactgatgaccttaccatgggactcacagctccttgctgctccaacattttaagttctggataagctagtacccaaaaggagtcctttttactaccaataccaaatcctccaagagcttccctcactctcttagggcctctactgcccaaatgctggtccccagtgaatatgccttctcagtccccaactctatgccatctggtaggaatatagggagctggagggatttatggctaagggatcctgcacacttgaattccatctgtcctgcagtaaacgatatacacagaaaaggatggtgggcaaagaggcacgttctatttagctgggctctggctcaagccccagtgtagagtcttgtgaactggagtagaccacatgcaacttggtgaacgtattttgcctagacgaggctgagctcttaggcttttgtctca

SEQ ID NO: 58418 - DNA, 825 bp, Homo sapiens
atccacagctgcataagagtcctgtgagacatccatctgagcccagtcaacccatggaatcatgaaaaataataaagtttgtatcaagctactaagctaactgatgataacagaaccaggactcaacaggtgagacagggtcttggcatcaagcatctacaagaaaatattaggtggaggatatgcaggaactactatttgcaaactccagtctggcatcataaagcaggactcagaaactggatggacaggcagagtgcaccactaccaggcatccggcatggcattacacacgcttctctgttgacctagccaaactctcccactccctgatccattctcacccttgactgagagagatgagaagacagctgaaagatgaacacgttcagtgtgacatctacccatagctgggacaggcagtaaggcaaggtgaccatccagctggcaagaaggctgaggacaggaagccaatatctgattagatgttacagcagaaatggccgaaactgattaccagttagtcctttgctcttttggtcaagggcacagattccatcccagttaatttggctttagtccatggccacagactgaacctttaacccagccagctgtcctaattggatgtcctcccttggatgtctgggaaagataggacaagacacaatgtcttttgtctgggaaaggctgtgtgtgagtgggtttgtctgtaacagtggcatcatcaaaaaataactgggttctaaaatgcatccactcatctccttcctccccacctccccacaggccagtctaaatttgttcatttatttgaattcccta

SEQ ID NO: 58419 - DNA, 668 bp, Homo sapiens
gtttaaaaatcagtaactagtagggaacaaaaatatgtcattgttctgggaagatgtgctatcaggaagggtaggaagtggaaactgggggcttcagtggttttgttacaagtagacgaacagccctggacccaagacctctccatagcgtctctgcctgtgaggagagcacagcctacaggagctcccaagtttcagaggcgggcggcttgttggaaacagaaatgccagggtcccagtgcctcagtcctgattgatagaattctcaggggcccagtaacctgcctttaaacaagctctccagctgattctgatacagatagtctatggacagcatgcagagaacacaggcataaagtcaggattcttttgtaatgattacaataaacacatgttgcaaatgcaaacacaagcactttctctggtcacaaggttaaattccaggcccctgcagagtctgcctttgggccccacccaccactctctgcccaggcctgccacctaaagtctcaaccctcctctttgatgggtccccaacacctcaagctgcctggttggtaacaaagcctgtgtttgggtggaaaggctattttttctcatgcttttctagaacactatggtttgtttttttttttccaccaaggaagcgtaggaaatacatgaaatgt

SEQ ID NO: 58420 - DNA, 1395 bp, Homo sapiens
aggaccaccagcaacatcagcttattactaagttagaaaatttataaattcagaaaatttgtaaattgtctagttcagttcagtctgggatgaatttgagccaacaagtgagcccttacagggcaaaagggatacgagatcacagaatgaagagggtgcaaggaaagggaccagcaggggaaagtgtgggggatcaaaccagaaaaggacagtcatcaggcaaattatgatagaatgtcatcaagaagaatgaagactggaaataattatacattttttgattgggggtgactagaagtgtcactgtagggattaagatgggaatggatgaagaagaaaatgcatagtatgcactgtggactactgactccaaatgaccaggactgggaaacattaacccatgagctggctcaaaaacagcagaaacctatgctgtggtttggtggccgtggttctgtgcaaatgaaaactcaagagaacccacactgggctgtgaccagaccttctgttttatacctatgttcttgatggtcatcttttataattattgacagctggagggcagggagagcattcttgcttttgtgtcagaaaacattcaacatggaataggagcagcacttcatctggacgttaaacctctggttaaggattccatgcaataactgggctcaactctgaatatatcctggatatattaaatatatgttaaaatatattaaaaatatatatttaatatatatcaggatctcagcctcctcctgagtgaggcatcggaaatgtctgatccagtaagcaggcattgtgtcacaccagctgtcacaccgggacttccccagcagggacagaattcctaagggattatctcagaatcacagaagtttcaattatgtaggacctgaagttactctccctcgttcctggaaaattttaggtccaggtttactagttctatctctacagctctagtcatgattcttggggggtttagtgtccatgaagatgattcttctagttccctggcctttaaaatttcctcaacttcttcacctttaatgattttgtcctccacttcttagccacccgcttactcccttagtcatatacacgtctagacttcatgaatggcaagaattgtatctactccatagtctttaaaatttttttaagagacaacagggtctcgttctgtcatccaggctggagtgctgtggtacagtcatagctcattgcagccttgaactcctgggcgaaagcaatattcctgccttagcctcccgagtagctaggactacaggcatgagccactgtgtccagctaattttttattttttatacagatttcattatgttgctcacgtttactccatagtcttacactcaaacatctaaatc

SEQ ID NO: 58421 - DNA, 1914 bp, Homo sapiens
cagtgacaccaacattcaactctacaaaatggtcatccactaactcaaatacaccaatcccacttttacaagtcatacacttgaaaaagtagtcacacatcaactgtgaaataaatttatgattatttcttcccactcttccacaaaagtatgcttctaagagcaactctaaagagctcctacacaatgttctctctttagcagacgaaaagatagacaaaaagtgtctacttaggtactggtccataataccgtctaatatttgtgtctgaaacgttaggagagcctgggaaataaatttccaccgagaacaatttttccaatgccttccatgggtttgaatgttttcacacatcaaaggatccttttctctgtctgtgattgcatgaagtcctctaagcaaatggcaaagaaagataataaatgtttttgcaccatctcctgtttttttgagatgactggaaacacagtccactatcatcctgtacaaaaaagaaataaagcaactcattttcagaaggctggcttcccacatcttaaaaccatgtttacacagccataagcataaaatgagaatattgttccttggatacatccttagttttttcctttcttggaaaaaactctgctctattccaagattccaccgttgggtggagtggggagaagtggtcttgagaattggtaagatttggggtgcaggagtgttcccttgggcagggctctaattccgagcatacagcggtttcacccgaggtcagtctttctaagtacgcatcgcctcaggatgggacaagagctccacagaggctgcctggggtgcccggctacgggttagcgtgtgggacgcgggtacctggctatgggatgctctaagtgtagcgcctccaggaggcggcctccattccggctgagaagcacctcgccagtgggcttcgtacacaaaacttgccgtccctcgggccccacgcagcagctcacgatggcttccagcacctcggccacctgcaacgccgccttcacagaccctgcagcggccatagaacttaacatatctgggccgcttcccctttttgaccagcttgcagaacacccgggccgaccgaaaacaggggtgggaacggccggaaacggaataggcggggagaaaacccggaagccaggagtcgaagccggggtagcacggcttcttggttgggcgagagggctgcccttctgtccgcctggtggaaaagccctgcagctttgccaggtggggtgagctggcccgttgtacgcgaaggcagaaaaaacagactaggatttccagcagctgtgcctggagcggcaaccctaagcccctccccggctccctaggtgaattcatctccctccagtggcgtccgctgcccccaaatcccttagtctcccgagaaactttcttcctaagtcaacacggtagtggggcctgcgtgaaggagagggcaccccggttggaactctgctggctttcatcccctgccagaagctgctttttccggggcaaaacctctgccttggattcacgcatgttcctgtccacattccccacgagttgctctccttaccataacggaaataatttgtagatgcaggacaggtgaggagagcctggccacagccatgaattgcaggctttatgtctgctgcagaggctttaccacatttcctagactcaggtatcacaataaaactctagacaccacaaatatattaagcagaaatgatgcgaagtctctattttttgagatggactcccgctctgtcgcccaggctggagtgcagtggcgcaatctcggctgactgcaacctccgcctcccgggctcaagcgattcccgtgcctcagcctctcaagtagctgggattacaggcatacgccactgtgccccgccaat

SEQ ID NO: 58422 - DNA, 660 bp, Homo sapiens
tccattttcgatggaagtattactacatgattttgatagccgtgaagtaacaagaatatgcagaaacagcagtatacagagtgcacctctttaccaaaaaaaccagaaagcccatgtttctatttattttccctcaccccattcacaagcattaacaactatacagacaaaagaggctagggaatataaaaatcattatgatttcctacatcagttacataatagtagactattcaaacataagtttaagagggacagtgactttttttctgtatcccttggcatataactgatactcactaaatactctctaaatgactgaatagatatttggcaaatgaatcactgtgtgactccagtgcagtttcaccgtctcacctaccaaagataacattacagtgccctctgctgtttctacttcaagtggaagtaaagcaacctgctttgctactcacattactcatctttagtagaaatcacactgaaatagttaatataattaacatatctgctgcatctaaggagaacatgaatcaaaaacatttttaccttctgaattcaactcatcaatataaaatttgaagaattttacaagtttcaaagtttgcctttaatctaagtggaagctaaaataagatgaagtaattttttaaagtcata

SEQ ID NO: 58423 - DNA, 2198 bp, Homo sapiens
tttgtgaatggaaaatctgcatatactgttgcttcgcctcagccagtcttgagtgggtggttcaatgaacctaaagcatgctgcctgtgaagctccttggaacctgattccactcttgagagagggcttagaaacaaacattaaatttaaaagcacagcaaaggcttggctttcctcctacgttacaagaaggccgggagaactgaggcttagaggaacaacaccgtgtcgcttggctctgcaaaggcgggtgcggtctgcggtgcgcggcacagccttctctggggctgtcacaggaaagaaggagcctcgccttaaccgcaccgagcgacaaagcgccagctctcctgggcgcgggggctcccaacgaggcccatgccatcaacctatcaaacttcaggagggacagacacccggggcggtcgaaatgctccaacagcctcccacccccgttcccctgccgcggcttttgtaaggctgcagatgcacctactgtgggcccctaaacactccaccctgccagcctttccaatccccctactccaaaagggaacaaaggagccaaagaactcctcggcgggggtggccaggagtccccgacagcccgagctcagaacgtggcaataagggtgcgcagtcgccctgaggggtgcgaacccagcaccccaacctcaggaatggagcaacactcacccgtgcggagctcccagggaggcgggacgcaaggagccggttcctccgaggtcgccgcggcgccggggtccgaggccccgtaagcgtctagtcagaccccaacttctctcggccgctgtcgtcggcggcagctggggcgcgagcctggacgaagggcgctgcccagcggccgcggaggcactgccggctcagcccccgagcggggcgggaactttcggccccgaggtccaccagcccgggcggacccccaccttccctcagtcggcttgctaccggcagcggctactgcggcgtccaaagctaacactacagccgccgcctggccaggagcgcgtcgcggcctaatgttgtcatccgccgcgtcgccgcctttctgggcacccagaaccgcgaagatccttcacattctagtgccctccccctgccccgcccgccccccggatcacgggcttcggccacgccctcttcccgtcacgtgacggtgcgcggaggcggtggtggagttgcttcccctgctaggcgggctcgaaccgggcgggagtcactgtccaccttgcttcgccagggtgttatcgccagccagtccccttccgcatgcccaagggcagcctcaggaagcgagcccaccaccgtcggcccagcgcctgttgatcggccaggccttctgggccggtcatactgggcccttcctaacctgaggagattgcacagtagggctccctggtctggtcagggctcagttaggacccctctccagccttaggcttggtgaaagctttagcgaaacagaaaaaagaacgcatcgtggtgtagagtgtatggcctaagaagcattcggtaactaaactacttgttcctatttctagtggcacattaaccgtggcatttaatttactgctttcctcattagaggtttttttttttttgaggaaacggtgtatttcaatcatgctgggatgaaaacagcctagcaaacttatttttgttccttgttatgttcaggatcctgctgccagttttacagtcattaagttttacagtgtgttaggttggtgacagtttaaacgggtacgcaggaatttgacagtttgttccattttttaaaataaagcctaattcttgattttttttctaatgccttaatttttttttcctaattccttaactctaggacttaaccttttgctttcttttttagccatgatccgaagaaccctctagccgcctaatgaaatcctaactatacagaagtaagggaggtagaataaagatcatactcaaaccctgatcacaatgaaggcaaatgagaaagctttctgtaataattaaattggggtcataactcattttcccttgtagcccagaactaaggatttttttcttaagctattctcatctcattacattttcttaacaagaaatcagaaggcattctgataagctggatacattgaaatgaataagcaatagagtttggcctatataattattattaatatatttca

SEQ ID NO: 58424 - DNA, 1149 bp, Homo sapiens
tataattataaggtaacttcagaacataaaaacttacaagaatatcacaagtatcttagtccattcatgctgctataacaaaataccatagtgtgagtggcttataaaaaacagagatttatttttcaaagctctagaggctaagaagtttaagatacgatactggcagatgcagtgtctggtaagggtctacttcctcatagacagctgtcttctcattctaacctcacacggtggaagggctgagggttctctctcaggcccattttataatggcagtaatcttattaatgagggaaataaccctataatctaataatatcccaaatgccccgcctcccaataccatcattttggaggtgaggagttcaacatttgaattttgggggaacataaacattcagaccacaagaacaataatttatttgtttatattaaaaggaaccatcttctctgcctcacagttttcctacctggctcttaaaatagaaatatgtttctttcagaactatagagtcaagaggaaatttcatctttctttctgccactttccccaagtggaaggagttttgtatttaattggtgatttggggagaaaaacataaaacccaagccatttcttgccatctttttcaaatcttcccacccacaagaaattatattctgctcagttcctcaatatatgtcataaactaaaaacacacggattagggcctatgcttgtcttctagaacaggcctgaggcctaactctcattctttctactgttgatctcaccaagcagaaacagtgattctacacaagtctatccatcgtgcagactcaaattctcctgtggcgagtcatcacccatttggacttaggaagtatttgaccagcttggccaacatggtgaaaccccgtctctaccaaaaatacaaaaattagctgggcatggtggcaggtgcctgtaatcccagctactcgggaggctgaggcaggagaattgcttgaacccaggaggcagaggttgcagtgagctgagatcacgccactgcactccagcctgggtgacagagtgagactccgtctaaaaaaaaaaaaaagaaatattgaaaaacctggtcatggttgtatattataatacatccaatcagctttatcttagga

SEQ ID NO: 58425 - DNA, 1890 bp, Homo sapiens
ggtgaaaacccgtctctactaaaaatacaaaaattagccgggcgtggtggcgtgcacctgtaattccagctactcgggaggctgaggcaggagaatcgcttgaaccgggaggcagaggttgcagtgagctgagatcgcgccattgcactcccgcctgggcggcaagagcaaaactctgtctcattaaaaaaaaaaaaaaaaaaaaaaaaaaaaaaaaaagggttctctagtaggaagtcccgagttgtatccatgtttttccgggcgtcccccggagggacaggttgcgggtgaccttttcaagtgtggaggaaagggaagctgcttttgtcttcaggaatgatgcaggtctcgactcaagcctgacgggcccaaacctccctggagctggctgacgactctgcccgagttcctgaagaggggtcccgggggtcccggagcggaagtgggagcgcgtgggcgtgggctcctcggctgcctggggctccagacttgtgctgcgtgcggctccggagctctgttctcgctcctgagcagctgctaggtttcccaagcgactgtctcaaccgcccggccgcctcccccgggcagccagagcttcacatctacctccagccgggacccgcccccgagccgcggggcccacgcccagagccctccgccgtccccagcgcagtgcagcagagcgcgatccagtctggggccgggccgcgcttccgcgcacgcgcggagaaacccgcgccctccgaggggggaggggacagagggggcgtcacgggggcaggagaagaaggaggaggaggcccgcgtcgcctccggcggggctcgcgctcgccccgcgctcgccctccgcctcgcccgagccccgggagggtgaaacgctttctcccagcatgcagcgggaggagggatttaacaccaagatggcggacggcccggatgagtacgataccgaagcgggctgtgtgccccttctccacccagaggtgaggaaccgtgctgagtggattccttgccctgcggccctccagcctttcttccccggactcgccgagggcggcggccgacgtgtgtggggtagtgggacgtgccgaagttggggagggtggggaggcgaatccaggcctgagcgcggctgcgagcggataacgggggaggagatagcggggcgggcccgaccggggcgggctctgggacgcagtccctggctgtgcctggaggacagaggtggaggtgttgatggttctgctgtgtcgccgcgctgcgtttgagagcagaggcggaggggcctggtgtggtttttgaaccgcagcttagaccctagtcttgctccaagcctcttggggccaggtggaagcgcgtctggttttgatttctttttccttcgccagggtgaatgacggtatctattgcttccttttagtccactgtgaggggacagtttcatgggcatagtgatgtccttccaggtaatgccatgggtagcacctcgggcaccttgtgtcgggcgtccttttttgagcatttgtccttaagcgattaagaagagaggtaaaaacttttgggaatagacttacactcacattagcttgtcaaagtaccgtttttctaggagctaggggtggacagtgcaacacgtttcccatcacaacatgagtgtcttcccatgtaagtaaacagtgccccgctccacagtcagtcagtctgtgcttgtttacctccgagtttgtagctgagctagtgctagttaaggcttggaagcaattcttgatgcattctgatttttagtgatccacagtgatgtctgtatgcggcagcggcacagtttgctgaagaactcgggtagttttcatgaggttaaaagatgacagtcgtgttgtaggatgaaca

SEQ ID NO: 58426 - DNA, 1763 bp, Homo sapiens
ggtagccatttaagtaaaaatcgtttaacaaatgtcctggcttagaagggggaaagggatccgccggtttagaaagcccgcccccgcccccagggggtgcctacgtggagctcctgaatctggctctggagaacccagaatgtgattcgcaggacctgtcgcataatttcacaaccaagcattcttgcattcttctttgtacctgaatcgtagaaagttctggaaaaagctaggagtaagtgattgacattccctgctgttccttcaacatagaggggttcggtgctgggtgggcagacaccaccaaacaatggggatgccaggagcccggtacggcggcaggagcagtaccctgggctcggggggatgtagaagccccattccacccctaggggacagaacccagtaaggtcgccctcggtgctcaccacactccgggcagagggggccctgagactccgacccccaccccagagagagcctgccgctggacgaggggaccgacggctgctaagaggcggattagcagaaacgcgaaactcacaacccgcctctctcccagagaaaccagtatggagaaattaaaggtcatataagattatttacctgccccgcgggcctgggatcccagggcatggcctggacggcctcggggacaagggcaggtgtgtttgggggataagagagagaaaatctggggcgcagggatgagaaggctggcaggggcacaaatgcggaccgggatggggatgtcggaggagaccggggcgcgccggccgggcgacagcacgaccccgggaggcggtggaaaccccctgcaactcccgccccggggttggcggcgccgcggaaccgccccaccgcccctactcacttgagtcggaggcgggagcacgtaccgcaggcggagctagcgaggctgggctggagggagggtccagggagtccgagatcccaggcgaagcgcgcgccggtgccttttaaagagcgctcggtgggcgcggcctgtgtccgccccgccctcctcccagccccgcccgccggattcccggagccgcttgccgggctggggcgtgtagcgggcgggctgccctctgcccgctccgggctagccaccaggagacaaaaggcaggaggcccgcctcttcctgcagcttcccgcccgcccggcatcttcccacgtcccgggaccgctccctcccaaagggacccggcagttccaaaagccactgggacttggagagggacttccttcccctccagggaggcccggcggcgggacggtcccgctggaaagtggcccccgccgccctgcgtcggacctgtccaccgcgagcgccgatccccctcttcgcggagacagtcatgggccgggaggctccagcagtagaaagtcagccaaacggggctttccgccacctcccccttgccttgtccttgtcagtaaactcaacgtgattaacttccctagttaacgcatattctctcgtccgatttccagcttctgggaatccacaacttcttattcttaaagagcaaaattcatctagactaaataaatgacgttacgaaaacgccccattcccaaagtgtttcgctcttcccctccaccagggcacagcacgcgatgctgagggggaagaaacctaaacccaggcagaaaccccgggcgccacaggccctgtatttatatgtgttgatgtcagaaaagcacaaggataccgtgacatccgaagggacctaatgcctaagctacaggatga

SEQ ID NO: 58427 - DNA, 848 bp, Homo sapiens
cccgctaaaacacctcctctggcgccttgagaccgaatttgagaatccaccaatcagcggcggccggcggggcggccccggccaatcgtgcggcggcacggcccgggctcaccgcccctcggagtcttggcgctccgagccgcgcgttttgccctcacccgcccaattgttgccgcctcggccccctcccccttccgggtacctggaaacctcgggcccgggagccaattcctgctggggacgcgggccccggcggccgcgggaagccaaggtgggggcggcgcggggcggcgcggggcggcgggagaaggaagaggaggaggagggctcttttgttatgcatagaagacccgcgcacgtccccgcggcttgccgcgcccggggaccccgggcacagccagaggacaggaaagcagatggggtttggaagaacgatctacaccctctggatgctgctgccgccatccccgcccgccctcagcaacctgtgcggaagcggagttgtccagacttgccggggcaaacttcttaacatcgcacgctggtgtgacacatgaaccatggttaccgctctgctgcgagcagatggcacgccagttagccctggagacaagactggaagccaaaccagaagtttttctaacttttttttgtttgtttgttttgtgtgtgtggcaaatccggaaatgttttttggtgttcccttttcggcaaattgcaaataattaggagggaaaaagctttatataaaaaagtagttctttgcaatagggactagcattctgggagacagtctagaaaatttcctcaacaccactgatctgtattaaatgtttcacttctttcat

SEQ ID NO: 58428 - DNA, 871 bp, Homo sapiens
tcttgcagttaacccagcttttaaaagtagaccaggtccagatatacacaaataccatataaaaagctcactgtggtctgtttcccaccttaggatctttctagctatttttaatttcttctgttccaacctgctcatccagtctcacatcctgaaagcaggtctctctcttggtcctgcacccttgcttcaacttgcttcaatacctgttattagcattattttcttgctggacctggaaactctctgtcagagctgggaaccagaaaggccaagactgtgtacgatctgaattgtagaagagaagtttaacaaatcgggtgaagtcaagtatccagcaagaaggaggcattggcgggatactagatgatgccaaataggtgactgcattgttgtgtaaggaggtgtcctctctcttggcttggaggtattgtgaaacttctgtcagctcattgcaaagtggttccaagggtcaccgagtgggaatgtgtgaatggatcactggaaaactcagcatcaaaagaagaagctcatattacaatcctttcagaccatgataagcacatataaagaatattacaccgaacaatctctttttaaatgcaaggtgaatttctaaggtaatttgtctgtagatttagttgtggtataagactatttgtatccaggtttctccttctcttcagcagtgttcattgtttagcttcagcttggatcaagttaaattgctcactttttaggcttaaaaaatgtacagattatatatttctctttattgtccctgaatgctcacatctttcatataaacttgctgtaccttttttttggacaatttattgaatttctacagggtgatatttttgccagaact

SEQ ID NO: 58429 - DNA, 1638 bp, Homo sapiens
aacagtaactgaccaatatgctatgctgactaatatgaagttttttctcaagcataaaactgagagaagggattgagattgttaaacaaaagacacagttgaagcttataatactaatgtattgatattagagttgaaatgcatagaatatttatattgacattgtcatgtctgtatattgatacatggcatcttattaaaaatgaattgattaaaaagaaagtttattaatgaaaaaactcagatagccaaactaaaaaaaaaaaagaaaacttggggggattgtaattgtacgccagcttattctgactttcaaggatgagttttactcaaagacaaaaatcaagaatagtaagtagaattagttggcaagaataataccttactcgaatgaggctttggaacagtgactacagcaacttccatgtagaatttttccagtggtggttaaatcaaaggaaggcaagagccagagaaatatcttcaagttgctctaagaatttttgtttaattgttgatgttaaaactacaagtgtactacttatatattgctctcctctatcgagttacactaacttattccaagaaaactaaagcccaaagtgtattcattttcagcagaaaataccaaggatgacacaggacaagttatttttgcctttcagtgaggttaccttcctctaatttactccttgacccttacctggtttcctctttcaaatgcatagtttgatctactgaattccagaacttcagcttcctccttacctcctgacttccagaaactacagcagatggactttggtttgttgatgttggaactttgcccagcacttgcccagatcttttgccaattgactaacaagatagtgttgttgtcaccaccccccaccccagcatgacaattatgaacataacctagagagatttctatccccaaaataagattacaaataaagtttataacccaagataaaggttagagaaaatgtacatctgttattatagtctttaaatcttggtcaaagtgatatttcatgttaatataaacattttaataatttagatttgcaaaatgtaataatttagatttgcaaaataagccagaaatctggaattttatgtaaaagtttcgagtttaaaaaacaacaataagctacccataataacaacatgagagagaaacttgattaatagaaagaaccaaattatcgagatttgattactttaaccaaccctcactaggccaccagcaaaattagaaagaactagccagtagctaccacagaagttgcaaactcaaataaatgtctatgaagataagacaagatccctattttgaataagagtaaatgagtgaaaagcgctgagtagaagcaacagaatgtggtagggagagttgggtaactgaagagtacaggctctgtatgaaagggaaagctcccgctcattgctgacatgcaagaatgtggactcagtgtagacagatctcatttctcaaaataagccagaaacctggaattttatgtaaaagtttcaagtttaaaaaactggctaaaatctttttgaaacactgtgcttgccaaatacagcatctttggagagcttcatccagttcactactgtgctctagcagat

SEQ ID NO: 58430 - DNA, 1755 bp, Homo sapiens
ttctatatgttatacccactgcaaggaaggtccttctcctcacttctcaggcctaggttctatgttatttccagttctaattccagtgcttctaacaataattttaacaagcgtatttcttactttctttcttctattctcatttcaaatattttgtttttctgttacaccacatcatagagtgccttgtaataaatccactaatatatgcatatgtaccacccataaagctgaaatcttcatgcttatttttcccttacaattagtaagtattctattcaattgaaaaaattaacaatgttttatttttgtgaaatttttgtagagtttcagcttttctgtatatcatgatctgctgttgaagagacacctctattttatgtcaaattgtcaattttgtgccttataatccacttctgaattctacattgtaatttctgtgtaataactccatttgctgcctctattctctcatataaacacatttcaagaggcttaaatggaagacgacaatccaaatcaaatttcttagacaggaaggtatttgtaattatctcataaaatgatgccaaaatcttgtcacatacagtatctcacatgacaaattcaatagtgttctcagagaaacacaattttttatagtaatgtttctatgtaaatcagtccaggtgggtttcttttacatgaacaagcaagattgttttcaaaatgatagaaacaataaagagagagaaaacccaaactgatttgcaatgggagtttcctcagtagtcatcccagagggaagttttgctttgtcacaagtgactagcccttaattttgagagtgaatcatcccctttgaaatgagagataagttggggaaagagctgtttaaaaattactttacaactatttcctttagagctatgacttcttaaactggaatgtgatccagaatagcttccctttgaatccaacatttgtcttcagcattttattgtctctgttttccctcaccccatctcactttttccttctctctgttcaacagatttacactgactgggccaaccactacctagcaaaatcaggccacaagcggctgatcaaggacttgcaacaagacattgcagatggagtactcctagcagaaatcatccagattattggtaagcccttccttctgaaagaaagcatgaaagtctctgctcccatctctttggtaaagcacaacttaagttaagcgccttactgaactggtccatgtgtctctgagattcatgtagctctcccctgatttaattaaaatgtttatatgaggatgtttgaaaaaggcagtttggccatacttttaaataactagaactgtatctttatatacataaacttgctaacctttattgaatcatttgaatcgaactgtcagaaatgaatgcttcattaaaccatatgtctcccatgtgtgtatttcgttagctggagcaactcatacactctgagatgccttgaaactgtatcctgatccagcagggacaattgtgaaaggtttcatgtcagcaatcatttggcacaggctaaagaattagcagcaacttccttctcactcatttttttttttgcctgatttgtgcatatagaattggcagctgctaataagtgtgtcttcttgtacactgcttggaagacagaatatatgtagcaggagcatttttgcttggtattttttttttcctgttttcgtgtgtgtgtttcacttcattgcttaagcatgtc

SEQ ID NO: 58431 - DNA, 1910 bp, Homo sapiens
caccatttactaattttctataacaaggagaatgagaaggcatggtttctgtttttttttttctttctttttttttttttttgagacagagtctcgctctgtcacccaggctggagtgcagtggcgccatctccatcactacaagctccgcctcccgggttcatgccattctcctgcctcagcttcctgaatagctgggactacagagaaggcatggtttctaaagtgaagagatttattttattcatagaagaatttaattgcaaaatgtttgctaaattcaaatttactgagagctaaagttagcttttagttgttcatactcaatatccatgataatctcttaaatcaattggaattgtaattcttaagaagaatttgctaggaaatgcaatttggatgagaagtctagaaatcaatatgctagcattaaaccaggtctcatctctcttttcttaaatttttctgttttatttcctgttttcctgaactttttagttacggttcttattttatttagactttttgtttacttatggaaacaatattattagaagaagcattgctatgtacattacacactcctgattcagttgcacaagctttacagtcagcctgttctcagctctaaaattacatttgcttcactgaattatttctctttcgcaaggcccctgatgccaaagtacagccctgaaatggaagttttgaaagagctaatcatgaatcatagtggttggaataacttggaatacattgatgaaaaacatacagcagctctttagggttgcgatggaaaaaaaaaaaggtctttgatgaactagtttgatgtgtggtttcaaaactggttggtaacagaacagtcatatagctagagagagagagaaaaaaaaaagatgaagtttttcccagaaaatcttgacaacttcagggaggaaactttgtattccctttcaggattcgtgggaaggaatcctgacttgttcaaagactggtttttattttacagtccattaatcattgagtactaatgggctgtggagtaggaacccggggtcacccagccagaagactgcccatgattatgacagcatggcagaggtcttcagctgagggtggccaacccagtcacagggaaccttatcattagtcatcataatgggtctagcttgacataccctgagctttcaagggaagcagtgttcaaacttttaagtcgcctggtgtaactattcaattcaaataacatatttttctagatttttcagttacgaaaggtgagaagaatacaagataatgaaatcaaaatgtacaataatgttccctcttcctaaataattttcagttaatactacaaaaatattatagatttgacagaaaaaatattactttttccaggttaaacatacattcacatttagtgtactacagatatttttcttttttggttgccctccagttcttctctctttttcttattcctccctgaactcaatctgcagacattgtcaataataaatgttatataaacttggttttcagaattcttatggttacaaatcctgtctgtaaaaacaggacagaagagtactgtaacatgatccatatgatagttgaatattgcttataaaaacaacattaaaaatctagtgctttctttccttgtaagaaacatatctcttcagatggaaattatttataagtaccagaaaagtgcccagaattgaatgcctttcagacaatagaaaaaattttctgatatttgacagttttatttaatggttttggtgatagtttcaatgttttaaaatttaccaccaatttctatttttttgtccttacataaagatgtatagaatatatttatagaaaacttggtgtttaaattttaacacatgtaagttgagatt

SEQ ID NO: 58432 - DNA, 2548 bp, Homo sapiens
accattttcctattcacacaaatacatctaaaaacctataatagaccgtgttaaccttcctttaaggtataattttttgatatatgtgaaaattctgacatttctcctatttggattaatcttcctcactgagcatcccactgattagtctatctagaaccaaatttgaaacttactttgatgttttgtgaggacgacttggcccagatgaaaaccaaaactaagaaactgtcaatttaggtttgtttttgttccccctgagaaaatttctttgactatgacagtgatagtttatattgtctggtgtgcattttaattgtccttatgtaacaccatacagaccctagaggactctatttaggcagtatcaaggcttgaatcagatcctccatttgccagaactttgattaccctctaatccacatgaaggcaggatctgataaaatggaatctgtgttcttaaaattcaaaacttcattcatataaggagggccataaacaaccagaagagatatagatttatgtaggggatgagcattatgtaggccaggggtccccaacccctgggtcatggcttgttaggaattagggctgcacagtaggatgtgagctgtgcttgagtgagcaaagcttcatctgtatttatagccatttcccattacttgcattgctgcccgagctcttccttctgccagatcagtggtggcattagattctcatgggagtgtgaaccctattctgaactgtgcatgtgaggggtctaggttgcctgcttcctatgagaatgtaatgcctgataatctgtcattgtctcccatcacccccactttgggactgtctagttgtctagttgctggaaaacaagctcagggcttctactgattctatgtgatgatgagttgcataattatcttattatatatcacagtgtaataatagaaataaagtgcataacaaatgtaatgtgcttgagtcattctgaaactatcccctgccacacccatccatgtaaacatcctcttccatgaaactggtccctggtgccaaaaaggatagggacctctgacctagattgtaatgtggcctctagaccctaggcaatgctggtccttagatcaagtggcttccaggtaaaaaccaccttgtactagaattcttcactggaagagtttcagcttatatattttttcccctgcagagttaccttttgcctctcccatctccctgacaactatttcaattgcttttggacatcctggttaaagtttatataactcactaatgcgagtgctggtatgttacaaagtctacctaaaacaaacaaactcaacagataaattataggtgaatgaaggaatacttgttgtatttgtaaaaaggtttcactacaggatttctctaaatatttctctaaggcaattggaataattcaattaacttaaaaagactttcagaaggatatccatagttagttgtagttaattcttttcatgttgatattagcacagtggtgatattttgaaataccattaaaactaagtgagagctttccaagtcctctcaatgtttataatttgtcagaattagatatttcatgcaattactcaaaattgttcatgagtatctaccaaaaaacagtgacagaatacaaaacaatatgccaacattaactaacatttttgtagtattttatgtattattttcacatgcaataacttgacctcttagaaatatatatttatatatatttatatatgtatatatatttttatatatagtataaatatatatttatacatatttatatacatatataaatatatatttatactatatataaatatacatatatttttatatatatataaatatacatgtatacatgtatatacatgtatatttatatatatataaatatacatgtacatttatatgcatataaatatacatatacatgtatatgtatataaatatacatatacatgtatatgtatataaatatacatatacatgtatatgtatataaatatacatatacatgtatatgtatataaatatacatatacatgtatatgtatataaatatatacataaatatacgtatatatttatatatatagagagatatatagagatagatagattagaatatttttggtagaagtgggttttcgccatgttggccaggctggatttgaattcctgtgctccagcaattcatccgcctaagcctcccaaagtgctaggatgacaggtgtgaaccactgcacccagctgatttcaggtatattaaaaacttgtaagttaatattgacttttggcagaattttaggaaagactgttaaacatacttttcatataagttaagatggctataagtaatagaaatataactattgttacttaatccaatgatagtttattttttaatgcaaaaaaagaactctgaggtagtctagatcttcctgctgactgtatggtgccaaaagtgatctggctcctcatttgtggtttcttttttatatttataatattgctgctctacttc

SEQ ID NO: 58433 - DNA, 762 bp, Homo sapiens
ctcctggcctcaagcaatcgacccgccttgacctcccaaagtgctgggattacaggctctaagtttggctatcaaaatcattaggaaaaaagtaactgccaaagtatttttctcataatgattataacatgttaccctttcatctccaacatataagtattctcttgttccacatccaagacaacttttgatattggcaattattttattataattatagtaagatacatatagcataaaatttaccattagtgacatttagtacattcacaatgttgtataactatcgctgctatctagtgccagagtattttcattattccaaaggaaaaccccatacccattaatgagtaactttgtctccttctcactctagataacaattgattctgttttctgtttctgtgtaattttggcagtttctaattttagctcttctaataatgaagtgacagctttaaattttcatgtgtttttttttttggtgaataatgattttaaataccctttcttatgcgtattggccatttgtatatgtacttgtataaagtgtgtgagtagttcaattagtttggatacaagttatggggcaggtcaagtatatcaggggtcaccaaacactgggccacagaccagtccatgacctgttagcaactcggccacacagcaggaggtgagccatggaggagcaaaggttcatctgtatttaaaactgctccctatctctcatatcactacctgagttccacctcctgttagatc

SEQ ID NO: 58434 - DNA, 1925 bp, Homo sapiens
attttgtttgtcattccaatgtatgtttttatgacacacacagttttggttttgtatgttttcagccatataaatggcactttactgtatgtattttgtgcattttcaagctttatataaattgtatcatatatccttctgcaacttgactccatatttcattcttgggatgtatctgtgttgattaaagtaacgttgttactttttattgctgtataacatgccatggtaggtaaataccccagttggtcagctaatggatttttgaattgtttctaatctcttgctgtcacagacaatacaacatagctccttgtgcaaatgtgggtgagtatttctagatatttacataagagtgggattgctggaatgtagggtatgcacaatttttaaatttcctagatgtattaaataacaccccaaccagaagtgtgtgagctttcctattgctcatatccttgccatgttggcactgttagacttttaaatgttcagccaattttaactggtgagttttcccttaaaaaccctgaagagggcagcatatcctggtaattgctgcatcttatacctgcattccagtttatgggtccctcccttctttactggttgaaatcctttgacctcagttactcttcaacccactctctcacctcagtcagctctgggcagtatcttagaaggacagacaatataacactatctcaaagctgaaagttacctccagctttttcattccacattcctggcacacttctgtcctctgacaaggaggaggtagggaaacagaaacaagtcagtctggaattaaaacactttttccagttcaaagtagcacaagagagatatgatgtgagtagagagtagtcttccaccattctaaagcagtggtttgtaatctaaatagaagggcattgcacactatcaaaaactatgcttatgtaaatgggagaaatactgagaagtaggaaaaagtattgcaaagtggtagtagcattgtttttcttctagaataaaagatatttactcctttgccttctcagttacattgttcctggttccctaaggaaaaaaaaagtgttcagcttcagaacatctcctagaatttctctcgtttaataccaagctaaagtcctgccacttccagagttccacagtgggaatgcaaccttcacaaagatgctttcctttaaacaaagcagatgtgaaattgagccatgcttaaagatttgacatggctgctttaggagggaatttattgttagtactttcaaagtagacctaaaaacaccactctgctttttttattcctgaactggattttaagatcgtattgctttaaaataaatgaatgaataaataataacattttattttggggaggaggaagtagaaaaataaatatgaattgttttggaattgattgctattttgagttattaaattgttttcccatccattgtggtagatgaaacttcctccaaatgagatctgctgctttttcattactgtcttgaactcttttatatgctggtgtgttttataaatttctaaggtgcgccatttagagagtctgtgcttctgaactgtttgaccatagtttccttgttcaaggaacacctcactggagttcaaaggtcacactttggaaaaatgctagcatagctattctaaaggtggctacaccatcattactaaccattctggccagaaattcacaagacccaattatatgtcatcttgactgaaattctttcatgatagaatatctgtcttgacatgttggttggtatacatattgctcttgcattgaatgctgttatggagacatttgaagccagtctaatttttgctttatccaatgtgacactttttttgtttttttgttttctgttttttttttttattgttggtggtggtgggtg

SEQ ID NO: 58435 - DNA, 2606 bp, Homo sapiens
tcagaaagaagcagcccacttctgtccaatagccaatccactacccttcagacaaaaatgagaaaaataaggatagtcatttagttagtttctctccagatctgaagactatagtgaggtcttgagagttcagtaattcaccagtaaggttccaggggcaggaagggagttcagggttagaagctacactgtaccactccaagatctgttcttttgtgagccagcattgtatgtgtgtgtgtctgtgcgcccacacatgtgtgcacacgtgcatgcatgctttgttttgttttaatgtccatattattaggttacagtcttttccttatttcattgctgacttattactagaaaggagggagctagtggttttcattgttggtatcccttgtttttagttctgagagaaagagaaagagagagactctataatctgctttcattctatcacctgagcctggaggcctcaactagttcttttaactctaattaagccttagagtctgcaagtataagacagctgtgaagtagctctgccctcagaattttgtaagtactttaagacatagacaaacacacatacacacaacaaaacaaaacaaaaacataaagctgaggtggtttggttgggttccttgccagcttagcctcttactcttggctaaaaaacatttcaaggacttaaactgtggaatagttctaagaaattgcttagtcttatccctggacactgcaaaatggattgcctcagatctaagaaacccatttatcagaaaaattcttcaatttcatgatatgttatggtcgagatgttattgcacaatcccacagaaatctagtccctctcctaaatatgccgaacacctatacagatggaggcaagcagagagaggaaggtgagagtgaacacttgttcctgaaatctcccaagataccggctctgggttagcattagaaggcctaagcacctggatctattaacctaaatagaaaaaagaaataaccaaatacttgttgaaataaccaacaagtatttggttatttcttttttctatttaggttaatagatggagcattacctaaaaatgagatgaagcatcacctacaaatgtccctcaaacaagtcatacttagttcagattataaagagagtatttgataaatgctgtacgtataagggaattcgaatggcactagcttacagcttcttgtgtcactaccatgcctctaatgcaatttcccccatctagaaatgtaaccctcagccagttgccttgaaagctggttaccgtggagatgattatcagtattatgatgacctatttagaagaatttctgcatcaccagaaaacaaataaccacagagagagcctttcaaatgaatcatgctctttctctgaaagtgcctttacaaacaaatgccatggatgtattgtgtttgtgtgctgtgtgtggatttgttcattatttgtatttgcaaaggttttagtgaaattccagttgtctttaggcatgccaagagtagagagggtagtacaaacaacaggcataagcatatagacatctgtcctcttcctacaatttgaaatgcatggccatggctgtattgatttctcagcaatgttaacatttctttcatttgtacagtttttcttgctcatccactgctttttgaggctttttaaggactgctggaatgtggttggcaggtggttggtaaagactggtttttacaaactgattggccattaatagttcctaaacacactatgactacttgatgactattttgattttctcaaaattatgtcatgaaatattctcttaacttctgtttggtctcccatttttctataaaatagttttgtgtgtgattgtatgcagacctagtgttttgttttttttttaagtttttaaatttgttatccattaatcattgccctgctccttataggaaagactgattttcagctgctgccctttttggttttgttttgcttttgatttttcttcttctttttttttttttttttttgagacatttaatttgcacttgtaaaaatttcagtgataaaaattaaacctttattatgttcatagaagcagcaaataacaatataagccaaatgttaccccaaagaggtcaaacagatctaatattttccttccagtctatgaaggtcgtgtattatggcatttttatatttgttcttattgtattttcaggcacactcctttttctactctcatccttccacccactgtcacttcttctaaggtaatggcaggaatgttcatattttctgctgttatttcatatcatctagcaaagtgctggataatcgatgtttaataaacctgacccctcatataacctcaaaagtttcaaaagttctttaaccagataaactccatttttgtctgttcatgttcacaatggccttccagtctaggaatctccattttttaaaccatgtacaggcagtctgttttccacagaacattttgggtttaagtcaattaactaattttggccccattttcaatttctataccatagacttgtccttatgcccaaaatcacattgctctgaactgagggcaaa

SEQ ID NO: 58436 - DNA, 5567 bp, Homo sapiens
gaagaatcacaaaagaagtgaatatgccctgccccaccttaactgatgacattccaccacaaaagaagtgtaaatggccggtccttgccttaactgatgacattaccttgtgaaagtccttttcctggctcatcctggctcaaaaagcacccccactgagcaccttgcgacccccactcctgcccgccagagaacaaaccccctttgactgtaattttcctttacctacccaaatcctataaaacggccccacccttatctcccttcactgactctcttttcggactcagcctgcctgcacccaggtgaaataaacagccatgttgctcacacaaagcctgtttggtggtctcttcacacggacacgcatgaaagtaaccacaggaaaggggactaggatgtgaaagaatagaccaagaccccccactccaccctccagtatttaagattactagactattctgggggtagatagaggagaaagaagacttttggatagaaaatgatttttacactttttaaaagaacacttctgagtcttaagattccaatgagagcatttttaataaactggatgtgacataagttatagaactaggctgagacaccattaagggagcttactgcccagcaggcagagttttaaaaaaaacacagttagtagcaattatgggaaaaataagatccttttgtgtttataccttaacataaggaaagattctcactaaattggttaagcatggtaatgtttgcactctttgaatgtaagttgaagtgttgcctctcctaagtaacacatttatgtttccaaggtggttttcatggagacaaaaggtggagaaggacagtcccgtgaagtggatgcaacagttgaaggtaacagtaagtcttcatcaagagccagacatgccttagaataacaggtaaataaataatttaaagcagaggcctctcattaccagactaagtcccaaccaaccaaatcatcttcctcatttgaaattcctctaagtgtcacaaaggttgttgtgtttgtgatgtgggttttgactgtcctcatgttaccagaaagaggtcctgatccagaccccaaaagagggttattggatcttgcacaaaaaagaatttgaggcgaatccataaagtgaaagcaagtttactaggaaagtaatggctttttactaggaaagtaatacaggaatggctactccatagtcagagctgccccacaggttgctggttgcccacttttccggttatttcttgatgatatgctaaacaagaagtggattattcatgcctcccctttttagaccatatagggtaaagtgtgatggcactgatgggagtgtagcagtgaggacaacctgaggtcactctcatcgtcatcttggttttggtttggtgggttttagtcggcttctttactgcaacctgtttttaccagcaaggcctttatgacctgtatcttgtgcccacctcttatctgatcctgtgacttagaattcctaactgtctgggaatgcagcccagtaggcctcagccttattttacctagcccccccatttaagacgaagttgctctgagttgaataaaaagcattcaaaaataaccaaataaaaaactttatgtggatagagaatcagaaagactgtggtgacagttctgagtcaaaccttcacgatttcccctccttcctgtaatgaaattagactcaggagaagttccaggatttaacaaacccaggaataatagtctacatttcaacactgaaaagttttcttactctgtttaccaactatggggactatgactaaaatattatgagaaataactcatgtctcaagactcagagccaaattaatttcacatatctataatttgctacacaaacaaccactttcccagaggcctctgttcctataggtcaacaaacacgagatgactccacgatgagactcccaggcttcagacaagtccatagccttaggtaattatgatctgaggtggttttgaagctcctcttacacacacagaccccccaaacccatccctcccaccccctgcaccccgccccatctctgggccaaaactttctttccagtgggtctgaaaagtactgcctgaaattctcagcattcctgtcattccctaaaggctgaggcagctctctaaacattctttcaggcacctgaggaattgggccaccagctcttctgtggggagccaacaggaaattaagtataaagggcagcaaaagtatttggggagatgacaatgaggcataaaggaaacaaagaagggtgggggtgcaagaaaagaagcctggtctacctacacactttgccctgcagacagttctacctctcagcacgtgtgatgacttacctaggaatggaatgtggacctgggaggggaagctggtacaaagctgtggaggctggaaaggaacccagggccctattacaaatcgtgaatagtgacttttagctagaatcacttgccagaagcttgggaaaaaaatgttttcactgagggcctaattggatgtcagaaggcttctacagaaagcctggctcctagagcttcctagctgctgagatgggctatcctggcaagaatcctctccctcctcctttctttccctcttgctcccttcctctttcccctccttttctcttttccgtacacaatctgacagtttatttgggacaattctttggagaactgggatacacctgcagtatattcatttttaagccacggacaaaccactagagggcgatgccatcactaattgctgaaactttcctgctttcctctggcttcagcattcagcaggcctatccacacatcctgtgacaggatgtttctgaacttttccttcaattctcattgtaaataaacaacctcagggtgaatacatccagatgcacatcatagcgacatgcagcatgaattgcacaggccaaagtttctggtctatccggaacagtcttgcctaatatgcaccacagttcagaaaccagaggttaaacttgcttttttgtcctgaatttctgcctgaattttggagtttctctcaaatgctatctctaagggcaaaaggagcccttcaaagaaatgaaaagttaaataatccagcacagcccatttgtacaggatttctgttttgtttccatattcaagttacaaatatttggtttgcttaaatgcagggtttgcccaaatggtcaaaagctattagtagattagtcatgtatgcaaatatggggagcaggggcacatgtttctcactgcttgagaaactatgtgtataaacggggtcccagtaaatttggtcctagccggggcgtaccaaagaaagcaaagctagcaggggtagtggctaatgtctgtaatcccaacactttgggaagttaaggcaggaggatcacttgaggctgggagttcaaggtttgcctgggcaacatagcaagaccccatctctaaaaaaataaaaatagtcaggtatgtactattatacaggtgtgcacctgtagtcccagctcctcaggaggctggggtgggaggatcctttgagcccaggagtttgaggctgcagtagctgtgatcacaccactgcactctagcctgggtgacaaagcaagactctgtctgaaaaaaaaagggaagagaaagaaagagaaagaaagaaggaaagaaagaaagaaaaagaaagagagatagagaaaagaaaagaaaaaagaaaagaaggctgctagaaatcttaaactcggctgggtgcagtggctcatgcctgtaatcccagcgctttgggaggccgagacgggtggatcacctgaggtcaggggttggagagcagcctggccaacatggtgaaactagtctctactaaaaatacaaaaattagccaggcatggtggcgggagcctgtaatcccagctgaggcaggagaggaggctgagtcaggagaatcgcttgaacccgggaggtggaggttgcagtgagctgagatcgtgccactgcactccagcctgggagacagagtgagactccttctcaaaaaaaagaaaaaaaaaaaaaaagaaatcttagaactccttgaactttttgggcagaatctcccttcctatgagttcaactagtgttcctaggcatacactctgcctcctgtataggggcagactagcatcagacttctctgagattagtatttcaagaatttatgcaaactaacctattgaagttagactgaagatctgggtaaaaatgtaaatcagaaagtattcaataaatcaggtaaagcacataacaggcaattcatgtactggaatactgctgcctccagcactggtggtgtacttcttcaagtacagtacttcttcaaatatttgctgatgtcaagcttatcctccatttatcagcagaggcagataaggtgaggaaaatatttgtaggcagagagatttctggaattttcctacagtgctgaaataccatccagagttcaagtgggccatatttggacaatgattactatgttattttttctatcgtattttcactgctatataataacattaacactctttacacaaggtcagtactatttacctaagactttcccaaatctttcccattctctcccctcaaaagttcatgaacacattctatgtttctgaaggaaaaaatataatagaggaaaagtttattgagattagtcaagtggggattgtaattcaccaaatctgcatttactagaaggaagatagagcagaaaactagtcccagggtttaaagactacaattcatagaagactcctattgttgggccaacactgtatttcacagcaggtgaagagagaaaaagtacaggaaaacaaacaaggatggaagtatggtacaggagggtgcacagtgaatagaagaaaatgctatggaagactactcctcaccgagcaaaacccgactaggtggaacgtggactgaaggtggagatgaattcaagagttttacggagggcacctgtcacctaatcacagcgccaacgacgctaccaagaaagcatcatggccttttcttttacaggcactttgtttacaggacaaatcaaggaaatcaaggaaaaggcatcttttctcttccagatcacttttagaatccaagatttggtacactgggacaaataaaaacacatagctatgaaagggtcgatgagatcccatttgtaacttggctaaatagagttgtttcagtacctgacaacttgagttcaatctgtattattctgaatgtataattgatgtggccatcagtttccagtaaaggaacttttgttttgcttttttccccccactttccctcagaaggaatggctttctcattaggaaatgttcgcatgccctcagaaaaggtgtttggaatagaaagactccccggaatcagattaaaatgccagcagagttgagtatgttcttccccattttgagctagttaaatgagaactcacgccattctccacacagggaacttcttaggtaaaactattaaagccatggaacca

SEQ ID NO: 58437 - DNA, 1101 bp, Homo sapiens
aaagttagacttatttaaattaattcctaaaaggaaagatctgagagctcctcagacaagtcatcaaatcaggcttgtttatgctcaagcaggaaggccaaagttccaggtaaaggctctcctttctagaatcagcataactgcaaggcagcagaccatataaatagtttgatgctctgaacaaatggaatgttgtctggaatgataatgtggaaagagttcatgttaacacagcaggccatttaatgtaaagaaacatgttttaaaagctacctagagctttctaggtacaagtgttttgttcaggtttttatgcagacagaaacagtttaaaaacaggcaaggatcgaaggtatcaaaatgtgttttaaaacctatctgaaggagttgattactatcagcgctaaaacccagtctttagtctcctccttaaccaggatgcagttcctagagataaaatataatgttaacactgatctaatatagtaaacaatcgtcagaactttggaaagatttctctctctctctctacacacacacacattttatatctttcatgtatccctctccccctcctcccatactatgaagtaatatttaaccccaaagaaataaccttgttaagtttgtttccttctttgctaatcactgcagtggatttcagaaagcacaaggtggcagaagcacactaaaaatccaactggaataaaggctacagcaatttgaacatcataaaaatggcagcaactctatttttaaaaataaatgagtactttttcatcataacaaacatgctcaataaaattttgaaaatatgacaggtagaaaaaggaaaggggattgtattactgagacatatggacaaatgtttaattcttcctactacaattattagttgtgattttatcagatatgcaactttatatcctcccttttaaactctaacaatgggagcactttcaaatctgctttagtcaaacatctctgtttcaaaaaatatttaaggcatctgcatgtgtccatgtttttataaacattttcaaaagatcactgattagaacatggctaattttatctagccattttcccattagcaatgat

SEQ ID NO: 58438 - DNA, 2277 bp, Homo sapiens
tctcaagaggaagaagtcttcacccaagacggaaacagttaatgaccccgaagaggcaggcaacagaagtgtctccaagaaaaagacgaaattctccaaagaggagcctgtcagcagtggacctgaagaggctgctggcagcaagagcagctccaagaagaaaatgttccataaagaagcccaggaagattagaatgcaaatggacattctctgggaggcggggcataccatagcccaagacgacatttcctaccatgtccagttccccaataaaaacaaattcacacacacacacaaatcaccctcatgaaataagagaggaattattatgaccactttgaagatcaggaagtggaggctcaggaaagggaaatgatatgtccaaagtccctttttctaagtggtgaattcaaatcttaagactatctgatcactgttcttttctacttttcctcaattaatatttagtttaaaatttaagcttttgtgtattttgttctaggggttgggactataaagctgtacacatatataaaattcctccttagcctaggcaacatggcaaaacccaatctcaacaaaaaaaatacaaaaattagctgggcatggtggtgtgcatctgtagtcccagtcacttcggaggctgaggtgggaggatagcttaggccccagaggcagaggttgcagtgagccaagatggcaccattgcactccagcctggggcaacagagcccgaaactgtttcaaaaaaaaaaaaaaaattcctccttatgattcaagagattcctgcatagtcctcaatctttggttttgctttaagaacagatcatctgccccatttggcttaaaaacaaaaattaaacacataatacaaacatgagactataaatacattagacttcaataaatagaacaaaaatgttcactgtttagttacagcatgtcatttgatgagcagaaaattagaaaaatgattttagtccccatttcagcattacttaactagaaaaccttgggtaaatctctcaaattctgtgtctcagtttgtatacactattaaatgggtataaaaaattgtccttcaaatgttataaccagtacaaaatcattaaatctaaaattggtatatatttcctagtactactggtataagaattctgaaaaaagagaggaaaagttcatttcagttttgtctcacgcaatagttaacatacaaggtactttttttaaagcttgtttagtatctagaatattgtgtacacattcattaaattccttaaattctttttactgatatccctttggaccctgaatccaatattatgtagccattttccctattacacaaatagactggtttgcacaggttacacagtatgttaatggcagaatcaaaggtcaaaatatctgatcgatatcctaaccatgccaggatcatccactgctaacaagacagaactgtgacagtctctttaacgtcagcagaattctctaagctgagccttattttagctatcagtttccttcagttcccatgctgaattttatcagatctgcttctttctcttcctctattcatgcctaataagcaaagaaataaaaaagaaaagccgtaaaaagcagagcacagcatctggataatccacaaaccagaaaaacctgactgacaagagttaactaaatggattttttagtggatttgtttgtttttttgagacagggtctcactctgttgcctaagctgagggtaggcgcacaatcacggatcactgcagcctcaaattcctgggctcaggcaatcctcccacctcagctgatcctcctgcctcagcctcttgagtagctgggtctacaggcatgcaccaccacaccggtctgatgttttgttttgctttgtagagacagttcttgctattttgccaaggctggtctcaaactcctggcctcaagtgatcctcctgcctggccctcccaaagtgctgggattacagtagtgagctactgtgcctggctggatttcttgtctacagtttagaaactcaatcttcttcaatcacataatgagtctcaggatataacagcaagacacaacgtgaatttgtgattaaattttattttcatgaaattttttgcatagccagaatcacaaaacaaaaatgaggaaatgctaaagttgatttacaaaaagtgaaagaaaaaacacacccgtgggaaccccatcaccaaaaccgtaaaaaaaaaaaaaaaaaaaaattgcaaaaatctttcagaaaagg

SEQ ID NO: 58439 - DNA, 1592 bp, Homo sapiens
ctttgggtccacactgcctttatgagctgtaacactcaccatgaaggtctgcagcttcactcctgaagccatcaagaccacaaaaccaccgggaggaacgaacaactccagacgcgccgccttaagagctgtttaacactcaccacgaaggtctgcagcttcactcctgagccagtgagaccacgaacccaccagaaggaagaaattccgaacacatccgaacatcaaaaggaacaaactctggacacgctgcctttaagaactgtaacactcgccgtgagggtccacggcttcattcttgaagtcagtgagaccaagaacccaccaattccagacacaagagtactgacctacttactagagtgtattcatcagatatgtagagtctaataatggtaagtataagatccaacataaggaaaaaatacaacatgaagaaattgtcctgtgtgtataatttcaaattaatacatataattggacaaataaaatatccacttcccaattaaagtctttttctaggtcataaaataaaccttactttcaaacttgtgcaattcagcagaaaaaaatgttttgttctagaccctttcaagtgccccgtgaccttctcccgcaatgattaaaaaaaaaaaaaaccctattgccaacatctatacttgctgccttaaagcatgcgtatgcaaatcaataaaaaatgcttcttgttgtacaggaacaggagcaggtcagtagacaaggaacttcctgctttggtatgcttcctgttttctgctatcaggacatacctgtaagtagtaatcaggatcactgaaaaaacaaattgagaagtagagaaaaaaaatgacttgttgccaacccacgtgaattcaagctaattcatcctgtttatttagttcctgtttcagcttggttaatgacacttccctggaatgtatttgtttaggagtccaagcagagacatttcttactaggaaaacaggcccagggtgaacccagagatttagaggaaaagaaacctaacggggaaatattttaagcttctcaagtaaactaactcaagaaactttctttctaaaagatgttttcctttacccaagattttgttcaatatttcttcagtagctacaatttaccagggactgtagagattacatctgtgtcaatacatactgcattcttttttagaacagagttctgatttacttcaattgggtttctaagagacatagagtcttcctagaaaagcagaaatttatgaccagaaggcagttttgttaatagtccagaagcttccttataacctttttttaaaaaaagattttcaggaaagacaaccattacaatcttctcaacttcgctactgatataaaccatattatccatgaaaatgcattgtttcacacaatttacatgcattatctcatttgttcttcacgatgacccaaccaagttaggcactattttgtccttgctgtagaagaggaaactgtaaagcaacttgccctacctgacagagctagtagtggtagagccaggatttgaattcaagtaggtctaacttggaagctagtgctcaagtgtgtctgatt

SEQ ID NO: 58440 - DNA, 833 bp, Homo sapiens
cccagcttccccaagtctcatctatcactgtacagattctcacttactatattgctctgtacataacctcacatatcctaatctgttccaatactgcattcttcctctcccttccaaattattccattctactgcctaaaattcctgctcagtgattaacatcttgctattgtcagatgcagattaaaacctggctggctccctgaaaaagactccctgtggtgtctcaactggaacttatttaattcccctcatagcttgggacctggtagtagggttagtatcttctccaagtatgtctctggggcaagtctctactttggccataatgctctgggctcagtgattctttcataatacctaaaaggtattatgaaattctgtggaggcattttggtcaccttgatgactgagggatattactggttatggagcagaaacctggaatgctacccacattgcaatttgaaaacacagttccggtaagaaagaaaagacctacaccttgtttaactggagaatgtaatgttgagtcagccagcaggtgaaaaataagtttataattatctgagcccaaccacttacctataaaaacaaagcaggagaagtacaggatttgtaaatgtatacaaagatttttccagaagacggctatcctgaaaatccaggaaatatgttgtttataatcttatttttaaaaattgcttgccattttggaaaatgtcattaactgtaaaactattcatatttgtgtcaccaataaagcataattttatctgtccaaaaaaagtttgaaagccactgctatgttctgatagttttatgactttgct

SEQ ID NO: 58441 - DNA, 8281 bp, Homo sapiens
tttcccatagggctgtggtgagaattaaatgcactaatgtatgtcaagtgcttagaacagtgcctggcacttaataagcacaccataaatgtcatctactttaattatgtaattattatttttatgagaaatgacatcccagctcagacaactcagtacaaatcctgataatattaaaatttcaatttactttaccagtgagctcaaacatttaggaaagctgggctaatagcccaggttttacactaaacagtctcagtgtttacactatatctaccccattcacgaatcaaattttctccaactctgagtcattattagtttctctcctgactcatcacacagaaaggtagacagtctggagcataatgggaataacaaaaggcatttcttaatccacctggatttataaagtttactaagtggaacttgtcctatatataatgttcaataaacatactaaataattatgacctaacctgtgttcacttaaaagtgctttctatatgttaaatgctcctttatcttccctttcaccaacacgagttcaaactatggagtaggtgtcatgaccccatcttgatagaaaaacaatatatcacttaggtaaaatcaaagattcacattttctgaccactagccaaaaataaatttacgttttgccgagagcctggtgttcaaaattttgccactctataggttagagggtcagaggcaatctctgagtccacaaatttgacctgaaattctattcaattccatacctttactgttttcctcattcagatgtttaaattacttaagataatctttaataaaaagttatgtaaaaatctagggaaatatgctgaataatgaaaagtaggttaatttttaaaaactcccctttccctagatatatacatacacacaaaatacacaaaaatgtttaaaatattgctctatcagttactttctatgtgatcttgaatcatttaagctctaagtcttcattttctcctctggaaatagtgataaacagtgtaactaccacatgagattgctgtgaacttcagtacataaagcactttagccaaccactaaagctaaaccactttagccaaccactattttaaaacagaagttttaaatactgtatatgttaacttttatacttaaaccaaaacttcagtgccacctctacctattcaaagattacattttctatggcacccatctccattaacccattcacacaaccctactcaatggcagtaacttcacaaaccccctggaaacaagtatgtaactgtctaggaagctttcttcaactatcactcctcctccctgggttaggtaccctgctcaggcactaagctatacttactactctacttttcacatttccttatattacctgagagcacctcgtgggcaaggcttatgtcctattcatttctatacccagactgcagtccaacagttgttatcactgactcacatttgaatcaaatggggaacttataaaaatattaatgcctgggatccatcccagacccattcaatattacagggtggggtgaagggacaaagagggcacggaattgaattagcatgagcaaacatttttttaaagatcctaacatgctatcaatgtgctgctcaagttaagaaccactgcatgtcggtacttaatatactatacaaacaattatgtatacatgtacatatgtgagaacatatgtaaaaatatacaagtactgaaaagtttaagactcaggtcaagattctcatcctcaatagcttctcccagcccaatcatctcccccttttaaacacacactatttccaataaatagttacatgcttcattaagatggcttttaaactgttaactcagtacttaaattttttcatgtaattatgccttatccttcttcctagattatagccttgctccttgagaatatacactgccgtgttcttattttctccactgcttaaggatagtgtctttaacaggtatgtaatacacatttgactgatctgataaacacacacaaaaattactggcaagaagtatgccacgtccaaattacccagttcaggtgaattactaccaaaaaatagaaaatgtaaaaatttagaaaaaaggatatttttcttaaaactcttagtaaattttatctcattaaagaagctctggatagatcgacttcagccatcacatgcagtaaccacccagtttcctacctcccaaatagctagtttcggtttttgacctggttccttgcctataactatcttctagtcaattctggtatctttagctgctgtcagatacctttataacagtattatatatacactctataactagtaaagtgaggtaatgaaagtcacaataaatgtatcacacagatgtttcataagtacttccttgaaggaacttaatgtttatccaccattaaaaccagatctctacatatgaactacatgttaatctactaatacagacttggttgggaatcatgtctgaaaataagagtcttactcgacattagataaaataaagtctacttttgaatataaagagattggtcattttcatctttttacttattttcatacccgaaaaatttgcaaaatatgtatgactttttaaaacaggggtgctaaattaaatattacacaagaaactccacagcaactggtattctcaatgttgaaactaccaggagaaatggcacaattctaaaaaagcaacaatataaacacatgaaaatggctcagctttaaagttttgcatcatatattttaccactattaaaataatctgaaatacataagttgttttgaaaaataagaaaatatgaggaggaggcgctcaagaagtatgtctgttaattagatactgtagtgaagcattactgttttgttgggtcctgcagcttgaaacggacagagacatagttaccactaaaagaaagcagtcctcaattccctattcaataaaaaggttcaaactctacagacaaaaaaaaaggtacccttggtttgtttgttttcagggaagattaaatttaggagttgccaacacccaaacgaaaaacattccagagtattagactccattgtagtgggaagtcatctacattctcagcactatgttctcttactcaaagcaggggtattaacaaaagatgtttcttaggatctcacaagatacactctacttacttcccccagtaaacattacccttgtttaaaaaaaaaaaaagtacttgaaaaataattttagcacatgcagccagaaaaaaagtgaagtttaacatctgccaagatatttcccaaaataagaccgctgtcagatgaacaatgaggaaaagattgaaaatgacaaattcttttatttggatcatcagctacttttaaaaatcaagttgaggaatgtagcttttccaaagccttgtcttcaatttccccttaatcttcatatttttaactaaaaaaaaaaaaaaaaaaaacacctagaaatttgattaccactcttacgaattccttctaaagcaatttaatgaataacagatcttttgtgcaagtagcaaaccgcagaggacagttttgctggctgataaaaatctctgaaacgctcatataaatacgtcctacaaagacacactatgatttaacaggtatggaaatcataatactaaaaatttaggtatatttaatatacaccctaacttattgcaaatgcttctacttaaaccacaattaaagttgagtaaaattagaaagccaggagaagaaaaagtgaaagctaaacagtcaatgagaaaaagatgcaactattttaggtgaaacaaggtagttgaaccacttcctcaaatccatgagctactatcaaagtaatcaaaacttgtttgagattgttttgtcttgtttctggtagagggaggtgtgattatacacttagtaaaaatgttttaccagtcactctaatggaagatgctgctacctgtaacgtttcgaaaatgctccaaactgcaaacaacccaaaacaaacaaaaaccctaccacatgtttttcagacacagtactcaaaaagagatcgtcttagcgaacagaattgtgggttactaaatcatccctattgtcctaagtatcactcagaaaaacactgtgtgtttaggagcacaacttataaacagctgatttatatataaaatagtgcacgtattcatttggatatactcatcttgagctcactgtaagataaagctgtcttggatattgctaaggcaacattttctttacagatgttattaaacattggtaagaaaggagaaataaactggtaacttcacatgggcacgtgagaccctagagaatgtcgtcaccattaatcaatttttctaactgatcaagcataaacagccaagtccaggtggccaagtcagccaagtccaggtgggcaagtcctggagccataagttgtctttctaccacggtaaaaaaggatcctggatctgagacctggccaggaagcctgaaaagcacgtgtcctactctgagtttggggaacttcccaggaagcatttgttcagagtaaaactccatcaccccctgcctgcctaactcggtgaagggacaagtacgagccaggggaggtaaactctgcgccccgggtagctcccaggaggaagacaccgggaggcagctgcccgccccggcccggtccggctgcggcccccgcccggctcacctctgcggcagggatgttgaccacgccggtggagcgccgcttctcccgcagcttcctcttctcgatctgccccttgcctttcctggcactggggcccgagctcttgcccttctctgggacgccgtccggctcctcctcgtcacgctggggcggcggtgcagccgaggcagaggcggctgggggctcgtcctccgaccgccgcgggccgggggccgcccgcgtcagcatggcggagccgaccgcgcagttcacgcccccgggaccggggacggcaggtgcggccggcgcgccgcccgggaggttgttgttgagctcgttggcagcggcggccgccggggtgcccagagcccccgcggggggcttcccagcggcgtcgctgctgccccctcccgggggggccgggcccggggggttctgcttggcgcgcatcttctcgcgtttcgccttccactcctccaggaagtctgtggtgctgccgccgaggccgctgctggtccggtagccaccggtcgccatattcccaaaggggccggtcgggctctcacctcaggccgcccaccagggctccggccgctgcctcctcttccttcctgcggccccgaggatgccaggagacgacctccaggagagggacggccgccgctcccacagcagccggcggggctgaggtgaaagacaaaagggggcgggtaagggaagcgtaagatccccgcccgacccaagggtctgcccccgggctgcgccccttggagtcctcgagcgcgcccaccagtcactaccggccagcagccgccgggtccccaccctgcaaagtttctcccacgcacctacagtacggaccccgacgatcgccgcccctagaagggaggagagaggactgaccccacccccaagtcggcccgcccgccccatccccaccaaggtccgcgccggcggcggtcgagatactagggctagacccgccacctgtcggctcgtcgtatcgcctgctccgcgctctagccaccgccggtccgaggtccccgtcagctacaaccccactcccaaggcgaggcgcggagctcctagccggttcgcagaggaggcggggacccagctgtcccgccgagcgtggaaaggaccgggtgtgagcgagcgccttaccttggaggagcttgtaggggacgaggcgtagggctgggatccggctcccaggtgtgccgaagctggcgcgcgctcttccgccgcgcggaaagtgccgcggcaaactcgcggtgcggagctccaggcaatcccaggacaggagggagggagaagaaggagggagggagggagggagggagccaggggcgggaagggagccgagcggcgccgaagcacgagcggaaaaggccgaggcggcgcgcgaggggcgcggcgcgcggtgggaagggtcgtggccgctgacgccccgcccccggcgctcaggtgcgcggcgtcgcgtccggcccgccgctgcagcctgccctgcgccagccgtcctctgccccgctcccgccgcagaccacagcgcgcccgccgcgctccgcccgcggcctgcgagttagacggcacattcctgggctagcagcttcgcggcgtccggcctcccggcgcctccgactccggggcgggaacggcactccacgcccttcttgcttgtcttctccgcctctctcttctcccaccactcttccttttaagtacaagaccgtattatttgagagaaagtctcgaacgctgctggctaaggggaaaagtgcgataacttgtgatgattcagggaatgactagacaggatgggaaaatacccacgtgtctcttttcctagtcgctgctcccttttcagatgtactagggcagcgggcaggagaatagaaagacctgagacaaacccagcaccctccttctaagaaaactgcggtgccctggtgaaaagggttggctaagaggaaggacttactagtatcttagggttgcgggagaaaaaactcagttcgacagtttattgtattggcgattccagtcttggagttttccccttaaccctgtctctgcctctcctctttacagagaatgaatttagcagcaaagctccctaccaaagtactaacgctgcactgatgctaatttgagatgagctggggcagtgattgtctctattttttcattattaacatgccagaggcttatcctctgatgcaagtcatctgaaatttctggatcagagcggggtgggctgtcactgacgcacctaagactgacctttctatatccaagtaatgtcagggcacatcattgtgggaggctacaaatgccaggtctccattttgtaaaaaagtaggagagccctaagtcacgctcttacctaacataaacctttcttcctacttaatattcctgttttgcccaggtagcacatgatgagtgagcaatcagtgtttgcctgccacagaactgggaacagaagaaagtgattcacatgctctatatttctcagggaaagacagttttggtctttggtctggctgttgtgggaaacgtatggcgagagctctggaaaaatccttagaaaattaaaagcttttgttgggaataggtctaaaaggctgagcggctgtttacctaagctagtaccaaccccagtgtgccacctgaagtttctcaattacatattcattagtttgttttctgagttttaaggagagtaagggaggctgggacattaaacgtattcacattcatatgctttgtaacttatcagaggacttttctcctggaagggctgcaggatatagtggaaagagggtatagtcagctagctgagagatcttgggcatgtttacattatctggtactcagctttctgtactataaaatcagcaaaaattacattttttttttttttgaggcggagtctcgctctgtcgccaggctggagtgcagtggcgggatctcagctcactgcaacctccgcctcctgagttcaagcaattctcctgctctcagcctcccaattacattatatttaagctgtcttaagaactgacactgcacataaaatgtgcttgattcgaggaaggcactcagtaaacatagtcccttctaggggcttaaagtccttggtctctaagaagtgtatgggagaagaggaaattataacagatggggtattgaatatacaatatcagcctaaaaacgatagactttgaatgaactaggataacaccccacataaatttatcactgcatggcttagaccagttctcttagtgttaataggttctgagtcaggaattttggctgctactgacttgtgtggctttgggcaagttgcttaacttttgtgcctctgtttacttacatataaaatggggataataatacttcctgcatcgtgagagtgttgtgaaagtgcctgcagtccttagataaaaggtggtatgtgagtaccagagtaggtattattagtctataaagtgccctaggaaccatggatgaaagagattattgaggtacaaagctctgtgttttgtt

SEQ ID NO: 58442 - DNA, 2487 bp, Homo sapiens
agatcccaatcagactactataaaactttaatatgcacaaagcatccattttgagaaaagtttgtgaccagctttcttttttcccaaccccaaaagaaaaaccagagcttggtaaccggctttgaaaagagtgtcccctatttattcttctctttctaacaccagtgcacacccgaggacctggggctcaaggatctctgacactgcggcaaacttcgagtatcagactcaacacgttccggtccggaggtgggcaagccctttagagggcttccttactctacccacttccatccccttcctttcagccggtgcagatcagctaattacaccctgttttcccctccccagtgaccaagagtaataaatgagaaaacaggaaatcgttcgttcagggcactcggcttagggctctagattactattattatcatcatttgtaatcaagtcctaaaaagtgcaacaaatccaatgcccacctacaagtcaaagatgttcatctgcctaaccgtccgtaatgccccttgttagttttcttccttcagcatccacccctccgaatataccactgacaccggggcccaggcacaaccccactacacccctccttgtctcgaccccaaatcccagacttatccacgaatggccctggggccccaaacgaccacagttccttttcccctatgccccggaaatcacccggttcccaactccaccagcaactgttctgaaggggggcctcaagcccagcgccctcccttccaccagctctccctcccgccctctggggaaaccgccccctcaccccgcagcagggagtctcccgccgcccccagcctcaagaggtggagaactgagggcaggcccgagcaggaggccgacgagaaccctcacggtcaggagagccggcggcggggcgcacagacctggtgcagggcagtgagtccgtccacattggcgtaattgatgtcggcgccgcggtgcagcagcttgaggacctcgtccgtgtcgccgctggagcaagcagccaggaagacggcgccatcgtcgaacttcaccttggtcttctggcgcttcaccaccggaggctcgaggtccgtctcggagccgatccagcgtttcagctgctcgttccgcttctgcttcgcgtccgccatcttcatcccctctcctgccgccgggtcttcttatcgcgagggggggaagggggaggcggagagggaagagaggggaggcagggggtgtgtgaatgtttctatgagtgcgggccagaggagggctgggaacccggagccgacgctcgagacttccagtatcccacagagcactggggcggcgcacccggccgagcggacctcccttcctaccacagaagccctcccgcccccagcacggccacccgtcaccggcggccaatctaacgtaacttcgcgagatccggactgggaggcgcccttcgaccagtgcgcatgcgccctgggcctgtgcccgccccaggaagagcgctcccgcgaactgcggcggtggtggctgggccaccagagggaagcgggtgtggcccaggcagcgggggctgggacagacctggaaaggaggaagcggggaaggaaggttgtcctgtcgggctgggggctcccgggaatccggaggccagcagtggaaccgcaaggctctacagggcagatctgcctcccgtgctgtctcagctacgccgagtcgttggctcagggcggaggattttcctattggccgcgttatttgaatggaatggaggataggtcgtgaagtaggtgctgctggttgatctttctaaggaactcagatgaacttgggcatgtcagaattaataaccttttaaaagtggggtctgtgtggccgagggttttaatggtaagttcttgaggtgaccacctattgacaagggttgacctgctgtaattgctgtggcttcctgccaacccccactttagaaatgtttttcttcctctctttacttgttttgttttgctttctctcacgcttgggttctcttctttcttccttcagtgctttaagcctgtctcgtactacccatgagcttagctcagcctgattactggtccttaccttttaagggatttctggttacagctccatctctttctaaggaggggtaaagacctagctgcgtctagcatttaaacggaacgttaaggaaggcaattaattcaaccactatttattgaatacctactatgagccagtaactgtactaggcactgaagatacaatgaaaaatatgacatttatttgaaccacctcttgagttcagtcgcccaaacaagactaatttatcatcgtcataaaaaaaagactttaactttgccttgtatgaccacacgcgcacacacataggatttgtaatactgatgtcttatgagccatctatctacaatctccaccaattgattttactgaacactgcattgttaccatccactactattt

SEQ ID NO: 58443 - DNA, 605 bp, Homo sapiens
aataaagaataaatgcctaatcgtcaagggaccctcacgatctcatccattctttattttcagacgtatcgctcaccactcccaaacacatggcaatgttttaactgctctccccaactcttctctcctttcctgttcctgcttgtttggggaggtcttattaatctgtgttatcccatgtaatagagtacagtgccttgcttaagagttcagttaaaaactgtttgaagttttgcttcctgtgaattcaaaacccatggagtgctgccctcttttggctaagatagcacagagtccaaagcaccacataggaaatgatgctgaatgactcatcttttcctttgggttagaatcctcatggaaacaaacaaggcagggtgaaatgattccatcctcttttcccatattatctagcttcaaagattgtttgtttatggagatagaaagaagataaaattctgtatagaaaacttggaactcgactaattcagataatatattatgtgtaaactcagagctggggcaaagccagtagttactttgaacacatccagagctccaagaatcttcaggcctcaacacggacttttatataagaggtaagg

SEQ ID NO: 58444 - DNA, 849 bp, Homo sapiens
actatactttaaaaagaatgtttccatactatttcacaacatatctttcaggcccacactgaacttgctaaatgtcttaatttctatttagggattgtaattatggacaaaaataacagtaaattcttataacacattaacacttggaaaagtttccagactttgtttgtgtggaagctaacatacagtaacttataaatgaaatgtagacatgtatacacacacacacactcacacacacgcacacacacacacacacacacacacacacaggtcatacattcatcgttcaagcgtttgaccattagagggcagtaactattaggaaattttgtacttctcccctttaaagaaacaaccattgatatttttttgaaagaacataaaagttacgttttatctatttcagatgaaaatcctgacatatatatagttttagaatacatataagaaagttgtacatactcataaggaaaatgttctttttttgtattaaaattttacctttgtgtttctatcagaagaatcctagcattgtgtagcttcttccttaaatcttaagttttcctccatctccacctaaaaactgctcttaagcatgtcctaggaaactagacagatttatggacactatcaaataaagcagagcccttgattttggtcttaatagagttttctcaaccaactcaatgtacctattgatttctattcttgttatacaattaaatacatcctgaactattgtcttctttcaagaccagctgattttggtgcttccaaatagaatccacaactcaataaacatatttttattgtcatcattcttggactacagcatgtgacaaaaat

SEQ ID NO: 58445 - DNA, 1117 bp, Homo sapiens
agttttggcggaattattttcagacagtaaatgagcattatgtcttgcattgatttaaatatgcatcttttgggcaaaacaccaataaaatttaagcaaataccaaatagaaatagaaatttaaaattctaagaataaaaaatgccatttcaagacattctcatagatgatagaaggttttgacagttattaccactttcactcaatcactcacaaaaattacatagtgtctattttagaacagatagtcttctgcaatctatattgattattgcatatttcctgccctatgtaatgggtgatatgaacaataagcactataaggcaatgtgataagtgctaggatatatgtaaacataaaatcagatactataatcaatacaagctatgaaaagtgaatatagtttgatgatccacactccacaaatagcctccttatgaatatttccttacagactgaattttgaagtagaaaaatgtaggaaacaacatcaggaacttccaagctttctgtgacttatgtgctaacttttctaccaaattgtattcccaaagaagcaaatcattaacaaggagatgtactttaccctaaagccttctgtgtcaacccagtattttaagcattttaaataattccagagtatgcattgattttgaaaaccctgtgatttttttagagttgattttaatagacgtctagtggtcaattctgaactcagaatggcttcacaatcccactttcccccttatagcttttccctctctcccccacactctccctcttcctccttcttttactctcctcttctttctctcattctgtttctttctttctccattatttgtctttaatagactattcaaagtcccagagtcccagagccttataaaggtcttgctctgcacttctgaaggcacatctaaattactgcaccctcagaacaatttcatgctaatcttataagattttataagatcgtacttcatttttccctgtgtctgaggttattgctattatgatgtacttataaaactctttaagtaacttaccactgccaaaaatagtattacaatattatcatatatccaaaagctgattttaataatcactttgatc

SEQ ID NO: 58446 - DNA, 2975 bp, Homo sapiens
gtgttgaatgttgtttatgtgctagatactgtatattggattttattgacattatttaacctttaaaacaatattataaagtaatattatttctattttatagactagttaattaaagcttagaaaaattataaaacatgtccgatgtcaaatgattagcaagtagtagagctgggcctagaactttgtctaatatcaaaacccatatttataatcacagtaattttttaaataaaaaatctatactttatatatcctgcactctgtacattgttcttatttatgaatagatgtatgtcagtttctatgggctttttctgggaaatagaatgacaaactcattctgacttgaccaggatttccccagttttagcactgaaaatctggcctcctgggtacctgctcagtcctaagcaaacctatgccagttggcccctcaccaggaaagaatacttaacctggaaaaaattctaatggtttccaaattttaatcttaaattcagaaatctgaataaaagcggggggacggaggtgcagaattatgaagaaggcttcatgttttgcactgaggaatatgtgtttctcagggagaaaagcattcattgtcaccttccctggaaattatgcctgagaattaagaaatgaatagcagccttcttaagtgtcgttttgcagctagtacataactgaatacagatttttggaatcaggagtgagagcaaagagcaaaaatgtgtttcttgaattatctgaagagcagcctcgttggttcccccttcgcttgttctagactcatttccttggtgctgtttttaaaagggtgctccatggtgggcctggaaaccgaagcccttcctaatctaggtccagccccatttctacgcataacttctcactgccacttactggagattgcagaagattcgcctttaatatctttccttttcctctgcttggtttatgcccctcccccaggttctctgaagtgactcagatgttctgtaggtctaagtgcaaaactatttttaccacagcgtttgggaatctctgggcacaaactgtctgccgattaggtaaattacaggtgcaggagctcatgttactcatttagctgccacaaattgaaagcactaatctgcctcttctgagttttgcctttcagtcagcgggctcctcctttaccttctattctttatggctactctccgcccttgctgggtgacccttcgtcctgagggctagcctgcgttctgttcactctgtttctctcctctctctcttctctccgttcttctatacccttttctttcttctatttttcatagttgaaagagtataatcatcgtctatccggccctcagttctgctttatcagctgtggctgaaactgctttctttgaatctgactatgtaaccaaattccccagctatcacccacacaaatctcttccctagtctctgacagtcatctatgtctgtttcttccttgagctttttctgactgtcaccatcatcctgttactttccaaaggcttttcaaaaagcttgaactttgttccctagaaatgccaccacaatacctcaggaacttctgttcccaaaccatccttttctcaagcttcctgttcaggagtgactttactgttacacactcttagagaactacattcctttctttcaaagttcctaattcggttattcatttgtgtgacttttaattagtatcttgttccccagtaaactggaaatttaatgagggtataaatacattaagctctgctactagagcgactagtttcaatattttcaccttgattaacacaaatccccaaatttttcagaaacatctttctcaccaaatctaggtttttcagtgaattcactatgattctttccatcagaggccttacaaattgagtaggagaattaatatttgctgagtgcatatttcataccatgggctcaaaatatattatttaatttagtgtgaaaagaaagcctatgatatgtgtaatgtatatgctttttgatctctaataaaactgtggctagaaacacatacttaagaatggctagaacacagattctgtctttccccaaaggtctcttctctttctaccatatatgcaacatttccaaaggctcatagctaaaatccactgatgtgagctagccataatactttccttcccacttcttcccacagaaaagaattgggaggcactcaggcttttttggggggaaaaaatcatttgcaaatgaataagcatgaagtaagaacaacagggtggtaaaccacatgaaaacttcccatcctgtcactaatctagtttcagattttatgatgaatgaagtctagtccccttggagtgattttattaatgataatattattattcccctattatcatttactttttccataattaaaaaaatatttggactatttaaagcttggaggattgcagtttatgtaaaactgatttgaccacttgtcaaggtctgtgtctccaagttctactgagaagtgatataattgcaattacaggcatctcatattttgtaaacagtttgagttccaagagttcactagttagaagtttggcatcagtgcgtattttcccattgacctaatctaataaagggtgattatttcccaagctggcatttccttgttttctcctcccacctcctgccctcaactcccaaaacaaccacaaaaaaggggaaaaatctgtttaaaccagggtaaacactcccactaattttactggtctgaggtctagagcgtgttggaaaaggggattcataatttaataaggaagaattcaataggtgaaagttgactttataccagtaaaagccacccttgcctaagaagttgctcctgatctgcaccccaaagctttatatacttttttaaaaaaataattctctttctacatttctaaactggctctttctccagtggtgac

SEQ ID NO: 58447 - DNA, 2832 bp, Homo sapiens
catccattttgaatgtaaatggcttgactttccatattcaatgagttaataggtttgacttcctcatacaagaggcagagcttagtcacccttgacagagttttcagttctccacctcttcccagtttttcaaggtgtttcattcagatatctgtctcattaactgcctcctggtgactacttccctacgagatagttacattcaacctacttgctctacccactcccacatgtggcatgtgctttgtagataggccacagtgaccacctttcagtcactgcaggactgcatcaaactgcccacttgctcttaaacccaccagttgtaactccccaccggaaatctacctaggaaatggcctgaaccccaataaagtctttggacctcaggtctcttactctatctctcttgctccccacttgacagttgagtgtgtgtcctggactccctccttcctgtcggtcctgaaaaatgtgctgctctcttctctctagggtatatgtgagtaataaaactgcttctattattccatgtgatatagtttggctgtgtccctacccaaatttcatcttgaattgtagctcccacaattcccacatgttgtgggagggacccagtgggaggtaattgaatcttgggggtgggtctttcctgtgctgttctcgtgatagtgaataagtctcacgagatctgatggttttaaaaaggggagtttccctgcacaagctctctctttgcctgctgtcatccatgtaaggcgtgacttgttcctccttgccttccatcataattgtgaggcctcccatccatgtggaactgtgagtccattaaacatctaccctgtataagttacccagtctctggtatgtctttattagcagtgtgaaaacggattaatataccatgtgttttgttgtgctgcctcttctgcatctcacacgaccaacatacccgaacctaacttcttttccagtcagggctctcctacagagtggctatcttggtaggaataaactattcacaggtctggtgagagtcacaagggcatttgccagtgtaaataagtttcctgtgagaagaacaattggacacgggtcagacactttagcaagttaagtattctgacaaaagataaaggtcaggataaaaatgaaattagagaaaaaaaatacaactcaataaatgttagctgttaagtatagctttgtctacccaaaatacttctctaattatcttatttcggtaaaacactgttgtagattgcaaaagcagcccaattttctgttcctctgtgtataaatgccttttacaatgatcaagaggtagagacttttcccccagttgctgactctgggctgggctagtgacttgttttggccaatagaatgtgatagaaattacattttgcctgtctgagcctaactctcagaaggtcttgtggacttttgctctctcttgagattttttcctctattatgagaacaagcccaaactagcctactgagggtaatagaccatggggaaaaaagctgagtcacttcaattggaagtcagccaaccccagaaacagagctgcttagctgatgttcaattgattacaggcacatggggaggcccagccagtcaaacccagaacagcccggctgagctcagcctaattctgtgactttcaggatgagtaacaaaataaatgattcttattttaagtcaaaattttggagagcaatcttcctcttgtcaatgtctatctcagtgctatttcagactcctttcgtactgtcaaatctcactcaacttttagcatctatttcaattggcatctcttccaagaagatttttctaatttcctcaagtgatgtgttatctcccctataattgaaccccattttgatatttgtgtccctttttagctttttttttaacttgttttctattagaggtgttagtgtcctactcatcttgcttttcctacagctagtaagtggacatccaggaggtacaaggatatatcccagacctggccagtcatgctaccatttcccataataatctccttaagaagtgagcaccagacccaagtcattcagatactacctgtaagatataggcactgagggaaagagtctggtttttcttttagatgaagagctataagaatggaatcgagactaggagaggaacatccaaaggagagaaaatgactgcagtgggagagaacaagagctacgatcaaaaagaggagagacaagcagcactgaggaagacagaagggtaagaagaggtaagaattctatcaacactgagatactgagacctggatctgtcctgttttggaagtaattgattctctctctcttttttttttcttctcaagctcaagtgagttgtgttttggttaattgcaaaaagaaaagaatcctaagcttcttgtgaactgaggcaggttaatatgaatgattctccagtgctatatcacctatagatatgttgactacataatgtattatctatattgggacacttctgagagcaaaatggagtgctagtaataattattctgaaaaacctagtgctaaatgagactgtctctttgggtttcccagaaaaaaatcagaaaagctggatcttcaaagctgaggattagatgctggattgttgtgttacaaaaatccaggtctagaccttctatgggtcccttctttgtagcagacagtcagcctctcacccttacaaccctattatctacaaaaatacagctaataaacaaaaactcacaggaagcaaagatttatggaacaggtagcaattaaactctttggaactacgttgtg

SEQ ID NO: 58448 - DNA, 648 bp, Homo sapiens
accttttatagaaaaaaaggtcttttcagatacaattaggttaaggatcttgaaatgaggcgattaccctgcattatctcagtgggccctaagaactcacaagtatccttatagagggaggtgggagatttggcgcagagaagaaggtaataacgttaccatggagatagagattggaatgaggtggccacaaatcaaagaatgctgcagtcaccagaagctgaagggagcaaggaacagattccccaatagcacctctagagggagcacagccctgttgatgccttggtttggagctagtgaaactgatttgggatttttggcttccagggctgtgagataatacatttctgttgtttaaaaaccaccgtgtgtggtaatttgttatagcagccataggaaactaatatacacataacggagttaaaaaatcctgttactgtgaccagtgtgaacctgaacaaaatcactgggagcatttcccttaggctgggataactgatggatatgttacatttatatgtatgtatttatcatcatcatcatcctcatcatcatcatcatcatcatcatcatcatgttcttactttctaccagattataaccctttttttttgtttaccactccatatccaggacttagctcag

SEQ ID NO: 58449 - DNA, 1332 bp, Homo sapiens
ttgctaaaataacagcacaaatagaaggaaaacacaaacaataaatggtaaaaataactatgagaaagactgcaccagtaactaaactgaatagtcaaatacccattaccagcaatctaaatagagatttaggtcagtctgatcccatgtgtgggaatgcttccctcatttagagacttgccgtttagcaccgactgactgtgagtgtgttctggcactgacacactatcagcacaatctcttgtatgctcaaagctcaagttgatctatgaaggaatgagagacctggtgcccattcttgcaggctgaaatcaccaggtgggaatgtagttgttctaacctgtgaactatagttacctgtgctattgagatagcacgatatttccctgttctgctttttaaattaaaagatctcttattgtgagccaactcagaatgaaggggggtagaatactgccttctcagtgttgcaaaatataccagatcatgctgcattgtttgtgctcttctgaaagtgactgggataaaacaacataaatgtacttctcttggcttcttcacaaatgtgagtgaagtgtcacatgatgtcatgccgagaataaaaattttcagcacttagaactgaaatttcagcttgcactcctatttaattataacctaaacagtcccccactcagcttctgagaaaggtaaagcatctgctaacgacttctaggaatagagagattgtgagaatagctttacttgaggtctcttagctggaattaagctggggatctgtgtgccaggcctataggggaactgaagactgagcttctgtctttcccctcttcatgcaagcatctgctcccctctaagggccaagtggctttagagagtgcttgtggaccagggctgttcagttagccgggaatgcaaagtgcctggtgcaaactggaatgatgcagatatggaacaattcaaacacattcaaaccaaactcttcacacatctgcagtggtgaattagagtactgagccatttgaatcagagtaaattccttttcaaaaccttactatctttagaagtggtttttaactttttaaaggtcaaagtctcttatgagtagttaagaaaaacaactgatctctctccaccaaaaatttacttatgcaaacccataaaggctaagaaaacttgatcttttctacattgtacatgaaagtactaatttattaatggctaagatatttatttaccttaaattatgattaataaggctagactgcctgagttagaatctctagttctgccatttagtagctataggagattgggcaagttgcttgatct

SEQ ID NO: 58450 - DNA, 1937 bp, Homo sapiens
aaagagagggagaggtggagccttaaaatctgttttttagtactcatctcagatgattctgatgcaggaagtggttcacaaatgcactctacagatcactgagtttaatacatggtccagaacaaaatgagttaatggccatcatttagtcagagcttacttgtcttacttagatcaccatgtaaaatccttactattatatcaagagattactattatttatactgcacagttaaagaaaaataaaaacaactaaggctcagaaagatgagtcatctggcccaaagctatacacctaacaaatggagaggccagaatccaaaaccagctgtgtttgactccagtgcctgtgctcttgtttattcctctaccctgccacagaaaagggattcaaaataaaataataaagatatggcaaatttagtttttagatactgcaacatggaccattgtgagcttgggtaaacagttataacactgccgaaagcctcatattacattatagtattaccaatgtgtttatagtgataacagtggatcattgaaagatgatcacatcatcatcaactgcctgatagtaaagtgccacattgtcaaaagacttccttcaaaatagctggaacattataaacaaaacaaaaacaagaataaaatattggaacttaaaaatattagaatttaaaagggatgagcttacagtgatctaaaggagttcaattattttttcattctctaatgatgagttttcatgaactcgattgacatttagactgtggaatttgacttatgacgcatccaaagctggaacatggataatgatgcagctgggtcatttaaagttactgttcactaattccacaaaatgtgttgagcactcaagctaacaatatgaattatctatcccaaagccatccacaaccctctaatcgcttgccatcttctactacagaaactgaaaagagaatgcacttctttttccagactctactgcaattttgccaagttgttttaagtgtaaagtcacttgttatggcttccaggaaggcctttgaaatggacaaactgctggcataagccttcaacattttcatctttgcacccttcctctttcccctttcttttgacagatataatgccttgaagtgccttggaggtaaaactcccattttgtgatcacgaagataactgccatgtgctaaggatggtggagtaggaagaaggaaaggacacaggcctaatgtcctcactgagctgttgtactagccctgaactgtccaaacccatgattcttgtctgtgagaaaaaatatatgcttcactatttggttatctatggctttcaaccaaatacaagctagctgccaggagagcaggtgactttaaaggtgcttttctaggtttccgggataatattgatgctatagagacactggaataacctatagtggtcttttgattaagatcgtcatggaagccaatctgggaaaggtctggaaaatgacctttggactgagactggaaatgtcagccatgtaaagatccaaagaaggagcatccagacaggaggacagaaagggcagagatgctaaagtgagggagtaagcctacatgtggaaggtcagacaaaaccagtgttggtggaacactgcaatcaaggcgacaagcgatagtaacagtgatgtcctggtaaataaataacactggctactgacttattactagttttttgaggtgtctaaaaattttaccaaataatgttcagtttaaaaatctaatacaacgacagtgcatgtgtaccaacaacataaaataaatggtaaataatgctttgtacttctatcactgcgatatgaaaggaaactgtcaatttagaagttactaatgagacatgacaatcgatgtgtcctactcatctgaccctcatctctgctttaatct

SEQ ID NO: 58451 - DNA, 3011 bp, Homo sapiens
acattttctaatataaaatcaattacattttatttttcaactcttaccctaagaaaggttgctatgggcaccacagaacatctgttctggcgccaacagattgcgttaaagtcacccacagtctctccaaattaaaaacctcaaactgagttcactggctttgttactgtactctcagcaggatgttcttttgccttgcccatcgttcagtttaatcctctagaaagaaaatttttagaggtacatcggactaaatcattttcttctgagtacaccatttccaaatggccgcccagggtcctaaatccggcggctgcggagagggactagagggtgtcctcctctgcagagccgtaggactcgagcgccttcatcactggacgctggagccaggaaggaaacccacacactcagggacaggtataaccccacaggggtgcaccagtgaggccccgatcgcagcggaggactccatccctgagcttgtgagggcgtcctggggaggaagcgaacactttccccgttcaagtcagagagcaggactcactgggtggcaggtcagaagttgaattttaacccgacctgcgctttgtccccgcgccttccgcagcctgggcgccgcggtggcaccgagctgggagaggacacgagaggctggcgcgggagaagccgagagttgctatcgaccgggagctgccggcggcgggagcagacgcgaccctcgccgctttcgatctcgaagccgcggagagccgatctcggctgctggggctcggctccccgcgctctgccttgccctttcggcagagggcagctccctgcctgctgcagccccgccactgtgcgcccggcagcccaggggtgcgcccagcccgccccccgagtggccgccgggactccagcagttggaccgaccctcgccctccggcgcctggacaaacttccttcctcccgggcccctgcgccaagcaagctgacaggcggctccctcgccggtctcctctgggctctggccgggcgagcttgctctctgcccctctccaaccccgagcccctggcgcctatagccgtccccgcgcagcggctccaacaaagccagaggaccggagacgacccggcgaggggctgggagtggcagcggggaccccagagccagaaggaggcgtcccctcggcggggcgagtacagtgggaaggggcagcgggaacgtagcggggagagaaaggggaagaaagtgttctgttctcggcgcgaacgccttcctggctcgtcctcgttccccttctcctcctgcctgagcgcgtcccatgtcccgttgggaattggcaggcggggaagggaggaggggagaggggacgcggtggcctggcgagcgagccgctcccttacctctgtccagggtgagcggctggaccactgtcaatgtcgccatgtctgccgtgggagccgaagtgacgctcggcttcagcatcagcaaccgctcgtagtgagaaaaaaaggaggagattgggggcgggggtggagagggaagacggaaaggagggggaggagggggaaggaaggaaggtggtggtggtggagaagaaagcttgggtgggttggtagccagatggagacgcaactgttccgcggcggcagatcttcagttgcggtgcggagctgagcaggtatccgagagcgactgcatcgccgggctctgggagggaaggctctgccctagaactttgctattccacccccaggagcgctgggtgggtgtagctggcgggttgcttcctttcaactttccactctaataaaatggtcagaatatacgtgtgtgcatgcgggtgcgtgtgtgtataaggggaagagagaggatggaaaggggatatggggaagggagtgggagatgagttttctcagattaagagaaattgccaatccaataatcccatcccctttagagagaaaatgcttccattatcagaaatgtttgggatgtaattacatttgcagttaatttctgttgaagtttttcggaatgttgacctataacggcatataaagataactgactaaaggccagcgttccatcagtagatgttcatttaggacctgagtatattgcctggagaaaaaaaaaaaaaaaggcaaacctcttaaaagtgcttcaaaataaaaaacgtgtaggtaagtttctatcgctaagtttttctttttcaagccactgttaatacattaccaattcagtaaatgtagcttagaaacaagtacagtgttcagattttctccgaattttttacataccacatcctgtaaacatgccccactccccctcacccacccagcaacaaaaactttgctcttaatgtccaaactgattttggttgtctatgactacgtttgaaaaatatgtacctagcacttttcatgttgatttctaaccagtggttcagagatgccacttatcgattgattaacatatatgccaggaattgagatagaagagttacattgccttgtgccacgccttgatttaggagttcaatttagtctccgacttcctgtagcctgtaatctagtgggagatggtgttattaaaaacctgactttagagtcagttgatcaggattaaattacgagagccttcaaatactggctgtgacctcttcgccccaataaaaaggctactttcactatcttgtcatagtagggattcatttcctgactacgaaatcaagaaacataaagaaaccttctataagctgaataggggtgactgtgggtgcaggattggaaatgacaaagctgcctccatcttgtttcctgtgacagagctgaattgtttgggctaacaataaactctaaaaggcagatactgttttatagcaaaatatttgcatataattgatgccattttcttctgattacagataggatttctgaaggtctttttcattttatagtctacaattgaattttaaaaaacaacatttcaccaatgtgggaaagccaaagatgattggcca

SEQ ID NO: 58452 - DNA, 3226 bp, Homo sapiens
ctttacttacttcctatttttgttttttgtttatttgtttgttttgttttctcattagaaaagccacagaaactccaagcaggcaaattagaagggaggcaatgcaacaagtcctatctgttctctgtctagatcacatgcggagtctggtcagcaggtgaatccgcatcccagtggggtcaccttccctgtgacctgtcaatcaccccaagaagcacttcccaatttgtctggcacaacctccttccactcctcctaccctctcagtggtcaggaaatcccggagcagtccttgccctggagctgcttgtgtttttagtaaccagggactgagctgattttgaaaaatcaatcaatcaataaataacaatcaaagagccttgcctcaacgcaccgagttgctggtttcctgcaggtcagaggcgatgccacctccaccaacgaccttccaaagattaaaccagccgtgtacaaactgctggattgaaaattgagagatgggccgttggcctcctcctaggagtacttgtgtgttgaaatcggaaggacgttctggagtttgagcgcgatttttcccggaaggctgcggggttggaagtgcatgttggggtttggatctcgtgcagcagcgcaactaacctgctgcaacggcgctgtgacacccctgtcccggggcccccactttagcctgttgcttctctggtcgctccaggtcggtttttcccggcgactctagtgtggcttccaaacttctgggctctgggctcacttcggaatttgcccccgccccctactcccttccctcaggccccaggaagttgcaagagtaccatttgtcgcacactcggggaccgcgggtggccggaggagatgaaaccgtcttggctgcagtgtcgtaaagtcaccagcgccggggggctcggagggcccttgcctgggtcctctccggcccggggagccggtgcggccctcagggctttagtggtcccgggcccgcggggcggtctcgggggccggggatgcagggcactgtcctccggcagtggcagcgagtacaagacccacttcgcagcctcggtgaccgaccccgagaggttctggggcaaagctgccgagcagatcagctggtacaagccctggaccaaaacgctggagaacaaacactcgccctctaccaggtggtgagtgacttctgtgccaaccctgatcccccatccctggtaactttttgggcgccaggacctccctgggacctggaatctggcattctatcacgaaagaaaattgaaactggagatgtgttcagacccctcaattcgtgtttcatttcaatttcatagtcagttctcttgccttctgctcttgagagaccctgttacctattgtgaacccagtgtcccataaacgggagatttacctgactggcaaggttctgctttggcagtgggaatagtaagaaaactaaaacaagatcctgcctccagggaccgcacagtctagtaagggagatactaggtaaacaaagcaagcggtacaagaaactagggaattataactaagtatcctcctactatggggagggagggttaagaaaagacttcaataaaatcgcaccccataagggtttggaaggatgggtatgtcttctcgaagtcgacaaggccctaattatcaaagttctagaggtgaacaacagcttgaactgtgactgagacagtgactgccaatgattgtgttggctggagaggtgggaggggaagtggtgagtcaggggctgggtccggaagggatttatgtactgtgctaagtagcttggatcagatccataggcctgttgtgtatatgaagctgcagtatggggtacccagaaagaatacagatagatataggccaggtgatgttagaagtcatggtaggagtaaagtcttccacctggagttggaattataagaagttataagcatgattttttttgcgttacaacaaacgcagacacattgtagaataaatatcaagcttgctaagatactgagggtgaagcacagtcagtgatactcttagagtgtggctccttatgtgtctgccctctgggggtgtgattgctctcatctgccagccattagagaggatgtttcctgtaaaagtttgaaaaacactgctcagcaatgagatgaggggaatgatatggtcaggtttgcagtggacgaatggctctgtggtcagagcaagaaatctggaatggaattggctagagcctgttctgtgtctccaccatgcccagtcctctcaaaagtgtgtggggatgacatggtgttccctttagaatctgagcaccttgccccttcctatcaattattttttcaatagtatttgatcggtcctcttttctgtgccagacagtgaacaagacactgggtgttcaacaatgagtaaaacctagtccctgctttctagaagtcataaagattaaaagcatggactctggggccagactacctggtctgagtttggcttctcacagttactgactgtgtgttcacagtcaagtgacttaatctctctgtgtttcactttcctgaaatgcaaatatggaaataattggaggcttaacttagtaaaggatgaagactatgtctttatacactagaccctatacatgttagaggaagaatagctctctttgtattctcagaccataattatcttaggagcaggaaactctcctagtattcctcagatgaaagcacagagattattgcatcactgtttctcaaagttctgtgtacaaatatctgtcataaaatatggtactataaatgattttatgtggccatctccattataaaactaatgtgcagagaattcagttaagaagccacaggtatattctaaatgaaaaacagtgagggccagacctaaggcagtggcaataagaatggaggagaaaggacagattggagtgattcgagaggacaattagggatcagcaaaggcccaggagagagctttggaagtgagtgtcaatgtcccagcaagtagagcttaagaccaggagatttccttttcaataatttgctttttctttgtaatatctagttgcttgtctacatttttttaaatggtgtgtataagatgtgtttaatgagaaattttgtgaaagggtcactatatttttatagatcacaatttgataacaccgtatctgaattctttatcttttcagtct

SEQ ID NO: 58453 - DNA, 909 bp, Homo sapiens
tattaaattattctagggttcttgggcatcatgtcagtaaatgtttcaaagggaaaaaaaaagtactttatcttgtaatcgcaaattttctgtgagtttgagattgcttcaaaggaaaataaatacaaatataatggggattttatgtatccagaaagcaatttaatccccctattgaactttggctctttggcaaacaaatgctcagctacattaaactgtttgggaaattcagtatttgtcagatatttttaaaattacatttaattctggtttgaaggtgagagtgttatataaagaggaagaatttttctccttttgacaaactctaaattaaatgaatttattcatagcgttgtacacagtaaaggtatatttaaaatataaaatcatcattattttatagatttaaaaatattttaagaaggtatctgcttggcatgaaaaattgcctgttagaaataaggcctctcaaaataacctcatcaagaaagaccagttttaaaagatgggccttattttatattctgaaggtcagcagcttggtactgtgccgtatctaattttctcagcctgtcatgctgctgaaccttcaggacagaacagagtgaactacaggaatgctgcaattacataagcaaggatggattgcctggcaaatggcgcaatcaatgaacaatggaaattcaatcggctgtgactgatcaactactaggtgttgggggaaaatccacactcttatcaccgcctgaaaggtggcttacttttcttttgtcatgccacatatagtattagttgaaaggacaaaaaaaatccagtggttgaagttgtttgcttgttcttcttcttctttttatttttttttattctactttcataagcaacaagctgcaactccatgagggagat

SEQ ID NO: 58454 - DNA, 982 bp, Homo sapiens
gtgcaaattaatatattagaatcacactttgagtatataagacaaagtatttttcatataaggttttctgaaatagataaatacatagctatgaaaaatgatgccactaaattattttaattcatttggaagttttatgctcacatttgtgcactgggtagatatatgtaatacttaagtaaataaatctgaataaatcaatataggttgcattcattagaattattatcaagattagagaccttggagatattgactgttcattttctcatgccaaccttgacttaaaagcatttcatttccattacaaagctgaataatattaactttatcatgtataggttttatgggaaatttgatatattttagaatatttgtcataaattcttggcacataccatgatctatgtttgttttgtttattagttactagtgtatgcactgtatttgtgaatttttcttctctttaaatgtgtacagctcctttggttgagcgatgtagatgttgttaaaactgacccagctattgcaatgatctcatgtctttgtaccattcctgggatatttggcaagttctctatgagaccttcacctatattgattggcttttgagatgtattgatcaaagaaactgtaaaggttaacaggaacattgcccaatcctgggaagtgtggttggtgtagtcagggtagttgtcatgttttatgtactgccggtggaagtgctgggggtgtttgtttaattagaactttgattaaataatcacagcagaattgatctaaacaatgcagcaggattcctgttgacttcttttgcatcttttatatttgtctttctttaagagaaaaaaagcctctaagaaaccaatttggcttttttttttcatgaaatagtgaagcatataaatgcttcataaaggcaaaacatttttacacacttttggtgtttacttaaattatttttattttagtgtattattaa

SEQ ID NO: 58455 - DNA, 658 bp, Homo sapiens
catgctgtttctagccttattttggagataaagaaactgagtaatggagaggtcatagcccaaagtcacggctactaagtggcagaaccaggatttaaactccagtttaatgatttgtaaccaacaagatatatgctatttctttcactataaacacattggatatgtgcaagtctcttctcttttcttcttaatagagattaactgcctgctcccctccaataactagcttactttctcagcttctctctttttctgcaggccctttcctctattgtgatatagatgagggctgtagaaatctcttgttctttctattagacctgctgttttggcagtaactaagcccagtggaatggctttgctttgaatttagagagacacaaattatgaggctcagtggtgtgtcttattaaccaggattgcatttttgtaagaggaggtaaaaacttggctgccacacctaagcctcaggcaaacaatgatggaatcaaaggatattgcatcaatcacccctatgctctcccaataccgccttttaagaattataagaattaggaaagacatatctatagaagtaaatgcatatatgtgaaagtgttttttttcctctgtttctcagatctcctttgcacatacctctgtttcttagcctgaa

SEQ ID NO: 58456 - DNA, 714 bp, Homo sapiens
gttgaagtgaatataaaacttttggactttttataaacatttatgttaaatcatgaacttgaactttttagtcataaatctgatgttcagtgccatataggcctagattttcagtcagatgctcagacttaaatagatttagctactttttgttctcttgatttaatctccttattacagtacatattcttatatttttgctgtgtaggaggcggttcctttggctcccggtcgtgaccttgattgggatgaagagatggcaaaagcccagtcacatgactgtgttcctgttctttcagaacacccactgtatattctttacacatctggcacaacggggttacctaaggtactcactctcttagagataactatctatagcagtagatttactttgcaccaagaatgtttgatcactgactggaaatgtttgcagactttactttgaagtttagagagttacttcatttgcttttatttttttttcctgtgcccagtctggagtgcagtggcgtgatctcacctgacacagttactccatatcttaaagagattttgtgtttagtgctaaatataaaaacatttattatttaacatcaaatattttgctctcatttcttccagaattgtctcaaatgctagaaatatacaattgctttagtagatgtttaattgaatatcagttggtttaataacattatataaaaatatatt

SEQ ID NO: 58457 - DNA, 607 bp, Homo sapiens
ttgttgtgggcttctattctgtttggtctgggtgcctatatttgagatagttcaaagcactacatgataaaagaatccctcatctggatcagatgtccttttaggtatgggagatttagtgattataatatttatcttgttcagtttgatatcataaagggatcatgataatataaaaaggaaaaatgttcagtgtcaaaagagaacagggggaaagaaatcaaaaggaaaagattgaaaagaaagcatgacaagaaagtggtagataaggccttttgtcctgatgggcacttacttcctgccccagaaaaaaaaaagagtgaaagtcaaataaaaaacagcagtgaacttttttgtttgatctgtggtacgctcttgcagttaaagtgctgaactggttgcacccttgccccttagctcacagttgttcagatcgacaaaaaaattatacaactgccaaaatatcctccatggacatagcttcagaatcatctgaaaacctgtatcaagatatttcatgtttgatgaaatatcccgaatagaaactttttatgccttctaagaagattcaagattcactaagttctacaagtgtcaagggtttctc

SEQ ID NO: 58458 - DNA, 1347 bp, Homo sapiens
ctgtgatttgctacttattttttttaggcccctgatctttatcatgggagcctaaaatcatgttagaagtatgcattaactagtcagcaaacatttcccaagcacagaatgtcagggactggactgttggtcctgctgatacaaatgactctcaggcacacagactgatttcagctgcaggctaggagaatgttttttgttaactacatgcactttttttttgagacttgcactaaatctttttaaaaaggttatataacatttttaatgggaaatgttcctagtatttattgctatgtaaaaaaaaaaaaaaaaattactccagaacctggcagcttaaaacaacaaccatatctcatgattttgtggatcataggcagaaatcagccagggattctggtgctccaagtctccaagtattgttgactaaaacaacccggacagtattcagtgatgaatttgttacctgaaagagctcctgatccagaccgcaagaaggggttcttggacctcacacaagattgaattcagggcaagtccatagagtaaagtgaaagcaagtttattaggaaagtaaaggaaaaaaagagtgctactccataggaagagcagcccgaacggctactggttggctatttttatggttatttttaattatatgctagacaaggggtggatgttttatgagttttccagaaaaggggtgagcacttcccagaagtgcgggtccctcccctttttagaccatatagggtaacttcctgacattgccatggcatttgtaaactcatggcactggtgagagtgtcttttagcatgctaatgcattataattagcatataatgagcagtgaggatgaccagaggtcaatttcatgaccatctttgttttggtgagttttggccagctgctttacctcttgctgttttatcagcaaggtctttgtgacctgtatcttgtgccaacttcctgtctcatcctgtgactaagaatgcctaaccactttggaaagcagcccagtaggtctcagtattattttactcagcccctattcaagatggagttgctctggtttgaatgcctctgacatattttccccttcccttttataagagaaacctaatcctaagggtcgtagacagattaaaatccatcttctgtaacttcttcaggctgaatggggtgatgatattcctgcctattagggtctctcgtattcaggttagagaggagcttcgtcagaaagcatcagtatgttgaggaccactcataactcttggattccatcaaaaggtgatatctgaaagatttaaacgtgttcaatttaagaggacattgagaaagct

SEQ ID NO: 58459 - DNA, 1988 bp, Homo sapiens
gtattatattttgctttaaaaaattatttcaagcaacaaatttaagctgatggattgcatagtaagttggccctttgcaaaaagaccaggctaacagtcatgcggaaatccaagtaagaatctcaaagaaaaactgaccagttcagactgttgcacaacttgagtttacagctgtattcacaaatcaaaacaaattccttagttcatctaaaacacttaatctgagccttcaataaatgcttaaaaaataggaaagaaaatgccacatctagtatcttggacaaactacatgttttcgaaaatgtttcaacacgaaagaaaaagacagtgtatggttgtctgaaaagctagcaattatcggaagactgaatttaacatttatatattccaagtgggatctaagagaccttacagacagcaatacaaaatgacaaacacaaattaaagcgaaggctggagggcctcgggtatttgtaataaggaagaattcggagcagtgtttctggccctgtcctcctctctatcctttaccttaccacatgcgcaagagttcacagggtcatagactctctctgctcagtttctcaggaaaaatataggaaaaaagttctgatgaaatacagggttacgtcagaaaagacgtttaaataatagcaacactgctccgtcttcctatctagagctctgcgaagctcacagctttagcgggctcaggaatgaattcccttgccccaagtaggaccgggtctggttcctaaatccttcttccaagcttcagcgaatcttatatcctaaaacttagcaagcctgaggatttgcaaatggttgccttcttacataccctcgcgaacgctccccacgaaggcttgcgggtggttaggccgccatgtcttctgtctcacattcttattcctgtacccgacagtggaaaccccttcaccacgcgcctcaataccaccaggccgccacttcgcggaccgcctcaccggcgccattgcagccgactaactgcgtcatcagaagaccacgacggacgcccacaaaatacgtcaccaagccgaagcaatcaatcgctcagaaggaatccggctcggagctctactgagcctgcctgtgctaatttgggccgagctggcgcctcacggccatgtttgcgccacctacagcctcggagggtgagcgtcatggcggcttcttgccctctcccggtgaccccggacctgcccacgctgcgtgccaagttgcagggactgctgcagttcctgagggatgccctgtccatttccaatgcacataccgtggatttctacacagaatccgtgtgggaggagctggtcgacttgccaccggagacagtgctggctgcgctgaggaagtcagcgtcggagacggaggccctgccctcagagacgcgccccctagtggaagcagagtgggaagcaggtgggtggtggggtaggcggggcgggaagggaggcggaggagaaggtcccggcagacgaagcgagccccctggtggaagccagcagaaccaggtgcgtggcggcggaggcggggcggcccgctgggaaaccgaggaggggtcggattagttgaggggtggggtggggatgttctttggaatcaggatcactctttctttgggtgcttgtgtatgtccacaatttaaagaaagcaggaaacagggcaggggagttccttcatctagtaattccataataattgacgctagggaaactaggggagcagtgctctcacaggttttataaatgccagcatgtggtggaagattactcaacagttaataaagataatttcaagtggtggtaatgaagtagaaaataaaaacagtgtaatgtggtagggattgtgtaaggaggctgcctcaatttaggaggtcaggaacatgagaaggcactagctgcagagccacagggaggggttgcaggcggtgggaaccgcaggctaggcttggctctagccaggtg

SEQ ID NO: 58460 - DNA, 793 bp, Homo sapiens
tcctgaaaattggtaaaggaaataatcaagcttttaattttttcttttttatgcaaactgtatgtcaggataacaaatagttaatgtgaaaaaaaatctttgtagtagaactacaaagtagttaataagtagataatttaaaagacatagtaaaattaggaaagtcattattttgcaatccttagtgatctgatcaaagatcatcagtggcttctaaaaccactgagtaaaatgttgatggggaactttataatagatagattgggctgacattccttgaacctactacttaagcttctcctgagtaaaagtggaacaactggacctgatgcctcttctgatgtgatgcaataggaattacatagtacctacatgaaatattattgcaaaaaaaagtttttaaaatgtgaatttaattaaacctagtgatctaactaccagttttatagcaagtatttagagaaccacacattaaacaacaatacaaaatgaaacaccacactgaactattccaaatttgttttctcttacttcatgtaaaaaaaatttagtttgaactaccatgtgaacagttattctcaaagattacaaacacagtgtcactaaagttcaaaatgatctccggaagggtatctgatgttcattcattcacttattccacaaagatttattggccatctactgtaagtccagcactgcatttagtgctatagattcagaaatgcacattagagtctctgttctggattttgtcatagttccctcaaaaactggggcttcattcttttagatg

SEQ ID NO: 58461 - DNA, 1437 bp, Homo sapiens
ggaaatccagatatgtaggaaagggcatatcctggtaacaagacagagaactgttttggggcaatgatggtagggactagataaagtgcaggaatacattatttatcataaagggatcaccatcccattcacaaggcttccttctgaaccaggaactagcaaaaagcggactgtagaaaaagagtgaaaatagtttagtattcaagtaatcaatagtcaccctcaagtacagaaatgccaaagctgaccaaagtcaaagttaaatgctattttccatgaaacttgctgtgaaaatgatttagaaaattgtgcaaattatagtttgtacccctcatttatctgcactgctatttatataccattctaagaccaaattatattccctcttacatcaactcattgatgtttagactctcaaataagggctggcttcaaaaaccgcaaaatttagctttgattgtaaaagagctgagctgtcacagaatgctctgggtatgatgcattcctgaaattccctttgatttatttgctcttactttatcccagtgactgaatattctcttcctactggagatacaaatgaagtagatatgatttttcttttacataagtaactataactattattctctaccagtagcatcaatctcaaaataattgtatctgggtaattgagaattggcaaagaataaaggaaataggaagctttcaaaagaaaaatagatttaaaaatcccagaatgtttctggttctctattttcactttggatccaatacagaaataagatccagaatcctataaatgttagaacccatgggctctgaccttaaatcctttgacctatttcaaaaataaatttatactcaatttcataaaggatcagactgagcttgtttaataaaaatctctggaaaactaaacatgaactggccttgggaaagtcaagcctctctaggacttcaccacacttcacgcaaggtattttattgacatacacacctgtgtttacttctctttccatgctctttcccccatatactttttttccaagccagatctttgtgccagcttgccagaaaggaggtttgtgttagaggacaaaaaacaaaagttgcttacagacaacctggtttctggcctgtggttttctggggaaaatatattgaagaaagagagaagtggagagtgcttttagtatacatagagaaggaaagagagtaaagagggacagagaaagtaagagccagtgtcagagatgactgcagttaacaagacctgaaaggggaagggctacagagcagacttggagaagctgttccttgggcctgtgacacaaagcatcagcaaactcatcaatgctcaaacttagcattggagccacagaatcacagagctgcctgcctccacatgtccgtgtgagcctgcatggtgatgtc

SEQ ID NO: 58462 - DNA, 542 bp, Homo sapiens
acatttctgtgctttgtcatcaatgactgatggcagacttcttttatcagctcatagcatacttctttcacctgttcttatcctggaactatactttgagtagcactgtttagcaacttgttactcctgtagcagatcaacattattttgactgcaaggttttgttctgcacttttaatcaccaaggcttctttttacattttaggaacctagaccaaattatcaataggcccaagcaagaaatgcctttctcagacaccttttcacactaaggcttacctcatttcctgacctcaatctgacctttctctgtatgactgacagtgggaacagtagggaattatcaaggaaaccccacccatcagggtgcggtcctatgactcatcagaacaaagtagtccactgtgcctgcagtgaagttattcaatcttagataatgccacacatggagcatcaggttcctctcgtcaggcttcctccagggagcttcatgcctaccagtgtttccaacattcttgatgatcttcttttcagatttcctg

SEQ ID NO: 58463 - DNA, 2760 bp, Homo sapiens
ggatggcataacaggtataatattaataaatattcatcattttatctgtgtgtatccaatacagatttctcagatttccttgtgaaatcagggaaatatgtagctttgttctacagaagcccagaccacggtattttctttccaggccactgctagacacccagggggctcaatttcttgccacagtttcggagagcttgctggttaggtgctgctcttggttggaaccagtcggcccgcatgcaaaacagacctgtcttccacaccttgtggttactatgcagcagggggcgctgcagtagtgtacatcgcggtgcaccggagctactctcctggccagaaagccaacaagccgggaggaggcgtgtcaggcagccctgggtcctctttggtcttgcaactttagtacccagagcttgttctacacagaccattctacaccatatttcaccatgttggatgctttccatccagtcctgcctccgagcggaaaggaaagggcattagcttactgccttactaggtttaagtataatgctgtaccggcttgcactagaggtttctctcctgtgttctcagggtcaacccgacagtccctctgaaaccacgaaggggtccccgggcagttgctgcggggtgtgtgtgtgtctttctttccctttttggggtcctttctttttaaccttactgaaggaggaaacgtttctctccctacacgtctttccactgacattgtggccaaccgtaggctaagagctgaaatctctccttcctaagttgcctccaagctctccaatactacctcctcccccccatttagtctcacacacagtgtgcgtgagagatcgccagtgagtttgtgacaaccgaagctgcagcagtcgccaaacctgttcttcctctcccggtctcagaagtctctccagctgaccggacttacgcctggcagctcttggcacacacagcgctgtggctgagattcagccgtgccaggcgctgccaggcagcagcggggcgaccgaccacctcctcctcgacctcctttctcccagcttcccctcccagggtgcactgtatctactcctttgggctgtcttccagccgtcgcccttgggtcccgggggctttccagagtgaaatcgaaggtgaaagaaacaagaggacgggaggctggtaggaggagcctccaggccggggagggtgggaggagcctccagcccgaggggcagggtaggaggagccttccgggaggatctgggtggagaaaggggctgggccaagccgggatggagggttggtcacgcaggcgcggggggccgcgtcgagaaccccacgcgggagcttctggagtctccagccaccgcttctcacttcactggagaagggagctggggctggggctggggctggggctgggagggagctaataaacattgaatgtgcagcagctgccttggcggccggagtccgcccgagcgacaccggagcagtgcgcccgggaggcggcgaggggaggcggttcgccttgtccctcccacccgcgcctctttctctctcttcctccagctggtcccagagcccggcttggtccggtccctctgcccccatcccgcacccttccacctcctccgagtcccactcctcacctaggacgccccaaactgccatgggttagggtggggatcgcgacccgcgcgaaagaccagccctgcgcttccgccgggggacgcggagcccaaacgccgctcaccgcttgcgggcgccgggcatggggagtgtggtgtgagcccgcacccggggaggacgcaggagctgcggagacgggcgcgaggaggaggagaggagtcgtggattggaaggacccgagggagggagggtggggaagcgagggaaaagtgaagctgggaggagaaggcggcggaaggtggagattgatgcttctgttttttgttgccgctgctgccctcgcgctgggagccgagccggagggaaggcggtggagagatgattgcagagttggtgagcagcgctctggggctcgccttgtatctcaacaccctgagtgcggatttctgctatgatgacaggtaaggggccgagaggagggggcgacgggctgcagggggcacactccgcagtggctctgaagcttccctctttaaggctcaaagtgcgtcttggaggaactggttcagcacctgatggtttaggcgacacgtaaacattaacacctaaatcaaacaccggggacgtgaggcgcgctgggcgggccgagggagtttccgctcctagtttgcagcaggttctctcccttgcttctcggctgttggcagacgcttgagtttcttagcggaaatcccggcaatttgggaaactgtttaatgaacgtattaaattaaagtcttaggtattccttgatgcaacaaagcacattaagtgattttacgtctggttgggaggaagcctctcctcgatccctgatagatcctccctgtcccgtttccttttattgatgggacacttttatttcccgaagttaaaacacacgtttgatagttgccaaaattgtgaaaagggagatcgttctctgctttaactttcccttttaacgtgtatagacttttactttgagccaaaataatgctgctgatggtctctcccgccgccctagcctccttcaccaatccattgggcagcactttataaaagcctcggctttctcatttctgtttgggagttgtacattagatgttagtggtt

SEQ ID NO: 58464 - DNA, 1875 bp, Homo sapiens
aacatatgtgggaggcaagggggaggtcatagtgaataccactggccatcttatcatctgaaggtctgggcaccacttgttctctgattagactgtgggatgtggctgatttgtatggctatatggtgacatgaaatagccttgtcctgattacagagccagctggaggaaaaacaaatcctctatgtgttgaatcagcattatccccattggtttttgggacccttccatgatacgtagatatagccttgccatgaatcagataaaatctgtcaatcctgtctctttctgtttacatttttatcttttttgtaaatgatttacccatctacttacctttcaaggtagtaaatcccaagttaaacctgaattacttcacaggcatgatagcactcctatgctaaagtgaagtatatctctcttgcccctctagcatcattcaggataaaccctagagtaagagaataataatacagagagatgaagatgaatttataggtttttggtggcataaataatgaccatctgtgaataggatttatcagacctggaaaacttcaataagatcatattggacatgggtactcaggatggctgtaccaggaggagtggtttcccttcaactatctgctttatgtgctagcctgttgataggaagcaagtttgttgagaactagtctggagccccaaaaaagttatcagttttccttttgatgcaacctttaaaaaagaattgttttcttctttgaaggagggcctgatggtagataacttgaggagttggagaatatttccagtcagactgatggatgcacctcaacatcaggatacatactttgagaagttacttcctattttactagaagaaattgtgatcaaaagctgggattgttttcagaaaaaccttatcctggctttaggtcagaggcctttgaaccatgactcaggtatctgattgagttgttactcaacaaagaaatatcagagacagaaagcactatatttgagcactccaggccagacctaagcatattaaaacaaacaagtcagtgactgtggaagaatgtgtaagtgtcctcaggtaggctttttgctgagtaaaaagctggagggtagttctagctaattttaaaaattatttcccagaatgctaggagaaaatgtctttacaacctgaaacattatggaatctggaaatgagtttaattttttttggataagtttcaggcttaagcttttccaagagaattgctctgtctaagtgaaattagagtattgctcctcctccccgccacaacttcttttattttttaaagctgatcaaggaaggagagaaggcagaaattgaaagatgtaagagagtaaaatgaaaaaaaaaatgcctagaagcgttcctgaaaatgacactggccaaggctcaaactcactagtgccaatgagaatatatcaaaacagatacaaatttcaatgatatttttataagccttcagatagcctaggagagatactggaggaatgccaccttgatcagttgtcatggccccaggtggtgaagcagtgtggtgacaaggaggaatctgtggtctcagatagcaggattagttctttgaaaaacataagagacacctcctggtttagattttgccttttctttccttccatgcttacatttctctcatatatatttttccttcattcttttttatttttgcttaggttctggaacttatccatatttaggtaatggtatcatttaatcatttaattggaatttccttaatggataatagcagcattcagtaggtagaaactgccacacgtatatgctcagacttggaaagagttcagaaagtgcagacactgattgcagtgaat

SEQ ID NO: 58465 - DNA, 1957 bp, Homo sapiens
tcttatattgttttttcttttaagtagtacaacttttttagttcagtagtataagatctctattaatttggaataaaggataaatggaagaaaaaaatatgaaaacaagatagactttcatctcacaaatttagttattaagctgatatttttaaattaaattgctaatatattaaattacacaaaaacgaagaatttaatatgtctcatatttgtgttgttttgtatcagagccagacacacaatttgaatgacccagtgcaaaatgaaaatgtgaaaccccttgttaacaattattaagaatttcaaaacagcaacagcagagccataaaccatgatgaccttttaactgtggggactgtttaactgcacagatcatatgcccacaaaatctgtcctgccctgggagcagactacaattttaaatggagaggatttcaattttgatatattgccatgtgctggtgatgatttcttatgttagataagtacctgcatatacaataaaccctttagattctaaatttgtggcagtttcccatttcatttatttattaaatgagaagataataaatttaatattgtaataaaagatacgtttggagaataaataacttataaacttatatttaaaagatatccacaatttttaaaagttgaaatatttttggaatgtatacatacagaatttatgcttctttaccctgcaacaataaaatacaacattccaactcaaaaaaatatataaaaggatggcatagggagcaagaaagtgttttctgaaattaagatgtttatcagttctcgatccatgaataacataatcaatgactaaccataaaaaataagaaaaacttcagacagtttgtataagtcaacaggagaaactcaaaaaacgtggggaaagaaatatgctgggctgtgttttatcagcacaagagcaatgagtcatttaggggatgctggaatctcttgagtaagatccacttgacaaagcatttatgccatctgatgtcactgtgactcatgacgaaactattatttttgaaaactggcttgttttctttagcatgaatcactaacttgagtttttaaaaatatgttcatcttctagccacagtagaaacaaaattaattttgaggaaggtgagaatcgagtagccagggtgcttatagtctcaagtcaggtaccaggaaggaaaagctctactgagttcacacataaaaggtagctgccgattgtagacaattttgcctcctctggctccattctctaacagagtctatatttttccaccacccaatacctatcgatttataacattaagccagaaaacaaaaagccatccttcccctataagacgagtaataagcattgataaaatcatttcatggatagaaattttgttaaaagtttagcattgtgacattttagtccatctgcaattttctactatttattctgaaactgtctgtagacccagttttgattctatttaatcgttatggaattgttccactcaaatacataaggctgcacacacatacacacacacacacacaccatgctatttatacaattacattaagggattccacttatgttgaaaataacagtgttactgttaacttgtgtcttcttatgtataacagatggtttacatgttgttttttaaagagtagatttgatataaaggtagctatgagactgtacaactccctctgtgagtactgttgattttgatgaattggttcttttttctcccaaatgacaatatgttcaaacagctgttgaacattcaaccaacaactattagggtgaccctaccctctgaggatgtatcatcttattctgaaaatattcattcatctttttgggttctcacatcataatgaatgcatctgttataaattaatattataaaattaatatttgtggaattataagggcttctac

SEQ ID NO: 58466 - DNA, 783 bp, Homo sapiens
tattatctttaaagcaaaattaggaatgtttttgttctcaagatattggggtatcaggactttcctgggactgggtctgtttagtaaacattattgctcagttcccttaaccataaacatctagaggctgggaatgcctagtctcctgggaacccagcccagcaaatcccagccttatattttctagccctcattcaagatggagtatctctagttggaatgcctctgacaaaaggccaaaggttaagattatgggagaagcctcaattctactaagatgtaggcatagttaaacaataaccagctattgttccctagcttgcttttctattattgcccaagactcatgtagccgtgggtacaagattaatcgtttccttaattgcttctatagataacatcactattttcaaaacctaagactgatctttgagatatttttcaggctttttcatttgggtaaatgaactgactccagccagacttgtgactcataccaaggaactcactcaactggtcctgtgacctcacccagaaactgactcagcacatgaagacagtttggatattcctataatttcatctccaaccaatcagcagcacctgtcatctagccccctgccctccaaattatccttaaaaaccctagcctccaagctctcagagaggcagaattgaaaaaaatctcccatccttccactccccttgaaataattaaactccttctcttatatgaaacactgtctcaatgaattggctttatttgtgcagggagcaataaaa

SEQ ID NO: 58467 - DNA, 614 bp, Homo sapiens
aaggacaatgaatgataacatatatgagaaaaatcatgttctcagaatatacggtgctgccacctgaaaaaatacagaagtgctattttcttttaaaaagtacatgtctaagacagctagctctttcacagaataacagagatcagtaatacaatttacgttttcacttttattctacttgcatatctctaaaagaatgaaaactaatttcagtattttcaaaaagtgtatgtgtgtgtgtttatgttcacacacacacaaaaatgcaccgagtaacagtcaattgacgaagtcaagttcaaagtccctaaggtcagagcaggaacaagctgcagtgataggagcagaggtgagagactggtctcaaacattcagcctttctcacaaaggaactaacacaaccaacaactgcagtgatgaaagtaaataaagatcacaactcaaagacttgaaaagaagaatttttaggcattttatttcaccattgagttaaataaaacccttattttttttctaattttttggagtcattatttgaatctttaaaaacaagaaagcagacacttcctttttgcaggttaattggagactgcaaggcacacagaaagatgaag

SEQ ID NO: 58468 - DNA, 753 bp, Homo sapiens
tcacagtgtattatagtagccccctcttatccatgggggatagattcctagatctccagtgactgcctgaaacttcagacagtactgaacaccatttacactatatttttcctttttaaatcaaaaacgttcaccttttcacttaaaggaagcactttatatctactctttggcatatccaagctgccagcttcactactcttatgctttatggccattaagttaaataagggttccttgaacacaaacgctgtaatactgccacagtcaataagataactgagatggctaccaagggactcacaggcaggtaacgcagataacatgaatacagtggacaatgggatgatttatatcctgggtgggatggagtggaacagcacgagatttcatcatgctactctcagaacaacacacaatttaaaacttataaattatttctgtaatttttcatttaatatctttggactgtggatgaccttgggtagccgaaactgcagaaagtgaaactgaaaataaagagggactagtatatacagtgttatataaaaggagaatagaaacacctctactcctactcacacctcactctctaatactcacaatgtatgagtagaaaaacacatgtggaggacagggaaaacagaactttgaaactgtagatcacaggatgaagaggactggataaacatttagctaatcttgtttgtatatgtgaatactttaaagttagaaaaataatagaacattgtg

SEQ ID NO: 58469 - DNA, 1313 bp, Homo sapiens
agttataatgagaaagacattataacaagagtagattcagaaaacagtataaccggataaagaggtatagaaaccagattaaaggagttaaagaaggctataaataaggagaatgactcaggagtatgatttaagcatgcaagagagaaagggccaaccattgtaagaatgtggaggttgaagtatgataatttttagaaagtcacaggtttggtataaaagcactggaatgatctttgggcacaggtagttactacatggttttaactaaaaaggtgaaggagtttgagagtattctcaatagtagctggtgacataaattagtactaagtggaagtgagagagagaagataagaaatcaaagaaattaaccttgtaaggggggaaaataaaagatagaagaaaattgattttaaaaagtgggacattttaacttaaattttaaattaaagtttcagagttagagcagaaggaaataactttttttaaaatttaagaccattttaaaagaaaagtaatcagaactttgaaaagagacatagtgggttatccttcaaaaaccaaagaaaatgcctcatttacaaaaaatatttcaggaaacagagtaaaatgctagaagacttctagttagtattttcaatagttgtatctaaaaatatagagaagattatcatcaagggaaaaccagctgaaatctcaaaaagatttttcagaatttaaaaacttaactgacaaattataagccacagtgaaaatagtagagtaaatattgtaaaaatcgtaccagtaacattaagagagaaaaatcaagaagtactcctaggccggaagtcaaggcacattcctataattccagcacttgcaaggtcgaggcgggaagattgcctgagcccaggagtttgagactagcctggcaaacatacagaggccgttttttatacaaaacatttaaaaattagccaggcatagtggtgcacagttttagtcccagctgcttggaaggctgtggtgacccgtgattgcaccactgcattccagcctgggtgacagggcaagaccctgtctttaaaaaagaaaaagaaaagtactcctagaattcaaagtgaattaacttaaaaaaaaaacttcttaaattgaagaacttcatattaaagttaaatgggagaagagagttacaatgtgtaaaatcattatgcagcatatgccttcttcaaatgaacaacaaaaagagagcacaaggtatgaaatggcaatttacagatggctaacaaaaagctaacaagtatatgtatagataatcaacttttgcacag

SEQ ID NO: 58470 - DNA, 873 bp, Homo sapiens
aaactcagagacaaataaatgttcttacagaaatagctctcaggagttgtccatcaccatactatctaaatttaaccaaggaaataatatgtcaatcaaaggaatagaatagtaaacatctggccagcactggaagtacaaaaaaaaatgaaataattctggaaacatgttttgccctgttaagccccatctaaagaacattagacaataaactttatttaagtacttatgatcccattagccagctaatacctctgtggacttagctaagctctgtggaactagctgaactccttccaaccacaaaatacacatacttctcatgctcacatggaagattcaacaagagagaccacattttggaacataaaacatagcttaacaaatttgaaagcacagaaaccatacatttttattaaattctgtttctgattcaactagctaaactaagttctgtggtttgtaactagaccactataagaaactctgcttacctacaacttctaaccagtatttggctttatacgcggtctctgtttaaacagagaatatgcttgtcaataagcattgaaaggttcatgtaccagttataaattaacagtattttctattaggacaaaggtcaccctacaacaattccccacagcaatgtggcatagttacaaagaggccagcttgatttagcaaaacaaacttgagtttgtatccagactctgggttttatccttgatttgtccttcttagttgtactgccttaggaaagttacaaagactctctaaatctctactcacctataaatacaataaaaacattcattgcctctggaagacattattacttgcctacacatcagtcagttcctcttattcttg

SEQ ID NO: 58471 - DNA, 1291 bp, Homo sapiens
attttcttctcccccactgccagaaaccaagtttaggcctgtataagtcatctcttgctgtgtaacaaaccaaaaaatatctttattatacaatgattaagtatttactttgaccattgaccattcaccagtgagttagttggggttcagctgatttagaccggctttttagctggatagcagtaatccgaaggtcccatctgggtctgcttcattgatctcttactctctttgagaatgttgtgttttcttgtttgtttgttttctctcatgtaaacagcagagatgcaaaagggcaaacaaatatatgatttaccaaagcaaatcacatgactgggcccaaagccaagaggtgaggtgcatttttactggagggcactgcaaggtcaactatcaaaaggcagatctggagagggataatagtgatagttgtacaacagtgtgaatatacttaatgccattgacctgtacacctaaaaatggtcaaaatgttaactttcatgatgtatattttactacataccaaaaaataagtcaacattgacagtaagcaggaaattccatcctttgcagctatttaaactaaggacaaaacctttcttagatgccaacatcagtgtatgagcaggtacctagtttcacaaaatagctttgcaagggtggaggaaaagtacctacatataaaagcaagaagccagtaaattagatcatggagaatcttgaacctgtgaaagaaaatgaaataaaattttactaaatagcagttggagaggtcatgagaggaaagataaaccacaaaatgtttccatagacttgaataaacaactgaagtcactgttcatcatctttcaacatctctcagttgggggtaacctcatcaactaaccagtaagaacagttttgcaatttaggatttttgccaagcccatgaactgcctctgaaaacacttttgtggaaatcccctatgaaaaacatctcctacacttgccttagaagtcctaagaggttgagactggatccaaatatcactgcctggaggacccagctgggaaaccagaaaagaatcatgctggccgggcacgctggctcacgcttataatcccagcactttgggaggccaaggtgggtggatcacgaggtcaggagatcgagaccatcctggctaacatggtgaaaccccgtctctactaaaaaaatacaaaaaaaaaaaaattatccgggcgtggtggcggggacctgtagtcccagctgctcgagaggctgaggcaggagaatggcgtgaacccggga

SEQ ID NO: 58472 - DNA, 1904 bp, Homo sapiens
ttctttgtgggtacatagtagatgcgtatgtttatggggtagatgagatattttggtataaccatgcaatgcataataatcacaacctggaaaatttgatattcatcccctcaaacatttttccttgtgttaaaaacaatctcattgtacttgtttagttattttaaaaaaatgtagaattaaattattaaatatagtcacatctttgtgctatgaaatactaggtcttatttattctattttatttttgtacttattaaccatccacacctcccccacctcccctgtactccccttccctgcctctggtaatcatccttctactctcactcttcatgaattcaactgttttctatactcatagagataccaccttaatggtcctggataagatccagaagaattctttggatgaccagacagtgacacttgttattttatcttactttctcccaaacaaacagagtctctctctctgtgtgctaagccacctggaactgaggatgtggtgatgcaagcacccctgaggctgccacgactggcactgtgctaggtcagacctgaagctagcacaacagtaagccttgtccaaggcccttcccttcagggcggcaagctcccccagaccctgggagtgtccagagatgctgtctgggacccagagactgcagtaaaaaacatgaacaatttacctgatgttctattctagtgtggctaacctggcactcaaaccacaatacaaagtcctttctgctcttccctccacttcctataggcagaaaagcctcttcctgtggcccccaccacctccagtccacagtgaattctaccagaccaccaccaacgttcacataaagcccgcggactcttccatcagattttggtgaatgctgccaaaactgggactgacccttcagggcattgggctgctatttggcccagggaaggtctggaaatttacctaagagaccgggcctggactcagggaccccaaaagcctgctaatttctctaccctactgtggtcaagctggtaccaaaggtgcaagaaaaagtcccctttacttttccttccacttttctccaacagaaagagtctttgaccatacccagcacaactgggattgtgctgggtcaccctaaacccagcagatgtaagagcccaaggcccacagtgtactccctgggaattgctgctggtttttcagggccaaagcgctcttcagtcagcaggtgatgactcctgttagaactggttccttcccttcaaggcagtgggccaggatgtatgtagaaatgtgtagtctggaagctagggcctcaccaatctgcctggtgccctatactactgtggctgagctgacatccaagatgtaagacaaagttctctttactctttgctctcctctttttaagcagtgggaaggagtcactttcatttctgtgagctgcactgccttgggttgtgggagggatggcacaagcactcccttagctatccccagctggtaacttcctaggtcacatgccaccctagtcaactggctctgagcccagcccaacactaggagttgcctaggaattgcaggttttgtgtcctacactggctttcaagtttactttggaccccagagctctttagcccatagtggcaaggcttgccaagaaatcaagttctgactgctgggactggcaattcctctctgactagagctcgtgttactgcttcctccatgtgtggatgctgactgagcccaggacagcattattctcctctgtgaccagggaagcactgagttcaatataaagacccccagaagctgggccctgcctccccaaaatgcacagattctctttctgtgctgcacagctgctgccagggtatgggggaggggtggcatcagt

SEQ ID NO: 58473 - DNA, 1843 bp, Homo sapiens
gcagcctctccagttcacatgctctctaacagaactcagtcttgatgagtgtttgcagaaaattgtcttcattgtcaaccacactccacaaaatgatggctaatttgacttttacagatttaaaaatttggaaagcatttgagattgcctgccaactccacagaactcttttcattaatcagtaaataaagttttatttaattttttcacaaagagaactttgtggtcatgaacgcctgctgtctgctccattaaaaataaagaagtcttctaaagagactctctcaaacatattcaaatacaggacttgggaagatatttcattctaatttaggagtacataattaatgtatttctttgcagctagcgtttaatgtcattgcttttatggcttatgatgtagtttgtttctttttatttaacagaaaggtcaatgtgactaataattagaactatgactgagagaagaagactgtaattagactatttttcagtgaataataaagtgtcagaaaaaaagaaagtgaaacctttgtgtcagcaaaactggtttacataaggacaggaaaagtgattcttttatatagatgcacacttacgtgaccttcccataatctaacttattgataatttaataattataaatatacataaagagcatggtctagatattcaaaataaagcaatggttctcaaccaagagtgattttgcccataagagatttggccatttctggaaacatttttgcttgttatgactggaggagtgccactaacttttagagggtaaagtccaggaaagctgccaaacatcttacaatacccaggcagtgcctcacaacaaagaattatccagttgcaatgtcaatagtgccgattttgagaaactcaaaagttataaaaccttttgattttgaaattaatgagtaagctttgaagtagtccagagtaattggagctctgtgctgaaatgtctatctattgacattatattgtgagatgcattttgtaaccattgtagattaaatgggaaaaaaaatgaagggtgctatactacttataactgagcattctgagacagtactgagattcagtacacttagatctcatgtaaatgcctattggggctattcatttattgggtaagaggcaggttagaagcactctaccgcaaactcactatgtagcgagttttaggggaataaatagttttgaagatcttcatatcttcattgatccagtgacatagtcagtgagcaaatatttgttgagggcttactctatgctggatactgttcatgctttggccaacatggttaacatgatctctgcatagaattcccttttctaatactggtttcctttaggaaaatgttagttctttcattcaaagttattgtttttgtttcttttgcattcctgtaactattttctgcaaatatttggggcaaattcagggtcattgtataaaaattaaaaactgatttagagaaggcttacttttcacttttctggtttccaacacaccagaaaggctggaaagcatttatgctgaccaccagatattttcttcctctggagagctcctggctcaaagacaggccaatgtccctattacaggctgaattgtgtctaccctattcccaaatttatatgtggaagtcctaatgtcagaatgtgtacctcaaaatgtgactgcatttgaagatggggtctttgaagaggcaattaagcttaaatgagctcattgggcatagattccaatccaatattactgctgtccttataagaagaggagattaaaccacagaagcaggcacagagggaagactatgtgaggaca

SEQ ID NO: 58474 - DNA, 5250 bp, Homo sapiens
ggccttcaaaagttgacaactttgatgttgaaagaaaaggagaaatggaatcaaagatgattctggatgtcgatccttaataacagagagtacgtcagtgctagagacagtgatgaaggaggatgggggtaaaaggcaatatatgatgaaatcatgggcactcatactggaatctgagactatggagaaaaagtgacttttgtattttttctgtaaactggcctttctccagagccccatccattcttgggaataattacatgtgcaaaacagtttaaaaattagtttgaatccagtatctcttggataaaatatgttcacatgattaatccctgcttctgggagaggagtatggcttactgcctttatggcaagaaagaggaaacactgactcctctgattcttatggtgtcttgctcttactcctaggtggttcaacagtgccctttgtcctcctggattctgattgctttgctctcctctgatgctcaaagcctatgactaacacatctcaaaggccatggcctggcacaaacactgctgcttgtgaaattcatatctcactaccttcaccacaaatcttgctgtagaaacctcagaggtctacctgcaacccttatttggcccgggttggggtgctcctcccttcaatccttatttgggaatcactttatttcatcaatagtgaccttcttctggcaagatccttagggaaccaaaggtgccttagaaaagctacacttgggaccacttttttaccttaacaggctacactgacacatcttgaagtcattctgcaccagtgtttttcagaacccctgcaagtatcttccttcttctgaagtccgaaatggaaaataggggtctctctctgactttgctagtattctctctcttttttcccacatatctcttgtccagagcccagagaaaggaaaatgtgcacctataattagttttttcattctatgctctctgtctctttcttctttccagaatccacgggacaagacttcacagagagcagagttatgctctttaaattatagaggagctctgaattgactgctccaagatggattatttatttgcaaatatgagaaatataaaaataatggaactcctctctagagaacagctaacaatctgatttatcattatggaggcaaaccgccagaaccaacctcaaccccaggaagcctttctttcatcttactcatttatctttctcatttttattgtttgggtgctttctgtttgcatttctactgtaacaaatcctaatcttcctcaggcatattgctgcctcaagcaaactaagacaatggtcttgtactgtgaaaggcaaaataaaaagcacatcaataattttttaaaaacattacccccactgtacatgtttagtttaagctacctgcagaacatttaggaaagtaaatcccccttcgtaacctggagagatttgttttccctttttaacttaaagtctaagcaacattctagtttttattcagcctctcattatgattaaccatcactaatagagcttggccataaaccaggaggagttttatatctttaaactcaaatggtttaaagaacacacagggtttcttggaaagtatggtaagaatttaatatatccgatcataatttctgggtaccacaagtcccaagacaaacccttatttaacaatggtaattatcctgtagtgccagcactgtaaaaatcagcggagaacagagacaaacaggtcatcagatctgaaaaactcctagaaaagtcaaaggaagaaccacagaagagaaataagataatcagatcacagccaagagtcaaatatttcataaatgccaaggtcaaagcaaacatagacctaggaagagatacaacaaagtcagagccaaagggtgcaggaagaagacagacactgtactgttgattgggaaacatttaggctggcaaaaagttaaaaattgcaaaaggctggtaggcaccagggtgaaatagttttaggaagccatggggataagataaaactttagaattaaatttctaggttcctttttctcataggaatgggtgctaggctggcctgtgggcagttgagaggcaatgattatttttcttgtggctgagtttacttctggcatttgccccacacaataactacatattctagatcctaactgaatgagtcaggttggactttatagagaaaaaattgagatccaaagacagagaatccagagtgctacaaatgggggttacttttgagttggcagtactttaaggtgaagggaaaatagagatgggatcagagttcagcagagaatatggaagccttgggtgattgtctggaacactaagtggaaactgggagatccctctgggtctgatgattcaagatatataggtgagtcaaagaaaatgtaatgtggacagtgttcaagctagagcagtgtgagtcaggaattcagagagattaacaagacatctgtaagtggccttaggataaggagactattactagtaagcaggttattatttcatttagaataatgaaaacaatttatatcaaaaatgataaaagtttggccaggcgcggtggctcacgcctgtaatcccagaactttggaaggccaagtcaggtggatcatgaagtcaagagatcgagacaatcctgtccaacatggggaaaccctgtctctactaaatatacaaatattagctgggtgtggtggcacatgcctgtagtcccagctactcgggaggctgaggcaggagaatagcttgaacctgggaggtggaggttgcagtgagccaggattgtgccactgcactccagcctggtgacagagtaagactccgtctcaaaacaaacaacaacaaaaaaatggtaaaagttcaagtcctatatggtatgagaacaggacagatttcacttatctaggcattttcaaatctgtgtatttcaacaacagtagctcattaaacttcttttccatgacaatcaatgtgaatttaaatgtcatcaacacagctgtccatggcggtgcatgcctgtggtctcagctactcagaaagctgaggcaagagaaggattactaagtccaaggtttcaacgatgtagtgcaccatgaccatgcctgcaaatagccactgcacttcagcttaggaaacacaagaagaccaagtctcaaaaaaaaaaaaaaaaaaaaatgccaacaataagcagttaaaatccctcaagttagcagaaagttaagttcttaattgacacctttaaagggtttgaaagtatttcaacatttgtgtaaataccgctttttactgagttactctcaaggacatgaagtcagatactttcctccacatacctgttactttttcttttcataagccatcattttatataaaatatagagtatttaatgccccctcatctaatcaacacctatcagtatcttcttgatgtataatatgacaagcattcagttcagtgctgtgagggatgtaaagatatatgacatagggtccttctcctgaggactttggaaaaaatatacttttgactggggatgggagaggattacagggttatgttggagaattccatttcttctggaaaaagtgatgtttgctaggactaacagcaggtttaacagaaaagcaaatcacacatcttcaatagtagcagttaaaacttcaaagtaccaaaactgtttacgttcacaggaaaaagaagactaagaaaactaatgatcttctatatgcagttcaaaaggaggcctctcaaattaccaaggtatcatgaggtgaggagatataaagaggactttatcatttatcatacttatctttcatgaaagctttcataaatcacaataattgttatctattttattgtttatgcaatgcctactcttcccatttgactgtgagtcccagaagggtagagaccacatctgccttgttcatccttgcacaaccaagcctaaaaaaaattggaacatggtaaatagccaagaaatatttattgaatgaatagaatttgacctaaatttcaagactgtgaatacgacacgaaggaggcccagatgaactctcaaagtccacagtcgctggggattgagttaagagcaatatcgtgtctcattaagcttgaggtcatcccatattgaaagatgccaagagaccagattggtttcacaacctctagaagaccttgatcctttcctgatcacccatgccagtgagcacacagggatttcctgaaggacctttgaaataaagaacatttcatggcagagggtcacccttgacattcctgcctcgtgacactgtaataaagccatttagccaggcagcttcagagagagggctcagcccagactattttctatgctgtgacagattcagctcctccatggatcagcatactcaggtcagtgaacactgcccttcaacctgtttgaaacattttctagttcattcttgttggggaataattgcattctttccattttaaattagtttccctattgtgctttaacgctgagtttttatgtaacattctagtaagatcttcagacaccccagcagggggttatattacacataaaattgttgcttaagtgacatgatttttggacccctgccatttgggtataacttctcatttttgcccttcaaatgaactgtatataaatagactcaaaataaactcattatggagatggaagttgaacatatgtctgaaatgtcacagcattctttgtagccactgtaagattgtctacagattaccatttttattttcaataataaaacttttactttgaagctaagttctagagtttaaagcacagctcaacaaatttttgtttgatacagaaacaccattttttaaagtcttattttctgccagtggagtaccactgggaattttataatagttaaatgacaaaaattcatgtcacaactctgttaacacaaatagctttttcaagagttcagcaacaatctggctttatttgcccatattcaagtgtcaaagataatataaatcaaacatgttctaatgtatatgtgtagaaagtcctcagtataaatgtgttcaacaaataattgtaaatggaatcaaacttttaggaaagaagaggaaaattaaatgtttggaataaaaaatttgagctaagaccatataggctccaagttcagactactgattaagctgtgagctataa

SEQ ID NO: 58475 - DNA, 828 bp, Homo sapiens
ctcacttgttcctgacctacagacaaatgcagaaacacagtcacagcagctccccgtaggggcttggctttgttttaactcaggatattcattttgaaggaatagtcataaaatacattacgctgaactatttaaactcaacggggcatcatttaatgttcgaccaaaggatccatctgctttccttaggttaatattctgttaaagtatttgttctggaactctggaaatttgtgaagaatttgaagtctccagggaagctaagagcatttagaatggaactaatggtctgtacatttcattgtatttttactgcttcagcagcaatgtagaggttaggcatattgagttggggttagaaactagggttaaacacttaaaagaatgtcaggcattctgtgccaaggtcaccatttagcaatttcacaaataactaaatggaatgccaaaaataggttacaataaaaatcaggccaatgagaagacagaagtgaagaacttaaattatttatttattttaatgatatatcagacatcttgtaagataccatctctcttctggagaatactttattctctactccaattgcagtcttccagcaatagattaaatcatgccatttccagaatgtttttagcctgttttgttttcctaagatcactctctactgaatgtttgcaatgaagcaaaataaactacaaaacactgcaatttctattacatcaatttattgacattaatatttagtttcactttgcaaatgcaaccacctttgaagcatgcttattgttctttgctgcatcttatttcaagctaatttctatcaa

SEQ ID NO: 58476 - DNA, 1883 bp, Homo sapiens
agtagtgatataaaattaagaattatatcaaatacaatataaaagccattacctatgaactgatccatgcctcattttgtataagttttattctgtgatctcttgttcacttaatatcttgttaaatgctgatatctcagtctttctgaagccctgaaatggtaattttagcagttcagaaaatgtctttcatttcaatcaataaaaaacttctgtaaaaaaaattactgaatagacaactgttccacatttacacttattaaaaactgacataaacaaacacaatctgtacaaaaaatatcccaaatcccatgtcactttggaacagtaatattgaaagacattgtcgcctaagaccccctcttcctctgccacggccatgtcctcttcctctacttctgcctcagcttcttcctgcaacagcttcccttttcttagatttcaccttaagttcaccatccacaagtagtgtatccagagataaactgtctggtagaataaaatatcaatgttatttcttcgaatactcagtgtttccagctgtacagtttctctgttcttcagggtcattttcacagctttaagatgtgtattcatgctgacatccacaccactggatcagtgggttccagtggttaatctccctgaacggtgatggcatctgaatgaaaataactgaaccaaattgcactgaagtttttgaaatacctttgtaattactcaagccgttactccctacactgacgcaaggattacagaaactgatgtcaaggaggtgagtgagttcaactacctgttctgggggcctggacataaaagactttgcaaatagaaagaggtgaaaatgaagaagaaagctgtattgaaacagaaatacaagtcaaaaggaacaattacaaagaatcatgcaggaaggaaaactaggtattgatttagaatggttgagttacattaaaataaaccaaatatgctttgttaaagtttaaatgtgcagccacaatttgagtatttttggtttatatgccctcaagtaaaggaaaagctgaaagaattaatcatatttgaaaaccatattttattgtattttgattagatattaaatttgcagttttattataaattgtactgttattttatgacatgaaaacttatactataaatttggactgctatagactgcttaggtccaacttcaagcggatctgcatttttttatgtcatattaaatatttattttctgcagactgacttcggagtaattcttgagccaggaggggaggaattagtgttcaaattgctgagatcttaggtcaaaacgctacagaaaataatcactatgtaaaaaacagtgacttagaggcagtcaccccttgccagcaattccaagagttgaggcttcatgcctcaagacatagtgacaagagttgagtgaaccagaaattgaggcagtgaaggtttttacagggaaagaaacaaactgtgggtgtatgggagaaatggaagagggtgacagactggggaaatgataaaggccattttggaagcccacagggaagtggtcttgggaacctggagacactggcagattcagaaggccaaggggatctagcttatactttggaggcagggtgctggaagtgaaggcaggtaagccatgtcaagagcctgggaggcaggggaaaactggaaggggaccccaggtgaagaagggtttgggatggggtgcagaagtccatggagacgactggcagatcgactttttgttttgttttgtttttaaatgcaagttgacattttattaatatgttatcatttcaaacatgtattagcataactgttgtggttgtaaatggtgtaaccatcaccttaaaaatcagaagcaa

SEQ ID NO: 58477 - DNA, 1742 bp, Homo sapiens
gactcagaattcaaactcaagagtctataccctctgtgtatgtctgtatatgtgagagatatattgtgagagatgtagatgtagagagggcttcacggccctctcatgtcttattaccctcatgctcagtaagtttttgtgctttttaacccctctgagaacatctgctaatcctgccttatacaaagaggacaaacgtgagatctgattctggctgagaaatggggtgtgggaaaattggagtcagtgacccattatattaacaaacaccacgtccttgtgctgaagttatggaagtaagatcttgcactgggagctcaattttaaggctttggtagagcacaataaccaaatctactgagcttccctatgtttgcggttcttaacccaaggacagcaacagagctgatgtttcacacatctctttgttgtcatcattgacagtttgctcgccttactcaaaacactgcctcctaaacattaagagatacagagctcatttgcatcatatgtttactggcccctggaggtccattctagaactaggtgtaaagattaatgcatataccacacttttttatcacactattttccccagaccccttatcataaagaagaatcagttaggacccagtcacaaaatctgatactcaaccatgtgaaagaataagagtaaagcaagagtcagggagaaagtgttccatttccctgaaaagtaaagatgataggatttcatctaacacttgaaagaagattgttggctcagtgttatctagcagctttgtggaccaagccttgactgagagaactcaattgctctttaacaacaaagttgtaggaagataaacatctgagtcactggttctaaaccattacacattattcctttctttcctgcttctgtgattccagctctatatctcaatgacttgagtcacatctaaactatgcctaattttgatgactcattttaaacgagatactcttcttctcacaccttttcttcccctatttctgctcaccacataatgcgagttcattagactaaaatcattttctgttttgctcactactaaatactcagtgtcttaacagcatctatccctcatagtgtaggggaggaaaaaatactttcttagaagaaaggatagacccttctagcctccttggctggtctggtctgtgaattaaattgacatgagacaggttgaaagaaaaaaaaccaacaacatggattacatatgtatgcacaggagtcccacagaaatatgtggctcaaagaagcagccagatgattgaagcttttatatcatcttgagctacagaaaggaataggaatttggggtttctgagggggtgagtggaggcaaattatgtgagagtcagggacaaaatgtatagtaagtaaaagttgtttattatgtaaataaaagtttctctggtgataaaagttgtcttcacctgagaaagagtagctctcttcctggtacatatacctttactacctttactaatgaatatttcctttatacatgtaaataaatggggagtgtgatacttcatttcaggtagctgaagagaagtaaagagcttttcctgctttggctggttttcagattctttctgctcaaagtaagcaatatgctgaagtggcaaattttgaggtggcataatctgatctcctgcagtcatattttggggtggtatgtctttaactatcatttgcgctctataaataattg

SEQ ID NO: 58478 - DNA, 1750 bp, Homo sapiens
tgtacttttggattagtctaaggctgaaatttcgcactcactccgaaaagaacatcagaatcatttcgaccatgctatgctgcacaataaggagtagttcaaacgacaactttttttgatcccaggtgttttattatagggttttctgatagtcttaccggaaaggaagttttcattctgcttgggaatctggggatgtctctagccatttctaaacttctacagtgcttcccccacgaactaaagataacaggcaagcagtttccattggaactgtgttaaatcgacatctgaaatgttcattgcttataatttgatcttatttaatttcccaaaaaatcattagttactaggtattgctaagtacccacgttcgggaaacgcatcttttttttttttttttcacggttattaaaaccgagggtggggggcggaggacgcacgtgggaacccaccaggcgcctcagcttctgcactacaactcccagaaggcgccgcggccaggaagccgcttctggacgggcgttcccgcccctcgctgggcttggtagttggggcgcagccgcggtggctgggcgcggagtgtgcgtggcctgagccgtgcgggtgactgcttcagggcttctccgcgactggaccgggcgccgctcgaaagcacgccctccattcgcactgcttgttgggctcatcatgaagcgcttgggctccgtgcagcggaaaatgccgtgtgtgtttgtgacggaggtgaaagaggagccttcctccaaaagggagcatcaggtacggaggagcgccgggcaggcttggcggcccgcgtgggctcctccccgcggcgctggctcagtgcgaacccggcgagggcggctgggcgctttagaactgccctgcaggccaggaacctctgtaggtttccctggggaggtctggggtgggagttccgtacgccctgagctccaggttcttgtacttttcttagttgtgagggagggaatttgcgaaagaattttccttatcaggagattcaaacttgtcctcgcaaggaaatggataactcacatccacagcatgtcccttccttttcaggtcagcaccttttggggaaaccccctaatcaggtaattgccacagtccaagctttactacttttcaagagtgcagtaagaaagggtggatattagaagacttgctttacctgttctgtccgaaccagtggcggtgttgacagtagcctaattaggtcactgaagttcacacctcatattaccagtaattacttaatttattctaactttggtgttctcaaggttttctgttgcagcaacgtgttttccatagtgtgccctcggtaaatgctagtgagtaacctatatttgggtaattttttcatattgtactataaaacgttgtagtctttgatcagtagaatccccagtgattagttgggtgcttcccaactttgctgatttcaaacaaaaccaacatgtccattggaaatccacctcacttgagtttcatcattggcactggctttctcgtcttctggactaaaacttgtttaaggcaaagattgccctgttatctttagtcccagcttctaggacctggcacgtggtaggcactggataaatatttgttgaattaaagaatgaaccctggaatcatttcatgccagttttccattcaccttgatgctttttaccttatagcatctgatcttttcctgctttctagtgctgtcacagctgttaca

SEQ ID NO: 58479 - DNA, 872 bp, Homo sapiens
tcctataaaatatgaatatattagcaataggcatgtataattcaatgccatacttattccatatttttaatttggttcctcaaatgatcaaaatataatatctaatctaaaatgtaatgatttaataggcaatgaaggcttaaagaagacaggaaatgcagactttattatttgtatttacaatagctagcaaaatgtctgcacgtagcaggagatcaataagtgttgaccgaattaacgaggtaatgctcaaatatgctaaggttacacattaaaagatgaaagacatgtcatttcatacatatggaacagaatggtcaaaagaggcaaatatgagctgaattctggaagttagatatagctaaactcacagtgagtagaatttgaaaagaaaggcaggtaggttcatagcagattgagtacatggctaagaattataaatataattttgtgaacagcggtgagctacaggaggaagaatgatcagagctatgttttcagaagattattttggcaacaaaaagggtaacttccattccaaaaaagaagagagctgaattttaatttacatggtcacaaaaatcaataaagaatggaacaaagttcttagaatcttacccaagccgtttgtttgaatttatttagtgaactatcagcctgtagttctaatctgtgatgaagaatatgaaggtcttcctcatgtttcttcacaatttctctttgctcctgttttacagaaaatcgaaactatatcttaaattgtgattaaaacaaattcacattttgaagaccttatatattttctcttcaatcttctaaaattcctttgagatgaggaagaaacagtatctccatatatgtatgtatctaga

SEQ ID NO: 58480 - DNA, 1929 bp, Homo sapiens
tggataaggaaatcaataaattatctgccagttcttcttgacggggcaggtcatctgggtcaactttcattatttctttccagtttatattaggtggcatcttgaattctttcactgtgctccacctctgtaacaaaacaggtgtatattagcattttcaaggtacacagtattattggttttctagcaccttacattttttgcagattatttcattataactttctgatgttagcaaaacagacaattgggccacaaaatagacaagtgggcaaaatagccttgatcaaaaatagcagtcggcacaaactgtcagagtgtcccggctaaataaaatgtgacggcttccttgctaacactaatctaagttaatacttaagatttctggatcccttcctccacacccctacccacaatgcgcgcgaacaccctaatcctggcaagcgcgagggtctgtggaaggccgacaatcatccctgatttggagaaacagaattggggctgaaaaaaaacgcagaaattaacatttggaatgagtgaagttgtgcggcggaaactggaaccgaagcaaggcagtattagggacccgaggctggaagggcggggtagctatgctgtggcacacgggccctcaggctaaagaacctgagcgtggagtgactcgctaatcctgcttacaaggatccacccacctagaccaagcctggcaaccagcggaggcctctcactaccgcaaccaccaagctggacccggccgcgggccctgacagatccctatcgcggttccacgcggactctgggtccagccaaatggtcccgagcaagccaaagcggcagcggctgctaggcgacaccatccccaactccgccaaggccagaataagatcccggatgccaggagagcctacagttcacgaccgtgggtgatgctttacgtttagattctccgccggagtcccagagctcggtgttcaggatgatgagaaggcgtggaacgaggacttcaaatcccagagtgcagttctgcctgaggcttctgcatgctgggaactgaagtccctgagaagaggaggtaaggcgctcccggcatgcaacgcgtaagactgcgacggtaccggggcggcggggaaggaccgagaggcgggaggagcagcggctcaggcgcctgcaaactggtggcctgaacgaggtagaccatgactgtggtttcagtggcgtcactcgctgggctgctcttcctgaggttttcctaagccatcccctggcggaaccgcccccaggtgaggtcgagctgtcggtcagcatattgggaggaattgaggggagcagtcctgggttagagaagcttctgctattggggccgtagggcctggtcccattctgaaaaagtgggaacaccctgccttctcttcaggcgtttgcaagcggcgtccagggtagtgccttctgtaagaaggaaaaaacaaaaagttttagccttgtttagtatcagaatctgtcttgatagttagagtgagagccgcgcagccgtgatcctcgtttgggggcgagcgaagaattgacaagaggtctcggcatcccgaccccgcccgccttacctgtagcaccattcctttcgcggatcgtggggcttgatggttgtggagctagtataaagtcaaggctctagagaggagaggttagtacttgtccggaccactgccgggggtggagagagaagggatccaaggactcacctgtactattgttgccacttgcttggttacctagggtgcccttccatgaaagcgccttctctggtgtttaccactcttactcgtgcaagttttgctcatcctgctcgtctgctcacaatcatgctggagtatgatacatctctacctaactttcctaagaagctgtagacttaaatctaaatgacatttccaa

SEQ ID NO: 58481 - DNA, 430 bp, Homo sapiens
cagaggccagtgggaaaagagcccaaaggagccctcatgcctataagcagaaaaaggcaaagaaggccttgagacttttagtgtagtctgggtcaaagatgtactggagtcagagataacttgacaatgactcagcgaaaagaaatccagacttctttactgtggcttggcaagttggccaaattaaatatttggtgaaatagagaaattgatttaataaaaccacagttgttaaatgaaaaaacattaagccacttatatgtagagtttattgcattttccagtctcagaagatctggaacgtgaagatgactatgttgttgctaacactaagaactgtgccactccatattcccttgaattcttacaataaacttccatcactgaaggtacattggaagttttacatccatgtttgtgtatgtgcact

SEQ ID NO: 58482 - DNA, 718 bp, Homo sapiens
ctgcaaagatagattcattaagttaaatctcatacgatatctgtattatgcaactccactttaggcctccaggtttgagcattattacctgaaatcttcttgttggcagaacattttttttttcaccttttaaaggagagaatcctctttcaaaagaaaactaaacataattttttatgatgtaagaagatccgtgtgcttagacaagcttgagcatgaatattttgccctagtaattcaagcaattccttttgtgccattcagaaaaaggtcacacatagctaacaagataagcctgcgcatatcaaacagtgaatatttgtgctctgctacatttatgttggcacttctctcggccttaagagtcaaagggcaaaggaataaaatagctgcctgtgtgttctgctattcattacagattttccatctgtatttaatattcattggagccaggtcagcaaagaggtcaaagatcagcaagaacacatcatattagctacgactcagggtgctgattaagaatcaagagtaacaaaattttggctacattcaatcagaagtcataatcagaatgtatttttaaaaatacattttattgtgtatatttgaggtttacaattattatgggatacatattggtagtaaaatggctactactatagcgaagcagatcaacatatctataatctcacatagtgaagtttttttaataaagaaa

SEQ ID NO: 58483 - DNA, 788 bp, Homo sapiens
gcacctaattttaatctataattatacataaaaagtgccttttatttgctttattttgtttttctagttattgattttaaattttcctagtgatacaaaataggtatattagctcatttaatgactttggctagagaaaattaacactaagccataccaaggtaataaaaattttagccagacctcgatttttcccttgacacagcctataatttgtggtctatcagtatttactcattagaagaagaaatgagtgaattgagggccttcaatgacctatctgatctcttcagagtaaacttttatgcaaaggctaagaagatatcttttgtattcactgaatttgcataataaaatgaactgcatcaatggaaagcagatgctcatctgactaaatcattactcatcctattccccacagggaaacagtcatgcatagtattgaactagagttcagatttattgcacaactacttttatttggtatgggagtgttccaaagatgaaagcaacaagccctcccatcctacaagtcctttttcaatatgacttctctattgatctcatcagactcactgaatctgagttggccctggtgacttgccttaactcatagaatgttgtagaggggacatatgtaactctcaggcctagtccttaagatgctgtgcagttcctcatcttgacctctctcagaagccagctaccatgtaaggaagcctgggttatgcacctggggaagtaacatgggaagaaaggccctggaggatgagaggcaccacacacag

SEQ ID NO: 58484 - DNA, 1219 bp, Homo sapiens
gtggaggtactagagctctttagagcccacacagagctgcaaactaggcagacaccgccgagagccaagtttcccgggcaggcgggcaggttcccgccccgccgagagctgccgcttaggagttccgcgttggcttcgctcccgcggctgcacccgcgttcgcgccgctcctggtgcccggcgcccacctcggggctacacaaataaatctgagtgagagagctagtgagggtggcgcgtggggtgctgtttcataatctcctggaatccacgggaaaaccgtctcctatgcaaagacatgccttcccgtgataacttaacattccatggcccaaaagccaatctttccaccagacgggaattacggtttccgactgacagctcaaaacttaactgctgaggctccaaacttgacactggctccctctcagcactcccactccttttctccctggctcacccggctcggctcgggatcacacaccacgccggcctcccccgcatcctcttgtctcacccggcaggcacagccctgcacgccccagctgcaagtcccagggagcgccggcttccccggggcaccgggcgcgatttttcctggagagcctgggagctcccgggcgcgccctactcacttgtgtcttcttcataaggaaaggcagcgctgcgatccagcacaaacagtggtgtggcgactccgtttagctgttctggagctccagcatattgcacgaacagcggcggcagatagtccacgcattgggtagcccgagcgcagcgccctctccactgtccctgcttcccgcagcgcttctagtctcggcgcgaggcggcgagcgaagcccggctgctgagccgccggcgcttttatacagttcccgcccgcctgctccggacacgcctccttcccttccggagcccggggtaggcgagaagcaggcaagggcgcggagggaagaatcgggagggcggccagagcacggtaaatgccccagaagtttggcagattaggccaaccttgtccgctcgcctgggggccccggacctgcactggcgggagaccgcgaaggcgcggggacgcagagggcgaagcttggtaccctgcagctactgctcgcgaggagtcccagcttaccctcccggatccgctggggctcacctggcacccccggggacagacgaaatacctcgcgcgccagagagggctcggagctccctc

SEQ ID NO: 58485 - DNA, 750 bp, Homo sapiens
taatcagaaactaaaatattggggaaaaaaaaacccagctatttgtagaattctatattttctctctcactcattctttttccctttttttttcaaataattgttgtcttctcaatgaatctcatatattactcctgctttgaaaactagctttaggcacattccaaaataattctgcacttagataatcattaacaaatgttacccgagcctgacctttctggccagacagccagcaagagataattttttttttttttgagacagagtcttgctctgtcacccaggctgagtgcagtggcgcgatctcggctcactgcaagctctgcctcccgggttcatgccattctcctgcctcagcctcccgagtagctgggactacaggcgccctccaccatgcccagttaatttttttttttggatttttagtagagataaatgttttatgagacttcgtcttttaaagagactacatccaccctcaggcacctatacccctggaacctttctttttgtacaaacctgtgtctttctttgcatttcaaaatgaaatgattcatgttgatttaaagattttctaaatgttggtacaactataggtttgatacagtgagtctcttttgcctaccacatattccctaaccctaaatctaaaatgtggatttgaaatgtttcccaacacagcatgttggtggaaaaggacatgtactagaattagtcttattcacacaaactccctggccaagtttt

SEQ ID NO: 58486 - DNA, 898 bp, Homo sapiens
attatttttcttatttaacagttgaagaaattgaagcttaatgaggttaggaaatgtgctcaacttcatacaacttgtattttgtagatatgaggtttaagaccagaaagactgactccagagcccaggctctcaaccatcataccaactggcctccttttgttgaaggctgaggaccatatggcaagcatgaagacaatatgattggcaccttggttctgtttgaatcgtcctcatattacaaatctccactctgatttactttgtgtattattaaacacgcaccatatattgttttttgctggattttttttttgatgaaatataactcattcaattttcacagcactagaattttcccaaaattagaaataagaaaacagagcttggttacgtatcttgtatcttgtttcaggtctcagagctatggggtagcagatgtagactttgacctcgagtttgcctaactttaaaggctttttattacactgtatgattaacctcaggacatcaggcacagcatgttcaaagctctgagaaacagaaatatgtactagctataagcatagaagctgataccacattaatactacctgtatttgaagtccagttcttcttatttgtctattcttacttggcctcagtttcctaatttttaacagaaggatatgacctgttttatggtgactctgtgaaaattaatgggtcattacaggtaacactctcagaacagtacctggtacatagtaaatactaaaaaattatgaaatattggaaaagtctgggagaaatgcatggtatagacaactatgaattagttttacctgttctttgtgttatttgcacgttttaaagttggtagtaccaggcaatagggatggttaaatgatatagcata

SEQ ID NO: 58487 - DNA, 743 bp, Homo sapiens
aaaacaagtggcttaattaaggaacctttccctccagtcatgagaggtctcagatggacagtgtaggctggcaggcggaactactccatgttatctcagggctgcaggctccttgcgtctttctgctcagcccttctgagagtgtgcttgttgctatatggtcacagggcattgttcttcctctgggcatcgtgtttatatcacaggcaggaagaacagaaggccaaagtgcaaagggcaaaagattcagtccaggtgagcctcctcctattgtaaggagtttgccaggaagcctcactatacaactaccaattataattcattaaccaagcctggggcacattgccactgttcacccttatctgtaaggaaggacaggaaatgccatcttgtagctgggcacatttttatgcccaacaaaactggaataggctctttggcatactctgtatttcacgttttaagaaactttgcttgctcaagcctccactcctttatctgtacagttcacttggacaagactgccttttccaacttaactatttcacatgcttctattccttccacattcagtacaagttatttactcttctgagaagcattcctatctgaccctgggcagactcaatccccttcccttatttcatatttgcattactctattatagcattatcatatgtataactcagtagacagatcactttgaaggccaagatagatggtttaagtctagaggccaact

SEQ ID NO: 58488 - DNA, 833 bp, Homo sapiens
tgaagataaatatcaaatatttccttgcgtctactttggtaccataatcctctccagtgatctctctatttctttacttttcttcacaaaagatctttttaagtaagttgccactttcactgtctccactcaaccactgccaatttgttttttccccaccccaggtagacttccagtctcacccctgcacggatatctctcccatgaggtcatcagtgactccatgttgtctaatccaaggaatatttttctgccctcatctctcttaactttccaatggcttttgacacaattaactactccacctttcttgaaatatcttttatcgtagtcctatctcttctggttgccagtaacaggaacatgactcaaaccaacttatgtaaacacaaaaggaatttattggctcttttatccaggaagttcaaggaatggtgctagtttaaggcatcattggctctagaggttcaaacacatattatcagaaacttatttatttttctctacctctcagcttacatttctgctgttatctcagtttttaggcaggtaaacctcacatggtaacaaagatggctattgacagttctagacttttatcaatcatccttgtctttcctggtcttagtaaactcaaacacacacacacacacacacacacacacacacacaccacatgcctctttcctgtgagtatcagtgggagtagtgagaaggctttaattgagcaagtctcataccatgcccaactgagagcagagacttggggagggtcttgtgtgttgggagagaatcagctccacttaaactgtatggattaagatttaagaaaa

SEQ ID NO: 58489 - DNA, 1700 bp, Homo sapiens
caactcagatacaagcctgtaactgactacaaagaaggctgggaaatatagtctagttacgtgtcaaaaggaaagcagtttgggaaacaactagtcaatctgtaccacagtgacatagtctcactttctagctaggtgacttgatccactacacagcttaaggccagggattcaaatatgtgaatttacaacatcacaaattacaacatattctgtacatttggccttatgtgccatgtacctttgggaatgacaaacatctgtttgtttgttttgctattataaagtattggttctgatacgaattgctaaatcattctgtgaaaaccggagtctgatctctggaatgtgctacttaggctgatcactgaattaggctaataggtaaaagagaatagccattcaaatgctaaacacacatggcataacacacagacacaaagcgccattattctgtgttttgtgcaaacacacaaactcctcccaccaaggttgacataatgaagaaaaaaagaagagaaaggatatgtacacaaggaattgaaccaaatcaaatgtttttggatatgcttgactacctgccttgataaggaataaaatgaattcacaagatttgcctgccctcatagtcaataattgttagaaaattgccaggcccaagatggatgacatcatgcagggcaaatgaagatcatttctttctacattgattggtgcttgggttttgtttatacttcagctgcctgggccttgttgtaagtaaccagatattgtaggtttaaaacaagctttccatttgcatcaccgggcaatgagtgcagccaacaggaagcccagtgattcagataactagttttaattgaaatcaataccaatgcaagcaaagctgactggaatgggagcactatgctctgatggaatcatttcatggtctctgccaatgacaatcattatcaggaatgaactgtaacttctacagtgactcataacactttccaggaggaaaaataaaagagtttctggaccagtaaaagttttcaattaggaaaaaaaaaaattacctctttaggtctctgttacatttcagttatagactcctgttcaattccaatttgagattccattaaatgaaaaatggcaattagctatagtacttcctcttctgccaacccttctccaacctttcccttccactctaatcacagattaggtctggtgaagaaagagaataatttttataattaacatgtatcagacatgttccaggtggagaattatgttctagtccagcagtcagcaaaaccagcaaactctgtctacaaaagggccaaatagtaaatattttaggctttgtgggccatacagtcttgactgtgactactcagttctgctgatgtaaccaaatgcagacatagacaatacattatgaatgggcatctctgtgtcctaataaaactttatttacaaaacaaacagcaggcaggatttggcttgtaaaaccctgttcttggctttacaggtgttatcatttaatcttcactgaggagtgtattcttattctgatttttcatatgaggtgaattgataaccccaagacttctcttctagtaatgagtgaagccatgtctatcatcaaagacatgtctcacaccaaagcagactatagtttacccattttgccactctactgcctggctgaa

SEQ ID NO: 58490 - DNA, 1373 bp, Homo sapiens
aggaatttcatgctttcatgtagtagcttcataactcctttcctaatcaggtttggattgatttaaataaaaattagtttctgtttcctgagccactgaaagcagagagatgacttagaacattcttctggccaaaattattgcagcttaaccaagggcaagcagtaagatagcatcccacgctcagatgatctggagctcaatttaacacacattctgcttcagaaaaatccaaaattcatgactaagagaacttaacccaaaagcagtggcatcaccttcctttactcccactgagtgaaaataaactggaggatggctaagccccaaaacagtgagttgctaatcatcatagttatcatacttcttttggaggaaatgagatttaatccaatgcctgcatgtgccttttcaggaaattgctcatctgtctaattaagctcttctttcttcacaagcctgtgagtacattcagacacatggcttccagaaaacctttttgccctttttctgttggtcattggaaatttctaattggtaattggaaatctccattttaaggagattccatcactttgtattaatcactggttaaacttcattgacactgtttagaaagtgccatttcctattaggaagcacttttgaatgagcacaaattaaaaaaacctcagagactatgcaggtgggtttacgaccttgtcactagcataaagcatctaactgctcagagactccaagtatacatgtgctcaggcaagcatgtttcagcttgtttatttgtttcccagcgaaatagccattgtactttgccctctgcccttttcatatgataccacagggaacctgccctgtgtcctggcttccaccaattaaccttgctttatttcctgtccttgcaaagttagtacaacccacttcacttccaccataatcattttccatttccttccttccaagccaggttcttcatttctacctcaattaaagaaaaattgtaacatttatgaagtcctgtgtcagatcgtgcgaagatgaaacaaaataagacaagggttttgccctcaaggagctcgtgatgcagtgggaagtaaaatacagcctcaacccaaaaccccacattcaactgtgatgggagcaaggaaaaaaaagtcctgtttaacatgtttaacagtgtgtgaaggaagcaatcaagaagaagcaagtgtcattcttctctctgtctgtgaaaaaaatttattattactttaaaatgcttttctgctttgcaaataatgctattcacacatgtggccatacatatgtcaagagggaagagaagggatttaccaagcatgtttgtccttttccactgacctgttgtatctaaaata

SEQ ID NO: 58491 - DNA, 4229 bp, Homo sapiens
ccccagagaagcatctaaaaacctgcaagcctgcatcatcaagcaagtcatagttgagctctatgacatcaacaagtgcagagggattcttctgaaccctatgcacacataaccatggttaattaacttagtgctgatggcagagtttgccccttgctttaaattaggcttttcctttgattaaaatgaagggcttagcccactaaatttattttcccaggagtaatgaaagaacatctgtcaaagaaaaaaaaagtctttaagtgatgaatgctaagtaatgcacctcaggtagctaaagatgctcagttgaagagatcaactgcaatgctatgagacacatattagcatgagaggatcctgcccgaaattagtcttatacacagataaaatacagcctccaccgccctaaatgttccagtcctctcaccatagcaaatttgctgaaactctattggaaaagaacgtctccttctaccataagttacaaagctctccatgggaaataattttatctcatccctttcctctgaggagctgaccttgtacaatatcaggagcccagatgttttggagtcagacaggcagatcttaaatcccacctttgtatttataagctgtgtgatttggacatgttttctaccctttcaaagcctcagtttcaatctctgtgatacccaaataataaaaagctgtctcatggaggcaaagggactaaaaacttaagcaatgactcaagaatgcccaataatgtgcttcatagtagacacttaaaaaaaaaagttagttcccatcacttccccaatgccaagaaagactatggggaagcataacccctctggcacctggtgggaaaggaggaactgaaaggggataaagggagtgtaagaggaaatggagagggtgacacacagactaacttcaccagcaccgcccccatgctctcatttcacccggggccagtcttaatctcacatggaaatgagggataagatatctgcgtgtcagacagaaagtacaaattcagtgcatctgactcagaaacttggcaaagatgccgagagcagataataaatataatcaccctgatttaattcagatggagacctcagggttcgatcacttccagctgagaggttctcctgtcattggagggaagcctgctctgacctacctgtgacagttgctaatggttttctaaattagtgtcaaatatgatcttatgaaggagtcatttttcctttaagatggtttatgaaaggagttttctgccagcactttgaaaaacagagaaattcaaccaaaatctggtcaatgttcatgttgttcttctatttcaagacctgagcactttcaactacaatcagtcaacaaatatttattaagtctgaaaatatttgctgtgtcaggcactgtgggtgatggagaagaggtggagtgcatggattccactctcagtgaattttcaaccagcctacctctacaaagtgattgaccaatgagacaaaaccaaaaaatctatactcaagtgatagtatacaagaatgacccctgcctcagagaattgtgatgagcttcaaatataccaatagcgcaaacagacatacggacatgtgtgtttcacaaattagttatcctaccccctagaaaaaaaaaaaacagagaaatgtgaaagccaagacagcagggagtcacaaagatcaggctatcaactatagatgctatagagattttgacaaaaagaatgccactattgaccttttagagaactgcttctggagggtgatgaagatcaaagccagttaatgcaaagagttaggaaagggaagcacaatttcgcaagtatagccaataggcgtaaatgacacatttgagaggcttgggaaggaggatgaagggagaaaactgtagcgtttggtgaaagttagtctgcttattttttaagaaatggaactctgtttaaatagcaggtttctctagtaagagggtaaaaattaaaatgttctagaacctaccataactctaacctgatgccaacaggacaagtacatggtcttgtgtctccaaggaactcaaagataggtggagaaattcttttaccttttaatcaaacagttctaaaataaaaataaaaataaaaacttgcttccctgggattttttaaaaaatagcttagtttatttcatcagcattctataaaacaaaatagagactgatctgttctatctgcaaaaaacacagttaaggtacttttgactaggaacctattaatccttattatatttattaagagtttatactttaagtcaataatgacttattacattggcttattacagccctcttatcaccaagtaaatggtataggaagcataaaaatgttaatgacaaggcctttgctctcaggaggttttttaactcaatagagaagacaaaaaaaatgtataaataacttgcagataaagggcactgtgaccaatttaataaaagactaaagatattcattaagagaagaaaagagaaagaggctaattctgaactagaagagcttagacagcttcttggaggaaaatggacttcagttgggctttgaagaaagcataagcacttccaaagcgattctggtggggctacacaggggttgagggaggtacagttccttttgattccaggcgggaggagctaataagcaaagtgaagagtaaaaaggatggtcataaacaaaacatcataacagtcttgaaagatggtccaaatacccactgtaccaaaacggacttcaaaactcgagccctctagatggaagatctgtgcctctaggcctgtctaattcatttctgtgttgttactcatgccactgtttcctaacttcaatatttcagctctagggcctattttttttcccattgtactcatactgcagaaagaggaaataactcatccagtggtggggatttcttagcagggttttgaagagggttgctgggggtggctgactctgccaaaatgtttcctttttctcttgctgtttgtcagatattgctgttgagcaacactagggagtgtcatcaacatgcaatctcatctgatttatcttcccttactcactcagactcagccctttgcctctttttttttttcctggcttatttagagtttcacaacctcttacctttaactgctgaataagtgtaaaacatgtgtgtatctggcatcagatattacaatctccaagaaaaagtattcacagtcagagatggctgtggctacctagtatacatcaatattttgctttgctgttatttcatttagaaattacatttccattttcctcacagattcacattcgaaacaataaattttcaaatttgtattttcctccaagtctctcccttttgaaaggtggatggctgaaataaacatttctctgagctctacagagctcagagtgtaagtctgtcccagagagccattaaaaaattccacaccaataaaccactgacgtaaatacaggcgatggaatatttgggtctaacaggatcctaaaaaggactttcaatcacatacacagagaaaattaacttcattgacacatcaaaacttttgcaatgtcctggaggcagggccaccatgattattcttcaacccaactagcacagacaaaggatcttatcgccaaatcagcctgacttcttcgggatcgatcaagaaaactcaccctcctcccccaatctctcttctctgcacccatcttaatatgaagaaaaatggtttgggttttgagttgaggattctagagcagaattttagatctgattgttaaataaatagtttgagcctagtgaaagatatgactatactaaaaatggctaaataaagcaggtaagaaaaacaaggcagcatattgatcctttcaacaatgtatagcttttatagaccctgccattccatgccagtgtctggactcacaaactttggggcagcaagcatttttaaagcattcagttgagctaagaaggactgtatatgcattaaaaagtttctaggacctgtctccatttccctggatatacttaactctacctattacctttttatgtaagtatcttctgcacacaaatactgaaaaaggtcaagttctgggaagtcacctgttggctctgtcaacatacaaaggaagcatctgctgtaagatatttcctgcctgaggccgtctttgcttccaagtt

SEQ ID NO: 58492 - DNA, 472 bp, Homo sapiens
cacaaaacttagcttgataacaaaagcataaaacagttaccttgtttcctgagattttataaaatcacacactacacacaccatatataaggcaactaccagaatctgcttactagttaaaaatacttgctcttcccacttggttttgcacaacacctgcaatttaatcaggatgtttttgggtgtgcctgtacttccctgtcaacatttcagttttgggcaaacgccaacctgtaagagattttcatctggagactgtttcccttcttgcaacatcagttgtactgttgccaaaaacatcaccctactaagggaacatccccttttattcactcccatccatttctggactcaaataataaacacttagtcctgcatctgaatgaagctttttttttttgccttttcttcacctaaaacaattctcactaacctcagggggtcaatctttttcaacatgttcttaataccc

SEQ ID NO: 58493 - DNA, 2539 bp, Homo sapiens
gaaaaaaataggaataaaggaacaattatagcagttgttgaatgttttcaagattgaaccaagaaattagtatggctaaacactttcatatctatctccgtgggtactcactattactctcacagtcccacattgaaacaacattcacgcaaccaagatgtggcacattgtactttccaagaacaactgcaacaatattttccatctcttgtgctttttcagaatttttcctctcctccattaaaagatggatttttacgttctttctccttaaactttgtatgcagcagaagtgacctctgagcaggtcataaaaatcaacatagtttccaccagcctctctctctctctctctctctggggatttcacccatggaacccagccaccatactatgtggaaatttaggccacatggagaaccaaagtccccagccccggcccctggcagaggtcccagtgggcagccaaagccaaaaccaactcaccagcaaagtgagtgaactatcttagaaatgaatcctctggccagcagttgagctgcccctgacaaaactgcgctgatcagaggccagcctcccctgctgagccctgaccaaatgcagacttaggaacaaaataaatgactgttatttgaagccactaagttttggggcgctttgtaatgtagcaataaataaatggaacataagataaaagggtattcctgctacaatttttcagagagccaggtacacccgaagatcccctgctgctccttccgctctttctttcctccttctgttcgtgtttgcagtaggaattaaactggacccaatgaaaaatacttaacgtgataaatacttagattttccccaaaagtaggaaacagaattctttagaattagcaaccttttccagacttgcttcgtgctttctcggatgtcattatcaaaaagtgaatgatatttcctcacttttcctttgagtgtctgagagttcatgtttgacggtatggtggtttaacatgtttttattacatcagtgatggctaatagatatgcacgccttctctagtggtgttttccatgacaaagtaagaaagtgagtgggtcaaattgcatacatgtgggccattaatcctttcctatataaaaaaataaaatgtgggatctaaaatgttagttggaagcagatagggaaatacaagaccttgcccggtagtttcttcagggctcctctttgatttgggcactttagcggttccatctagaaacgggtcattgccttcagcctctgagggctcctgggaggtctttcgttgccttttatttttaacttgtttcatcgaaccagtgcaatgcacaccaaggcctggataaatatttgtgagttgtttgaactttgttctgtgcccttcaatattctcaggaaatcgattttggactttaaagaagtttgaaaattcgttcaccataactggactgattcagggccaattgctaagtgagcagtgagaacacgggaggaacaagggtatttgaaagtcttgcaggatctttccgaaaacgattatggctgtgtgaggaactgcatataaatttacacccaaagtaatccttctgaagcagctgaaagtctgaagactgactttttttaagaggacatttcaaggatattttcttacagccagctaccacatgatctgccctggctgtatcctaaaaacccccatctccattatttgctaatttgctggtcagtttacctctcttcttctgtagacctgcaccatatatatgtcttctgcctctcctccttgcttcttcacacccttcccctttcccctgacccacctccctctcccagtttgcctctaggagggataagagtgaggaagtgaacttctttggggccagtttagttgtgtcatcctgaaaggggagtatgggcaagggtcagggtcaggccctatgctagctggtagccattttagagatacttaggaaaagtagttttataatttaagtgccaatgggaccaaggaagagcaacttctctgcggagaaggaggatggaagtttacccccggtggacacctctctgacagcacaccagctggggcctcccatgtggctgtggaattcacatggaatttggctagtcatttaacctctgcttcctccacttcctcagctgtataatggggacagcatttcctagccgacatcatgagactttataaaggggagcaaatactgatgacaagcagtttccaacaggaagagccaaaggctcaaggttcagttctgcagtaacaagcactggatatgcaaaccttctctaacattatgtgtcaggtgtcccataaaggtggctttaggctttattggcctttctctgcctcagtttcctctttgcaaaataaagataataataggacctatctcacagagctgttttgaagattaaatgagatacaaagtatagtatctggtactcatgataaatgttagttatttgtttcacctgctccgcacctcattttatcatgtaataagt

SEQ ID NO: 58494 - DNA, 7165 bp, Homo sapiens
aatgtaccaagacaccacagttcttgccccgggcttcatctgtgaacacaaaaagaaaagcaagatctcagcagactgaaaaccaccctttgtgaatgatcagtctaaaaactgaacttgaaaacataataataataatagttgtgtgtggcagttgagccctacaagcagcagaaaatgtatcactgaaatgaaacatgtacactggacacaattacatatttcagatattttctgaaaagagagcttttgtattaagtttctgccaacaaaaaactccttaatgggtgcattctttgcctcggcatgtgaataccagaaaccctgcaatatgttcgtgaatgccttttacacagacaaccagactgcaagggtctattaaattatgctccaaatgttgtgcagctaacaatggaggtattcaggcattttaaaagagagagggaagtcacaggggacggcccattaggaggaacaggatgtcgacacggcctgaaaatgagttcctttgtaataggaaatgcattacaatgcctggagattcacttctcccaggcttccagcccacagttcttcctgctgggctcaggttacccactgtctcactgttaccagtatcaccgcatcattcaactggataacattcagcattcatactgctttccaacaactaacttgatgtcctaaaataactcctagatgtttttaaattataaagcaatgctggaattcctgtctatagtgagtacttctatctgacccttcccctgagtccaaagactggggggaaaaatctgttgtccgattatgaacgactgtcaatgactgaattcaaagattcaagaaacagcgtttcaaatacacctgtgatctgcagccatgtcaaaaggcaggttttcttcctttagcaagaagataaaccagaattaaggacgctctaggaacattagagacctgcagtcagacaaattagcaagcagcaagaacgattaacagcttaaactctatgaatggctaggaattttgcatttaaatgtcagagcgacgactattaattagtctcacctatgaaagaaatggcctcagggaaaaactgggacaggttttggctccagtgatccgagatggggatttgcttgtatttaaactctcctgcgttctcaaagagattcggcaaattgggggtgacgttcaagatgtacttgatgccgaattcctccaacacgtccaagttggtggagtctttggcacagcccaagtagaggaagggcaagatctccactgggaaggaaggctggctgttggacagcggactaccatccgagtctgttgcactattggggtctcggtcaaggtcagactcgatgtccgaggaagagtcagagctgatccgcaggcccccgagccccagcactggcaacggcggcgagctgctgctacacgagccgtctagattggtctcgcaatgcagggagaactcggcttggaacttactgaagccacctgccagaacgagaaaagcaatcatctaacctgagaagccgtagtagttttcacagcttgtaagaaccgcagcccggcgcaagaaacaccacaagcatcctacgaaccccctacatacagaaccatctataagagaaacacactttaaatgtgcaccatcgggaatggaacgaacgggcccgcctcgccagggaacccttattcgcttgaatccggaaatagacaaaatggcaactttttggaatattttgagagctaagatgtgccaatttgcatccccaacaatctctcccgtcctgcaaatcttaattcaaaatcgaacgatagaaaacagggtgatggtggaggatgttctggctaagaaggcgcagaacccgttagaaagaaaccgccggtacccgcagccggaagcgagtggattctgagccggcccggttctctggtgcggaacgcgcggttcgcggcccctacctcgccggctgccggtccctaggcgggcagcgcggctccgaagctccagctgagcggagcagaggtattttcaatccacgcgccccgcccgcagccctgcgcccctagccctgccccgcgcgcggagttccctgggcgcgtaccttccaggtagaacgcccggcagccctcgtccttgagcttcttgagcagcagcccgagcaccgactcgccgcccgtattctcgttccagtcgctgctgctctcgtcgtagagcaccactgtgtcggtgccacagcgccgggtgaagcggtcccggtcctcgccgcgcgtgaagagcgcgcgcaccggcaggttacccttctgcaggcgccgcagcatgatgcccgggatggccacgttgatggccgactcgatgtgcgacgactcgtatagctcctgcggccggcagtccatcagcagcagccgctcgttgcccagctccagctgctcgttgagccacgccaccgtcttgctgatcgccatttccgacgcgaagggcacgggtctgagcgtatctatcatgggggtcgagctgcgggagagggcggggtgcctaccagacgcccctcggggcaggcataggccgagcgcaccgcgcgcgaagctgccgctctcggagcggggtttaattccgcctcgccttacccaagccgaggctagcggttggggcagacgagacagaagtaaagccggaggttctctctgcacccagctgcagccgctggctcttagtgtcaatgaatctctctcaatgaagctgcccagatagtttttgttcctccccagtgaatgaaatccaattaattcggactccgtgctactgagaggggaggaaaaaaagtctagcggcttctaatccctccctccaaggctgcacctcaaatctacccgggcgtctttctccccggattatttaagactcgatttgctatctcttggactcagcctcgcacaccccctgcgcgaggcagctcctcaatggatacaaacagcgagcgtctcaatggatacattctccgggccagccaatgagcgtgctgcggaaggggctgttgccgtggggacgggccggctggaacaggttgtgttgatgaattgttaatgagtttgtcattcacaaaaacggaaaggaatttccgctccggataagccccagtgcaaacaagctgcaacagcgggctcggcgggaggaaggagaaagaaggggaggcggcagcggaggaggagcagggcacataaaccagggcacttcagttgtctcatgtttccttctgttgagagttcacacttcgcgtcggaacttttgcgcaccaatggcgcaattagcatgcacaaaagcccttgttcgcgacgcttgcgttcgcgagctagctttaggaaaacttgtgctgacttttcgttctttgtattcccttcaaactcatttggacccaagttcgccttaaccctcccctcccccaaccccccttctttaggcggtgtgtggcatttgtttgccacttttaaaggcccagctctgtttgctctgatgttcttttagccgaggctgtgttggggctggtgaactgactgggctttagtgaccgatgaggtgttaaatgctaatccaacatatttcgaaacaaaccaggattttgttgaaacattttaaagcaaacaaacaaacgtctggttgtgcagaaaatcagaagaaaaccttttttcttaaaataacattttattttcattaaaacaatgtagagtgcagaaacaaactcttaggtcagtccagtgcttttactgtattccgctccggcggcgtggggagttacaagccattgttcgggggaatctatatctctccccccgccccaccaccaccatcgcctgctgggaggtcgcgctggttaatgatttctgggcaaggagctcggcttctgacgggggagccggtctggcggggctgcctgagcgaggtgtgctgggacgcgccgggccgggccagcagtccccgccatgggcgaggcgtgaggaagtcctcccgcaagacctgcaggctgcgggggctcggcaggggggctcgacgattggttacagttggcagggaggcatgtcagagggggcctccccagccctctcctgccgccgcctcctccctttgtccagcgccgggcactccggggagcaccagccgcgcctgcgcgctgcgctccctgccaccgccccgccgtccccgtctccccgcttgggcacggggctgtgcgcgacgcagtggacgggtgcggggctcagcgagggactcccgggtccatagagatctggggagggtggggggagcaaggacgagtgcctgccgggacccccctggctcctcgctcccaaggagtcgaggggaacgtctctaccgcgctgcaaagccagcaggtaactttggggaggtgcgggccaggccagcgagcagcactcggcccaggcgccgcggggcggacggattggaagccggatggaggcgtggccgggtgggggccgcggcggcggggaggcgcgttcccggcgcgcagagctctattgttatataaaagtgccgaagcctgcccctcccgagcggaaaaccacctgtgtgcggccggcgcggcgcgagagggatgcagccggaaggcgcgggccctaatccggccttccctccctaaaccccggcggaaaagaggccgcgctttgtcccaccgctgcctgagaggcggaagcgggggcagccgtccggcggggtgcggctttggggagtgtcccttgctgcgctttgcgcctaccgtgaacaccgcgagggcgcctaaggtcgcggggtctcccttcgcccgacgccccgcacccacgggcatgcctgctaacacccccgctgcaatttgcatttttagtcacccgcctcttccctggtttgggaaatgtaggctaaaaaaaggcggctgcgaggcctaggttgccaattttggagctctgcttcaggcaggccgcccctggaggagcgtgttcgacaaaggtggggattgccgagctcctctccgcaccatttttgggcagtccttggaacaaaactcgtatatttcactgggtatcttctagtttcagccgggggaggcctgcgctggagttgactccccctgtcctccacgatctgtcacagaagttcccaccccgagacgtttcagtcattgggacctggggacagggagggaagaggcaggatgcccttcagcggaactgagaagagcaaacctgttggaggttcagcacaggacctccaacagaagagaaagggagggaagttgggtttctactttgcctgttttaatacgcagctacttgagtatgactatagattcgggaggatacatcgaaactgtagttttacccatgcttctgaactttatcgccaagggaatgccagtgtttcctggcgcattgattaaagtggcgttctgactgctcagtactagaaatgctgcgaaaagggcttctggagtgggacggccctcgtttgcattatgtcccccgcttcttcctaggtaagcgcccttagttaaatcatttagccgttctaagttgcagtcttccacgtcggcataacgaagataaaactatctgcttcatagggtccctgtgacgacaaaatgggtacggtgaaacgtcctaaagtggtggtggggtgctattagccgttggaattaatttttcattctgaattgaggacctgtaaaaaggcctcggcttggggacacggtttgggcatcccacagatgccccttgaggctcgcttgacagcccgcctggactcgctcatctgcagcaaagccctctgagatactaccctaaccgatttaatccgttccaattcagctgtcaagtaaagggggtgttatcgtagaccaggatcaaaaatcctttagcacagttatcagaatggacccagctacatttctgatttctccctactggtcacctttggaacacgctgttctccagccacagcaaactgatacaacaatgcatattgggcacttaactgcatgatgggtaccgtcttgtttctgtgtttacttgcataatttcggacagtcttcagaaaaaacatgtaaattatcccatttacaaagattaaagaatttgcccaagggcacacagtagcaacagagtgtcaagacgtgaggccaaaccctttacagactcttaaggatgcccacatgcacggattacatagagtgttatggacactatattcacctccacgtggtattccctgcccacatgtgaagaatttcaaggtcagcattttgaattttgacctccaggctttctccagcctcacgttttctgttgcatcctccatgtcaaagatcaaaagcgaggctgctttccctgctccttttacacaccagtggttttctttgcacgcaacccttcatcagtcaaacattcactaaatgttgcatattttatctctcttagaatatgccctagatcctaatcttcacaagtgtcattggttatctagtgcgtcagcacagcacataagcctaggttcaaacctctgtcactcagtagtagtctgggcctcacttcattcattcattgatgcatttattctagattccaggaaagcagtagagaataaacagacaacaataacctgcctcactgaagtttacattctaatgaggacagtccaattaacaaaacaaataattatatattagaaagtgaaagcgctatagagaaaaagcaagaaaaggaattcggaagtgtgtaacattgggaatatatattcctccctcaaaggactgtgaggattagacacaactgagatgacacacgagaagtgtagggcacaaagtcggtattcagaagatgatttttaaaatatcaccacttcattcctgcataaggaatgctgttggtggtgatattgccattcctgtgaggcactgaggaaaagctctcttaggagataagggctgtagtagttggaagaattacaggcttccttaattccagaggcctcagtgcccttcagaggatatcattcatatgaagaggtctgtatttaaaaattggagatagcagatcatctgtgatccattctcatgagtgcagagaagcactttcatagattcttgtttcttcctctgtgtgtgtgtgt

SEQ ID NO: 58495 - DNA, 830 bp, Homo sapiens
ggttgcacaaaactgtccctaaggtcttctgatgagtgcttttaaaagataccaagaagttgtaccacaacagtagcaaccgagaaacacaagaagcctaaggaactgacagtaggtaacatgacttacaggcagtgataggctgtgagaaagccaaagggaatttcaaatagcccccaattaaaattccatgagggcagcccctgggaattgcagatccaggtttgcaatcaaactgcttctcacgtggaagctccgtgcagcttgccccatgatgaggagctgcaagggcttattgagcacgggttaatgatttctccaaacaatgcgggggaaggggaaaggcaggctaggttagacctcaaggcagaggtagctggacagcaacaccagaatcacacccacaagcatatctagggggagattggagcttccccatgaacgagatggcacattcacgcattgccaggatgataccacctgaagaaaaacatgaactattgtgaaattcagaccttagccaatttggctaagcttttaaaaattacggtcttcgtcagctttcttgcatttctgtttcccgtcatctgatgaaagacaaattaatttacattcaggctcctgtagagactttatctagaatttttttaaaagctagacggtctctagcaaagaaattcattaaaagatagcaatgttaattttttatttcagatgttttaattccatgccttccactgggaaaatattcattgattcttcttccttatcctttatttttacaaagcaggaaatgtaaaaagcatatataaatgtatatataagaaact

SEQ ID NO: 58496 - DNA, 3673 bp, Homo sapiens
aaagcattcctggaacccagaggaaccaggaagtgctgctcataaaagatgctttttgaactagatcttgaagagtgagtagcccgaggagtttgggcttgcgaattctagataacaagaacagcttgccaaaagggataaagttgtgaaacaaacaaacaaacaaaaaacagggtttggagccaggaggactttggtgtgagtggtgtttggccattctgcctggtgccttcctttgaatttaggttcgaccccctgtgggggccacagagagtcacctgcagctcagtcttaccccaggtgctgggcccaagtctgctcttagaggaaatgtaagtagcttatatcactcagtatcgggtcagctaggctctgggttctgttctgagctcctgctctatttctagctgtgaagtttccacttgattcctgtcacaggctctaccttgtattccagttcaaataactgggctttggcctttgttctttcttctacattctgcctctaagtttctctaagactggaattttgcctttccttatcagtccttcctagaacttcagtccctcccagaacttcagtcccctccttggccctggggcctcactccaggctgcttgatccacttatggttattgcttgctgggttcaccttcttctcctttctgcaggtggaacacagactgatgacaaccacgtgctgagatcccctgttactgcctagacacaaattgctatctaggtcctgtttcactgcctggcagaactgccttgctacttctggtttggctcgccattgcctgaattcctaaactccattctgaatattactagtgaaaaatgcacggcagggcgcagtggctcatgcctgtaaccccagccctttgggaggctgaggcaggtgactcacctgaggtcaggagttcgagaccagcctggcgaacatggtgaaacctcgtctttactaaaaatacaaaaattagccaggcatggtagtgggcacctgtaattccagctactcaggaggctgaggcatgagaattgcttgaacccgggaggcagaagttgtagtgagccgagatcacaccactgcactctagcatgggctatatagagcgagactcagtctcaaaaaaaaaaaaaaaaaaagaaaaatgtgctactttggtattgaaattagcatccaacatcagcttttggagatacaggttatgccatatactttggtaaatttcccccaagcatttagacttacagaagatatgcagtaaaagctgttggagtatatgctacaaatgagccttggtggtatggtcccaggccttcctgtgctgattagcattttatggcatgtataattttccttaacattgctcaggggattaggacactagtcatatgctgccagccacaagttttaaaaaaccaacttaggaataaaatcacaacaggaaatgaaggccatttggaaatttgagaacccacatgttctctatgttattttcttttcttatttttttttttttttaggaagagtttcaaagtttcaacctgttttaatgcttgcccatctggttgttttattaatgaaaacagcagcatcttctaatgctcttgtgtgaggcaacagtattttcccaaaaaaatcacagaaaaaactttgggatttgatgtaccatattttgtcttttactttttttctttgaaaaaataaatcccaactggagatcattttagagagagtatgtgcttagaaatattcagtgagtcatgcctggtgttgtaggtctattccggtgcgtggggtttccagaacaattacataagtgttagcatagccaggaacttttgacatttgtggcagcctaatggagttcttttcatcattgaaaatattctaactgttgtttccttaaatctaaaatgcataaaactagtgaagcaggataaattgattctgaggcatttctatccagtatgctttgttggcaaagaaactgaagaaaatttacttgaaataaaatacaggtgatcaagctgttaacaaatacagtgatctaatcatctggcagaaagtgagaggataaattgtaagtgagacctttttgtttcttctctttcttttatctatcaagatttccagcccaggcgtggtggctcacacctgtaatcctaagcactgtgggaggctgaggcgcgtggattgcccgagctcaggagcttgagaccagtctggggaacacggtgaaaccccgtctctactaaaaatacaaaaaattagccaggcatggtggcttgtgcctgtaatccaagctactcaggaggctgagctaggagaatcgtttgaacccaggaggcagaggttgccgtgagccaagatcatgccattgcactccagcctgggcaacagagcgagactccgtctcaaaaaaaagaaaaaaaaaaaagatttccttttcttttacagcctgaccatagcatattgtttacttgcacaaccctacataatgagattattcaatcacatgttttttaaaattcggggattccaaaagctattagatcaatacctttctttaatctttcaaaagatcaccaggaaataatgtgatattccactactactaatttgtttgttaaaatatatttttaagtacctgtgttccaaagtatctcctagtatgagaaactagagaaagacccaaccgaagtcattatcaattaattttttctatctcaaaggtgagctccccaaatccagagtttaggggctttctagggagggtgaagtccttagttttgtttttttttttttttgagacggagtctcgctctattggcaggctggagtgcagtggcgtgatcttggctcactgccacctccgcctcccggattcaagcaattctcctgcctcaggctcccgagtagctgggacttcaggtgtgtgccaccacgcctggctaatttttgtatttttagtagagacggggtttcaccatgttggccaggatggtcttgatctcttgaccttgtgatccgcccgcctcggcctcccaaagtgctggaattacaggcgtgagtcactgcgcccggccggaagtccttagttcttatagatgattgttcagtgtcttgcacaattttgctactgccttattttcctgcagataagacattgtagttatgggtgttactgtatttattggttcaaaagacatggtgcaaaggacaagtaggccaagcaggctctgactcatagaggttgctgcctgcttgtgccctgtgtgcgccttttgagtaaagagcacagtccaccaagtccagctctgcatgctcaagtgctattgaattctttccacctgaccacaagtacttgagcacctttcctccatagcagagctgatagcacagagcacactgagaatccctatagggaaggtgtggtgaggctgtgtgaactgtgtgggctgtggtcacgtagttgatcatgtaagtgggatcacaaacttagtaagcatcctgtgacacaccgtcatcattagagtgtgcttgttgatgttggagtactatgtgctattcaggactatttccaagaatttagttgaatatatatcctgggctgtaggatacaggatgaaaagaggatttggtgtccctgccaagtttcctag

SEQ ID NO: 58497 - DNA, 1068 bp, Homo sapiens
aaaccaattcaacagctcaaaaggagggcatgaaacccactcctcccacctccagtagcactccttttactcatttttttccccttctccaaaattctaaactgctcacgcattccagattgttcctgaggagaatgagcatatgctatcctggtgtggaaatgcctggtatgctaattcatagtttggaggagagagaagatatgaggtcgaactggaagatagtgaactaaaaataatataacccacctccatgcctctctctttagctcagtgccacatcttcccctgccaaagggaagccacggcgccacaacatcctgaggagagagagccttgatttttctgttggggacccacttttcccctataggagaaacgaccatcaatcacaataccttcccctatcctggccaaagggaggttggatccctagctgaaggtaggcctatcagatactcttgacctggaatttcagtgtggagagaagtgacacaaaaactgagaatggttggaaatcatttaccctggaggcaatgaaactaaggaaactgcattattcacaaaacctgaatttctagagcttctcttgtccttgaataaagcagattcttcagcctctccttctgtgagatactctatccttccgataaatttgtttgcttaagctatccagagtcaacttctgttaacctcatcacagaattctgatgaaaatagcttctcagatgcttcaggctccaatatgcaatgctaaaggtcaaaatttaggggtgggggaggagtcacttgggtcaaacatttactaaggcaccaagctcaatttttctgaagacattcttctcccagaggttggctttatggcatcccttacagagcgagggccgcacaggcctgggaaggaaaaggagcccctgagtccatcttttcctgcaactaatttggttaaaatcaccagattccctaattctcctaatgcaattccaatgagtcccacagattctagaaaagtgtcagtggtgctggtctaggtgggtaagtttcaatctgtcttgtaagaggcagtga

SEQ ID NO: 58498 - DNA, 2790 bp, Homo sapiens
tgcacagattattagagttagaccttagttgaacttcctattttagacagatggaagcagaggccctagcagattaaggatctgcttaacgtcttcaccaacagaatgagacttgcttctacattgcctctcaactggagaagagctggaatgagtcttttgattttcgcctatagatttacagaagaatatcttttgagaatttgagtagagaatatccatgccatgtaaagtggaatcttgacaaacttgtactcatgaaccccgttatgaggttgtctattcaaccataagaaacatttctaagtgactaaaaactagccatattctagtaggagtcccctattctacctaggtctgttctgataagagaaacctggagcaatctgtttcaaaacaataaatttatctgaagcttccagaggagtcatctttgaaaaactcataagcaaggagttaactgttgtaataagccgatggtaatagtgcaggttttattacttttgttttggttggttttcttttcttctttttttcttttttgagttcaataaaccacactgaatgttaataatccattagttctagaggaaacatttttagctccaagaaaattactttttcctcccaaatctgaacctgtaaacaccaaagctctttgtcttataaaaaggcttagcgttagttgtttcaacaagattagccctgttgatctgaagcacctgtgcttccagaaaatgtaggacattatcaatttttaacatttgtccaggaagctgtgcttggactaatgttatttatccagctgggtatactgactaggacagagcagatgaaagtagttggggattgtgtaacatctaagattggccctgataatcaatccagcctggagcacatggacatgattacaaaataccatcttccctttttttcaggatactgataaaacagaaggcagtgctatctgccataatccacttcaagaattctgcggacctgtttttaggtcacttagttgttctgcttagttttctggatggtgagcacacagaaggcacaagatgaaaactctaacacacaatttgcatcaatgacacccttggggttgttaaaagaacaaataaaaaggggtgtgggaggaggtctgtggaactgtgtgcgccacctccgtatgggcttactttggccttctccagggaggaactctgtgcaactgcatccccattcctgtcccctccgcctgcacacactggaatagcaagaaggcagcagagagcacacaaaaagacactcagtaggggaaacagtcccactgtttaaccttgggtgttcaatgaacacagtagggctgggggcgggagggccaaaacaggaagaggaaaaatacaagatggtttggtaagaaagcaaaaatagaaagagtcccaaatttttaaaaataaaaataaaatcaaaaccaaaaaccacaggctgcatttatctgagaagcgagaaagtgaaggaagcaatttaaactagaacgatgcaaaagtggcaggcggcacagggagctcccactgccttccccagcaggactgcaagggtgggaggatccattcaaaccaagcacctccaagcttggcaaaggattgctctctgaatgacgccaggcctcacccagctgcttggaaacaagcttgcatgaaggtaggagggaaaggattgcagagaacctgctggcgtgcttcttccctatctgagtttgaatgcttctcagagaactttaaaggctgacggctaaatttaatcagagttaaatcattgaaatgaagatgttctcatgcaatacaaatgaaaagtgattctgccagtgctttccctataaggcaatgaatggtacaggctcctaaggagcagcccagcagtttggaaatgttatgaattcaggggaggcaggaaatgtgaaagtctggttcattgctactattgtcttccggggatttttggcctggaggtgaaacaggcagggttttacagctggtattgtgcaatgactgagcacttgctcgctcccagttcagtaaaattcttcatacatggcatcctaactacattatttcagacagctgttttctctaaggaactccaaatattttctgcaaaggcacttacataaaccttacaaccgtggacttagactgaatgaaacattagtttgttgtttcaagacagtttggcaatctgatttgtgccagtttaatcattttagaaaatgtacaggtccagttctggttcagactggcttatcttcacatgatttattttccataaaagtaaatgttaaatcatagtgataagtcatgtatgcttgatacaatgtgacgagaagagcactttacctctgtaagctgtgcttccaaaaacccgtaactcctgtctaaccacaggaagaacattaaataaacccaaattgaaaaacattctacagattacctcactagttctccccagggtcatcccaaaccaggaaagtctggaaaactgtcacagtccagagaagcctaaagagacatgacaactaaatgtaatgcagtatcctgttgatacattgctattgacctttcctggaacaggaaaggatgcgggggagagaccaaggcaatctgaataaagtatggtctgcagtcaatagtaatgtatcaattttggttccttaattgtgacaagtatacataatataggatgttgacaataagcaaactagatgtgcaatacatggaaaccttctatattcacaacttttctaca

SEQ ID NO: 58499 - DNA, 1284 bp, Homo sapiens
tcctagtgtcctatttttattggaattttaccaagaggaaaattgaaacataaagacagggctgaacacaaggtgagggctgatgtgacaaaggagaatttctcttctggaactcatctacctggctctccactcaagcacctggcctctggacattgcctaattaccttctgccaagatagtgggtaataaaggaatttcaggtgttacctttgtaagagtttatgtattttaatgggatattatgaagagagaaaatgggtgctgaggaatgatttcagcccctacccaaacaacacagggtagtcacttagttttacggcagcggctatcatttctgagacttaaaggcacgactccctggagacaatccgggataatgtgacttctcaactcacgcatatgaaatacagtcagtgtgggagtgagtcctggagccatgacagcaagaggccagcctctaagagatgatccgtaccttgcttttcggtctttaataacttgagatattgctgccagctacttaaccaagctctgcaactgctgtaatgagaaagtgatgacctttggacttacaaagtcctgcactcaagtcccccatgtccaaatttgccacttcctggatgtgtggcccaggtcagcctacttaatcttgctgatattccagtttttcatcaggaacaaggctgatcataatactaccttgaaggattgctgtgaggactagctagagggattgtgtgagagtcccttgcccaatgtctggaacacagtaggtattgaacaaatattctttccttttgccctttccctcctttctcacacagcaggacagtggagacaggcacagcctggcagctcagctcctctcacaaatcgttctctctgttctcacgagattagcatttctaataggatcaggaattctttctaattcattgattattaatcctgatgtttgcaaataatctctcctgatttgcgcagaaccaagaacttaatgctctttcagggtttaaatttatttattattattttgttgttattcagtggaaaggtccaattttattccaccagaaattgtctggatggctctcctgctagataattaaagctaatggagcccaggagctatgcaaagtagacactaaaagaggattgtttaaaacaagatgggaaccgtctgctaatagtgccttgcagccagagatgtcaggacatctcagtagaattgtggtaacaaataagcaagaagcaaggtacctaagagagctaagagtggtg

SEQ ID NO: 58500 - DNA, 3253 bp, Homo sapiens
cctcccaggttcaagcgattctcctgcctcattctcccaggtagctgggattacaggcatgtgccaccatgcccggctaattttgtatttttagtagagatggggtttctccatgttggtcaggctggtctcgaactcccgacctcgtgtgatccgcctgcctcggcctcccaaagtgctgggattacaggcgtgagccaccgcgcccggcctataaaattttttaaagatcctggaagtggtataattctgttatctcaagttgtttctattatgtaacagacaattattgagtgccttgatacatgcaggatgttagaatagctaacagaataagatatagaccctatactctggagactagtcatatagcagagatagatacttataccacacctttaagttcaccttgagaagtactacaatagaagtgccaggatctaatgtacagaaatcatttgttctgtatttggctcatagtaagtgcccagtaacaaaatgatgacaataatgatgactgcagccaccacactttttctttttgagacagagtcttgctctgttgcccaggctggagtgcagtggcacgatctcaactcacagcagtctccacctcccagttccagcgattctcctgcctcagcctcccaggtagcttcaattacagcatatgccaccatgcccagccaatttttgtatttttagtagaggcagggtttcaccatgttggccaggctggtctcgaactcctgacctcaggtgatctgcttgcctcggcctcccaaagtgctgggattacaggcgtgagccactgcaccaggccagccaccacatttctcatagaatcatttaaatgctggtttccgtgatccacatttatagaaaaacaaaatcaagagagcaacgaaaagttactcattaattataaaatcactgctaacccactatatgtctaggctatggcagcaaatagcaaagattatgaagttccttttaattgctaagacaaagttcctcatagaacacaaaccacttccatagtaatatactaatagtgtgaggtcaaaccaacttaaatgctgtcagacagcatgactgtcctcttctgaacatgacatgggtcagatagagttatttttagataagagataagtcagcttaactacacttctatgtctttaaaaataaaagcccatataactttggggaccaagacagattaagggaatgctaaaattttccataggtagattttttttttttttgcatgtaattcctgattcccaccattgctttcagcagcccggtccacagacctgaacaatggttaatgtttaaaaaggtacagcgtgttctgcttaacaactctgctcatttcctcttcctgatggtgctgctgtgattgcagaactcaagtaagggctttttactatatgagaatacatgagaaatgatgctcaagtcataataaatgtgagattaaggtcacttgaagataagaaggttgcagccttaaggaaaaacttcagttggcttggacctctgcgggggcaggtttactgtagtttgtggaaataacccacagctactactgaaatatgtgtaaggatttcagacaggaaatgaaggaaatgctgcattaaactaaaagcactttaggatttaaataagccgaatatagattctctggtgagaatttgatcagggcactgctggcattggcccaccctctcatctacagtagtggaattacagtctgcctatcaagtccagaatacaaagtgctttcagtcctctgactatcctctttcctcttttattaattccatttctcattaaaatcccctgtacaatgttccatgagagtgagctcaaggcagctactgacatttcccataaatgatacgcccaatcttcttcctactaatccaattagttctacttccttcaaacttcattcaaaactcaactcatctgatctatgcctgatgaccttacagtcattccttgtcactgtaaaccctcagcagttattgttgactgatttgctcactatgaccatgtgtttacttgtgcctggcattaggcttggtgctggggctacactgatgagtaaaccccagtcactgccctcatggaggtcacagttcacatgaaaaaaacatcctaataaactgtgataagggcaatggtcaagataggcatgcggaagtatgaggacaagacattcatcctctggggtgtcagaaggcttcctggaaaagctgatgcctgagctggattttcaagtagaggaaggtcggggagatatagatggtaggtagtgtaatccatgaacagttgagatggccctgtgtgccatggtatgcttgggtgtattcatgactttcacttcatgagaagttccctgtatttgggttcttttcctacaattgaattataagctcttccaggaaccatattttctacttattttgccttcttccccttgggtctcttacagtccccagagagttttaaagagttgtgtttcaccatcctgggaaacacactgctgactcactgaccacctccaggccactctgcccaccgtgtgttaacaagactgtgtggccatggaaagatatgtaaggctgcaagccttttatcagctgtcaggatagacccaggaagacacacaggtctgactcaaagcacatatatactgcctaatggaagaaaccatccaaaccacttacccagaagttccacaagcccatcacatgccatccttccactatttcatattcttagcctttggtatggtgatttaaattttacattcaaagagttctgcaccaatatttctattaagatttcattggataattttaaaaagtcactaagcaagtatggaatggattttctactcatcccacagaaacagaaagtaaccattttttaaaattaaaatcttaaaattgatatggtggatacttttactgaggtggtccctgcctcaaaagttgccactgctgggcaactcactgtcctctcttaagtcatgtgactttctttagcagtggaaatacttagtgcacctcatgagtcttggagagtttcgttgagttcctttgctttgcaatgagaagatcggatccaggttgaggttgagggcgggtatatgtgctttgtttccggcctcatatttggcctctaggtaaatagaactccacatttcaaggctaccaaatctttcatggatggttaaatc

SEQ ID NO: 58501 - DNA, 382 bp, Homo sapiens
agggagctctgaggtaagcagagatattaaatgtatgaaactagctccctagagttggggaacaaaggcaagagattggattattagaaactagacactcaagagttcccttgctgagagctgagatggtttgttcacaaggaggaaagaggaatgttcattaaaaagacattctgaaaaggaaaaggaaatgcctggcattccttctctatctccccttcaacttaaaacaaacaactctatgtgcttcagaaaaataatccaaatagatacataaaaagtatgagaatgttgccaccataaatactaaggcccaccaaaattctgtagtgatttggaaagtaggttaaaaagtacatatgatataaaatatgagctttgt

SEQ ID NO: 58502 - DNA, 2543 bp, Homo sapiens
ctcaagtcatccaccaagatgatctctttcaaaagaactgcaggagaagtttctaaaacactgtgaatggtacggagcaaagtcgaccaggcttcgttatagaaagcaatgataacagaggtggtaggaagtgtcctatagttgaacttctgggacttacactcatacattcttttatcctctatgtgtcgatgcagggaaatcctgtcactgaggtaaatattgatggcgtatctctcaatgagttcttcttgctgcttcagttcatcctcgttgagctggagtttgctggctttcccccactccccaagtgcacgggaatctgcagggggcttcttataaagcggtcgagacaaatcctccgtatttttctggaggtctgagagccttcttgaccccagctccctggcacggccggctcctgcggaggcatgaaaagtagagaccaagagctccacgaagatataggccactgttaaaaacgccagcagcaggcagctcttgcctgcccaagtccacctcaccgccatccggattctcagggctgaggcgcagacgcggccaccaagccaccacgcaggggaagggcggcggaacccacagctcgagctcaggtacttcccagcaggttcttcctttcatgcaggcgctaggctcctttccagccacccaggctttccaggggtcacctgagccctctcggtcctcggcctccggcacagcccaactcctctctccctacttcctcctgctcggctcacaacttttcacaaactctccagccaacaccccaccctccccgggccgaggagaaacccctccccttcccactcactcctcctggtggttagtttgcgaaagtcgtccgccaggcccagaccgctggataggaggctcttggccgggccgggggctgggggccgggatggcagagggggccctagctgcgccccgccgcgctgggccctcgtctccgggtgctctcaaccctcatacaggcccttagccgttctcctagggaccctgcccggacaggaggaaaggtttccggcccatggagtttagtctcattacaaaagcaaaacaagaataagacttaccaagttgcttgccgttggggctgaggtccaaggaggtgatcgcagctttgtggcctttgaaataacgctccagaacggggtcctcctggaaaggaaagttgtcaagttttgaaagccgccgcagacctcgaattctggcggctgggatccacgctgccacttccccggagtccggcttgggaatggccacccaggcggcggcttggctgggcggcggggccgggcagcagcccacccacgggcgcggcgcccagtcctgctacagggagacgccggcgccagctctccccgcagagcccgcaaaacgctctgttcgcgcttcccagagtccagcgcatcgcaggaaccgcggcccctttgaaatgcacgttcccgggccccgcccgctggcccaaggcaggcaggtgcgaggatgcgcctcggctttggtactttttttttttttaatacttcctaggtgattctgacgcaggcgctccacggaaaccctccgagaattctgggggccgtggggccgcccagctcagtccggagctccggaactcggggaagagcgtccgggagccgggtctgggttccgcactccgtccgccccgatggcagagagtgagatacggacgccccgggacgaggggctcaggacccggctacggacacctgcctccatctccctccaggtgcggcttcggcccggacctggccccgcagcccgcgggacaggctccagggagggaccccccccacctccaacccgtccttaccgtggctgaggccatcgggggagtggtcggcccaaggctcctgtgggtgggggaacccggagaggggaggggagaggatggggaaggagaggggaccgtgcggctcccggaaccgtctgcccagagcggcagcgcctcccggtcactacaacaacggcggcccagtcaaaccccgcgctccaggcatggccagccgagccccgagacaccgccagccctgtaaagagaggacgggaggtatgcgccgggtcagctgtggccacacaccaagccatgttaactaacactcgcgttctccctggtttgatgtcaggaagtggggtagtaaccaggactggaataagagcgatgaatggaagggcgttgtgagcctgtgatcgatgcgatcagagttctattacgttttaaagagacagcacccgtgacgtttaaggtgatcccctaccgcttattttgttgacgtaaagctttgacatgaagaggggcagcttgctagttattaatatactaaaaggaactaaatcccctgagggcagatttgaatttatttaaccactgttttccacacagtgccctgcaggatattgatatagttgctggatgtgcgtgatgaatgaatgagtgaatgaatgaataaatgttgtgcatgcacttaataattttctgcgatatgtttccattc

SEQ ID NO: 58503 - DNA, 3512 bp, Homo sapiens
tgtttctatttacttcaaatttgaactcaccaggaggataaagaaaaagagaggggaggaggaggacccaaatgaaacgcacaagtacaaaaagcagattctcctccaatccctcttaattcccccaatccacccctgccacacacaaggacagggagtctcgggaaggctggcatcggggcaagtggtgaaggccctccattcactcacgtgggccaccatccaaagggttacacaccctctgccagatgagagcctcatacaaaccaggcccttacaagtacttcttattataaaatacacccacgctgaacaaaagccttattttaaaataagactgtcctcaggtgggggaggttaaacacaacaaaggcttccatgttgacaggcagacaagttcagatatatgcatatacctacacacgtatgaaaaaaatctatgtagctaatttatcacgaacagcaatcgataccaacagaagccattagattattaataaaccaagaaaagtagcgggcacagaagcgaaaggtggctgtctgcagcgctctaacccaaagaaaaggtaaatatcagcctgtcgaggagggtcgagccctccaagtacctgcagacccctttaacccacccggacgccctgccctcccctccgagccaagcagcgcacagggtgcgagcactcccagcgctgcgagtcccgcagaaaactggtgaatgaaatgcgcacagagaccaacctggctggtgaccgcggcgcagaaccaggggtcgctaaccagcttagccacaggattctcccgcaggatgggataaagagagcacagcccccaccccacacccctgccactggaacgcggtcctcctacagactccttcctcaaaaagggaggtgggggcgcaggcttttttctcttaaactaagtgaataaacacgaatcggaaacaactgtgaacatcctggggggccagacggaaggcgtgaggagaaagaccaggcggctctccaactcccgaggaatcaccgtcctgacacgccaacaatcaaccaccagggccaggggccgaccaggggcccccgctcccctcccgcagtgcgtctggggggccgaggccaaggattagaggggtgaccctcccggggcgcggggagagggagtgccgggcacggtgccctcaaggtcaccacgcgccgtggcgggggcgaccggtggcgggatgggctgtggcgcggccgaggcggcttcgtgaagccgaagacctgcgggtgtagaccagaagccccaacaagccccatccctcgggcccggagcagcgactcccagactgacccggcgctgaggtgcacggcgagaagcccgctcaccttcacaatctcccggcaagaggcaacctgcgaggggccccgaccgcccccgtcagcttctcccgaatccggcgcaacccgctgcgcacccagctatcaggatccccgccgcgacgcccgacctccgtgctccgcctggcctcccccgcaggtgacctgccccgccgcccccggccgcgggcgggcggcggccgccactcacctcgcccggcagtgggaaccattttccgagggggaaggaaaggcaggctgcgggagggtcgcggggcgttaaggggcagcgggaaacgcagaggatgggggctccgtcctcagcgcgtccgcagccggctcgcagggctcggggcgccacgcggaggtgcagctgcacctcggggatggggcggccaaggagccgagaggctcggcgtccaccagccggggctccctactcacgctgcactgcgaggaggcggcggcggcagcgaaggaggaggaggcggcgcccggccgtccccgcccagagcccggcagccaccgagtggccgcccgcgtccccgcaggacccgcctcctcggctccgcagagcggcacacagggcgcgccgcgctcgctcggcacgggcagctcagccggcctcacgccgccgtccgcaacagcagccgcgggcggggtgcagccacctccgtgagcgccgcagcccgccccactcggggcggggcccgcgggcaccggagagcggacggccgagcacgagggggctgcgcgcagctccgggcagggaccccgtctgcaccgggtggcctgcaagattgccggggtaggcagggggaggagaacgctcacccgttccggtctggcgctcccttttctccacacccacacgcctcccgctccacgctggcggcgcagctgctcccgctgccacagccgccaccgccgccgaagctcgcgccgccgccgctgccgccttggctgagcgcggtcacgtgacgcgatccgcggggagcctgggggcgggcgagtgcgcgcgcgcgcgcgcggaggaaccgcggctcggaccgggactgggagctgagcggcactgggagggcgtttaaggggaggacccggcgagcgcgccctcggctggcgagcgcgcgcctggcgattagaacttgccgcgcggtcgggaaagggtggccggagtgaggggcggaggtggggacttgcgcctccgcacgcccctccctttcttccttcccctgagcgccttggcttgccgctgcccccgccccctccagcgcgccccttccctcctgccgcagcctgcgattggctgagaggctctgacgtccgtgtttccatgacgtgttggtgcaggagggagcggcgggggaggagggggtggccaggcgcgcggggaggtgactccgtcagtcacagctgctgtttcggcgcggggccgggccgctgccgcgacgtgtggaggcaggagagcgatgattgccgcaggagaagtgcgggcgcccttcacctggggcccctcccgaaccgcccccgggcccatgcccctccagggcccaggagcgagccagcgggagggcgagggcgagcgctcctggcgaggacagattaaggcgaacccccagtcagcggacatttgagcggctcctcgccgcgtctctgcccccactccaaaccggactcgacgcctgtcccgggccgtgacgcacgcaccggaggaaaaagtgcttctcggctcgctccctctttggggaagagagctcactccccatgcgggcgcgggacactccatctctgttcctgccggtcgggtccgcaaacaccggggatcccagctgcggcgcccaaagggttaacgcaggcgttcggccagtgcaaaccggcctcgcaggatccgcgcttaaaatccgggtgttttcattttgggtttgtttcttctactatgccaagctggtggctctcttttaattctcttgtaacatctcaaccctgcacccatctttcctgaggggaaaaggaaacgggataacttgcggtatttcgatgctcaaaggtaaccggcggctctgctccaaccttcaagagattttgcaagttgaaaaaaaaaaaaaaaccatccttcgtaacatctacttaaaaaaaaaaaagcaagttttccttctt

SEQ ID NO: 58504 - DNA, 587 bp, Homo sapiens
ctttctaaaaacatttttcatatgtttttaacaatgaatatatagaaagcacgaaaccgtaaaatgaaatttgcgagtcccttttaccatgtttgttttgccatatttgtgccacttccctagagaaggatccttaatgagctccttgcctctcaggacctcctttgagccaacttgggcttccatggccgactctcactttagttatttcctgactcactctccacactgaatcatgcctattgtatgatgcactctatcacagcctttgatccctgtttaatgatagctagcaagtggaaaacaaaagcaagcaatgattgcatacttgtgtcttttcaacattttttttttagtaactgccagtttaatctttaccaggtcacatgcaattgtatcaatacacagtaatgatctctcagcacactaattttatttacattctccacatggcattgatcattttccatctattttactgttggtagttcctaacctcatatcctgtattggcaatgatatctttaaggtttttcatctaatgattattgtggggtttttttattgtttgttttcgagacagagtc

SEQ ID NO: 58505 - DNA, 1002 bp, Homo sapiens
gctaaattgaataatgtcatttgaaataaaaagtttgtgaattagcctgatttaattattcacattgtaaatatataccaaaatatcacgttgtaccccacaagtatatggaattattatttgtcaattaaaattaaaatttcaaaagaagaacatgagaaaaaaaaattcaggtaggtttccacagaacagagtgacaaaataatgagtcaatatagtgtaaacaaaaaggtaccagtatataaagctggtccagaagtcatttattgaagcacaacagatcgatgatgaactctgtttttgtggatttaggtaacagtatcaatagaggttaaacaaacaatagtcgtccatatcagactgtgactgtgcttaaatccccaaatggttatagggtcaataggcaacttacacattgctcttttatagggtcaatagtcaagttatacattaccctttttctgtctcattttcctagcatattaaggaaagaagatgctagcaattacatgttgttattttaaaaatgagacaagatacttacataaaatacctagtgagttactgcctcaatgcaagtgttgagtcagtggtagaagcagtgaacattgcaattatgatcatcaatgaacaaaaaagttttattaaaggaaagaggggaggaaacctgttattagcaggaaagctaatagtggcagttgctttatatttggtatgtcattaactctagacaaagacatacagatactccaagttgaaagaattttttaaaatgggcattttgccaaattttatcaaggcatttattgagttaaagaatgcatcaagtattttgaacagcacctgacatacagcaaatgttcagcatgttagctcctattactatcactattgctaagtagtgaagcaatgattagaatctgttctgtctgacaccagtgcacatcacacatcatagaagtgttaattagcagtgtttttgaggttaggttgtaagtcatc

SEQ ID NO: 58506 - DNA, 1765 bp, Homo sapiens
caagacttcagttacctgtaattaatcacggtccaaaaatattaaatggaaaatccaggagtaaacaagtcgtatgttttaaattgcgtgccattctaaggagctgataaaatctcccaacgtccccactccaacttgctcaggacatgaatcatcccttgtccaggtatccatcttgtactcaccacatgcctattagtcactagtcactgtcttggtgatcagattgactgttgaagtatctcagtgcttatgttcaagtaactcttattttacttttattacaatagatcaattttattactagttaatgctgttgatctctcactgtgcctaatttataaattcaattttatcgtagataggtaggaaaaaagtagtatatatagaatttggtactattcaaggtttcaggcatccgctggaggtcttgaaacataccttctaaggacagggggaataatgtatatgcaaatcacacgggaatattttaaaatgtactttgtgaatagggagaactggggtgcagccctacatactgcatttataatcagttcccacttaatgctgatgttattgtttcaaaaaacaccttttgagtagcaaaagcccagatgacaatttcttatttgcattagcctatttcctcctcagttgaatttcaatttgatttctcaaagggcaaaaggggaagaacttatacacatatgtttcatagtttaaaacctaagtctggtcacatttttactcaatgatattaagtatagatttcaagtttgcatacagtagcatttactataaaataggagaatgttactttttaggaataatctaaggacaggtgtagatgttattttttaatgaggttcaaatttagcactgtaatgaacctcactgaaaaagtaaagcaggaaatggcagatttgttttgatagaaaccaagaattttaagtgtgtgttggctttacactgtctttgaaactgtgctatgaaaacacaggatccaggaaatgagcccagccaagtgattccactctctaaagatgtcaaagtcggttctctgcaatatccaaatgttcctcttttggaagtgaaatgaggaaaggcctatataatttctagctgagtaaacgaagagtgctttattctcttataaatcagttacagtcccttaaataaaagcatgcttcctcctgaaagcagctgaaagtttcatctctttagaagaggctttgttttctctgaaaatgggcagggggactaattaaattaatttttctttgttcctttaagaaaaataaacttaaagaaacggagtatctgggtgtgtatgtggaagaaagtgactagctctgatgaccaggcacgtcacagtttcttgttttgactcaagaatgataaaacagtaatggctttgacccattgccctgctgatgtgctgatatgagtttgccattggtcactggaagatcaaggtctgcctttctgctgaccaagcattctcctaactattagtcactgtcttcacttagagctctctttcatgactcagtgcagctctcacatttgggctgggcaaaacggaagttcttacttaattcaacctgctgcaataaaaattgaaacaaacacgtcgcattctcctttttcttaaaaattttggtaacatcactgtgactagagcagttagagaaactctaaagcagaaaataagaaaatcattgcttaatgtgggatttcgatgtggcagagtgagagtttttac

SEQ ID NO: 58507 - DNA, 2421 bp, Homo sapiens
taagacctgtactttggcagaacctaagttcaaggtaatggaaaatgtaaatctacaagtgggttggtcagtaagaattatactgagaggctaatgataattttcattcattggttccaaaactcatgtgttctagcccttgagtaaatacttattagccacaggttcaatgtgcacttcacattctgcaagacattgtccctgagcacgattggagcattttctaggtctgtctcttcaacctcatattcattatttatcaagtgtgatgcatgctgtctccaaaacttttctcacacttgactccactaatactgctttgtttcaagtccttttcatctcctgcttgacttttgcaattgttttctaactgatccttttgctttttctctttcatccattttcagtggtgtcagtaagcatgatccaaatgaaatggacctcctgccctatttctaaacctgcatttggaactgcttcctatccctatttactttttactgtattactcattactccacctacagcttcagctgactcttcgaacttgaccactggcaccaccttttgcttactttggctgcatttttcgaactgtattttaaatcctccctctggcaacactgccttaagctatcttggtccagtctacaccaggactaggacaatgaggtctggactggactactgtggacagttctcttgccaaatatgccctggcctgccaagaaagacttggacttttcaccactgaaatggctgtttgttatgccatggatgctttatatatgcagtctctgtctaaatgtcctcccttgctccctactggcaggattaccattcaagaatctgctaatgtattgccttctctaatacatctcccctaggcacaataaaagtattcatgcattcttataatacttgacacatagcagtcatagtaccattactctcaatggcaaaactgcaattacttttgcaccacctaataagatttgtaaatgtttattacatgctggtctgtgttaatcacaggtatttcactggcatatgtgaatcagtcagctcccaaactctggacttcttaaggggggaaatctattctcttttccttcaatgtctttccttcattgtagcccaattcaaggccatataattagtgttcataaacactgaactaaattaaatcaaattgtttgagatatactcagtttaccatcttttcttagacatagttaacaaaacagtaatttttccatattatgccacttaacacattcaaatttcaaacttaattcttgcctgagtcattcttccagatgactgggttcagtcatgcatagcaattcaatttaccctgattttaacctcttgttacaataatggcttccaggtcaacagaaaggactttaaaagctattccagtaaggattggtgaaggtgaagggagaggagaacaggcaatagcccaatcatgtttggtacatggcatgtttgctgtactttctgtcgtgtgtgtgaggagctctgtttaactgacttgaggactgaagtactgaacaagcaaagaattgctcaactccctaggtaggtgggtctcagtcagtattgaacaggcaaccctgtcatttcagtgtgatctgtacttgttgggaaattgctgtatggtgtatgtacaacgtctttgctgctcaccaaggttgaaaacatttagtagtccacccatgggaaactgagagtctgtctagcctccagccattgaagcttgaaacaaattaagttcccatctctctcctggctatttgggtttgaacaatctctaaagtggtctagtaaacaggcagacaagactccacttgagatgtaaccctgtgtataacctaaagctaaggaaagtttatggaatcaacaggctggggcatgttagctctatagtgaaaaatcaaagaattgcaatttagaggtaggggtagggcaagcctgtgctgttgaataaaaatgaatgcaatgtgttttgttttttcaacatgtctcaatgtgagaaggaggtcagaaaagctatgggagtgttcagaaagtgatctgtgtcactgaagtgtggcaatgggcctgtgtaaattaaagatctaagccaatgtggaaaacacattttcagcagtaaataatgtcatttaaggagactgattgccaaagcagcctcattgcctaatgggggcctagtctttcattcaacaaatatttactgcctggccctggagctggcactgcagtgcattggtaagcaataacccctgccttgtagttttaatatttttatataagagactaataaaaaacaaatacaaagactttttttaaaccctgcaatttggaataaggtcctgaaaagggtgaagggagtgctggcgtgctgttctttca

SEQ ID NO: 58508 - DNA, 662 bp, Homo sapiens
atgtaaaaatatttgctaatttctgtatggtataagtaggctatttagaattagaaattatgctaccacttgtaacacttctatttattccgagcttgatagttgattttgcaaaataaggagaactgggtttttaagtgtggcccacaaatataaacaattctgaattcaccaaatacacatacacacacacagacacacatgagtctaactctagcacttagcaattcctcaactgggaagtagttaataccaggccttcttataaatctctttataaataatggttgtgtttacacaacctggaaatactgaatttttccctgaatgagtcattgttttagaatagtgtaaacagagcctgtgttaaggaagaggatgtctttgtctagtgaagctctgagcatttaaacagctgcttcgtttccctacataggtgtttgcatttcattgatggagtaatttccaaatagctttcaatcaatatatagtagacaagtggttgagaatgatctcttaagggggaataaaaaaacagaaaaaatgcaattcaaccattgcatcttatttatttaatttttagcatctgttattaagtaatcaccacaaaaaccatagcaggaatgtgaaattttgtgtaatggtccatatttacagctgtt

SEQ ID NO: 58509 - DNA, 1071 bp, Homo sapiens
tcaaaaatttttaaggccactgttttacaccctcattttaaatggtaaaaatagatatatctggaagagatataaacagacacatatcatgatttttttaaccaaattcttgttacacatttaattccatcccacttttgaactattataaacaatatgcagtgaacttagcttttaaaactttaactacataactatttcccgtgatactggcagaaatgacattgctgggaattttttcagtgtgaagtaacacagattgacaaattgtcacagcacttaacaagtgactttttacaccatagaacccaccttgttcagatactacagctagaactgtatcatgagagagccaccctcctgcacatactgcaggaaggagcaacatttcctgcatttgtttggttttgttaccgacttgccgccctgcctgccactttgaggcacagttgcagcgcctctgtttacatttttggaggacacgtggacaagcccaggcaaagccgaacagcacacggtacatcaatcacacaaggaacatctgctgattcccttgggggaaacagaatgattccgagagttggggcactgccaacgggaaattcacacagatgaaagcaacagaattcatgcttgcagtttcaagggggtggaggaaggaggagaaagagagtgggtaagcagcaaggtgaaatacagggttcccccccgagtctcacttgttacatatgaaaaggtttaaatcagtgttttaaaatatcggaactggaagttgtgaaagcaaaactattctttggtttcagatgtattttcatctagagaccttattaaggaatttgctagaatagttttagtgacccaaaaataaatattgattggttctgtatgtatttataaaagtatacctggtctgggggatctgaggctactggatcataagagagtacaatgaaaccagagtgtgctaacctgcacatcttgaaggactaacatcttccaggtttgctgttgtttacgtgctgcctgtgaaaagcagagttttgagtgttttcagcaccaaagtcccctcaa

SEQ ID NO: 58510 - DNA, 3299 bp, Homo sapiens
ctgcagaagggtctttcaagcacctgcaagtatattaaagaggcagatacaggaactgagagataaaggcagtatggttgagaggagatggaaaaccaatctagaaaccaggcagtgggaggctgtgtggttccttttgttaggaaaacttttcaaaggcagagtccttgaagcttttgtgcatcaaaagcatttgaaatgctttcctcgggtgcacttacatagtattgcttctgtggcaaagaaggtatagtcttgtcaaaatgctattgattttttcagaaggaatctagagacttcattcaccaatgaagccctgcaaacaagccctaaagcccacttttttttctataaattggtcacccactccagaaaagaacatggctaattaactaaaggttcacatttattcaatctgtactaggtactttgatagaccttgtacatctaccatttccttaatctttaaagaaaaaaagctttttaaggtaggaattataataaaattgacactcagagaggttaaatatcttgcacaagaccacacagttagaaatcgttggtgagatttgaactgattgtttatttattcaacaaatatttattgagtgactactatgggctgagtctgcctgtttctaaagctaatgctcttttcactatctaattcttcctggtaaaataaataacagtattctctgtctgttacaatgttctttcagaatgcaaaagcagtttggccagaacatgatatgctcatggctcagaaaagataatcgggcagattggcctggccaggcaagtgtccatatgtctcagcagcactccacgtgtatccattcatctcaaagctagatttttaaaaaagaatggtccactatagtcaggagtgccattctcgggaaagtatgactatctgtgtttgattacttctaaaactttataacgaggatacacttcagaacatctatttactagaaagttgaaaagaggtgaagatcagtacacgcgactcactaaaaaaggaaattataattttagtgccttacttttatataggcaatagttctttccagtgtactatttacaacataaatgatgagattttagccccataccattctgtatgatcaggaagggaatggttattatgtccatttctcacaagaggaaactgaggttcaagttgtcaaagtcattggtactttccaaatgtccaagttcacatcattatttaatggcagaaccaggatttatcttaggatctttctgctctttccaatgtacaatcttcattggtcagaatgagctaggttgtattagattgtattgcagtaataaatggccttcagatctcaggagctcactataataaagattgatttcttgttcatgttccttgtctgctgtgggtttggtctgctttgtgtttactccaggacttagcggacagaacagcctctatctggatcattgccagtaatgtggcagtgtgaaaagtgcaattgatggacctcacactggcttctagggcttctgatagaaagtggctttcacccttatttcattggccaaagcaagtcacagcattgcccacatgcaatatggcaggtgtgtatcatcctttcacagggaggggccccaaataggcataaaattatttcagttatatcagggtagtaatgtataaagtggttgtcagcctcccttccttgtagcataaagttattctttaataaatgcggtactgactaagaattattttaggtataatgagccaagcagtccacttaaatcatgtaaaaattaaataattcaataaatttaatatttaaaaaccaacaattctcaactatcactgttgagcactaaaccctctgcatttgcgaagagagcaactttcactctgggaataaactttccgtttctggcaagagaattggatagcaacattgaagttctactgtgaatgggcgtcagggtgtcatatttgaatgtgtaatgagtaaacattggcagaaaccccctttgccacgtgacttcaaaacaaacaccagtcagtagggaactaccagctgtgcccagtagaaaaaaatgcgctcatatatttttcttccatgagcaaaaaaatccccgccgagatcacctcccctcagaatgtagggcacgaatgtgttctcacatgagttcaagaacaaaaccccacctctggaaagtcctcctggcaaagtcatttaaacaaattgcagaggaagacagaagtaggacatgaaacagagttcaggcattcacagaatcttgcattcccttaaatcaattctcagctaaaggaaaaaaaaatacagcagagttggggagtgggagcatttagcaagagtttaaagtagctgatttctaatgttgactacattataatgtcccttacaatcctaagattctatgactccataagtttatgtgatgacaaaaagtttctgctttttcaagtacagaaaaaaaaagagaagaggctatgttttatgtaataataaaatttaacagagaactgcaccctcccacctccaaaaaaaatgtcctggtgactataaagttgtcttgggctaggcaatctgcatatagaattctgttccttaaaaattttttggcactgagtcagaacttgatttgtagaaatgacacctccccaatacttcttttagagcagtgagggggaggtagaatgaactgagttagaactttaccttagactttttgtaaaggtcaccaaagggaaaatccataaagagtcattgccctttagtcacttacacgtatgaaatgtgttgtcctaggatgaaagagaatcattactgtacatcacatttcggattaaataattgttgtgtcttgcttttttttcatgactttaaatagaattcaggttgaaatgaacctggattaataggagatgtttctaaatatgtcagttgtgcttttttgatatgcatggatgtcattctactattttgttggcataattgctagcaaatccccataactgatattcaaattttagtatagatgtaagtaaaagtgtgtccagttatcaaaatatagatataagtaaaattgtgtcttagttatcaaaataccaaatttcatttgagcaaaagaaatgaggggagagaagatggatatattaacttctctgataagcaacatactaccctgctgctttctctagctacttactacagaaagagtgcatggtcatgagatgcatggagtctctagtatctaactgaacacaaagaaacttc

SEQ ID NO: 58511 - DNA, 2323 bp, Homo sapiens
gaaagtcatctaaatcaagggcaactgtcttcacaagtagcctcttccatccctcatttgttcaaccaggaatcatggaacaccttctgcacaattctgggcccaggggatttgttggtggctatgacagcctctgaatatttgatggcttggaaggctaataactcatgttgccctagcacatttttacctcttattctgaaactaggtgagaaaaattactggcttttttgacaaaatgatggggcagaattctaatcctttctgggaaagagacagcttccaagaacatggcagctctacctaatccaaactcatgcatggaaaataacagtgaaagagccacaaaagcagccctcgatagctgcctatgactggcacatagcaaataatttcttcatcactagcattttagagagaagttaggggttgctagtttttccttctatttgcatatctaatttaagtattctttgatcttccacctttatgaagagatgccaagcaccagatcatcaacaatagaatgcttgatgctcaaacaccatgactccccactccatttctctccattctcttccgaaatccactttgtgagaacccctactaaggtcacagtgttaaaacagagattgtgatccgggtaaggctacagaaagtcactaatgaatttattgagcaagagatgccactgagaaaacccagggcactggtctaccgctctgagtttggaccctgatgaagtcccgaatctgtaaatacacaaattaagaaagcacttcgatgtcttgcagctctgagtgtccaagagccaagatgttcaattgcacatgtgtgtttttgcaggcttctggcttttccttctctctcttaatctggctgcctctcacgccacctctggcaaggtacactctggggaggccagaacaaagtttccatccagtcattcccttcggttaattattagcagctctggtaaaagttgttagtggggccgttggaaacaacaaactgaaaatatgtttttagtttaaccataaagttcatttgtttggggatttcaggaatcctgtcctgaaaggattcctgtcctgcccaagataacagtgggcagaggtgagatggtgaactaagaaatgatagataatcttttctctgtaactaattagctaggtgaccctggtcaaaggagggaaggtaactcacaatatgacaagttgggaactctgtgttctctcacttaatcctcataaaaacatataacctatgtatttttatctccattatacaaagagacttaaatccaaaactctctaaactttgcattaaaccggcttcatgccatttaatttacccaagttcctgtgttcttacctaagaaaacaaggagttggaattagttgctctctaaaaggtctttctaactctataagactatgaatcatttgacctagcaggaaataaacaatatttctctaataatttccgcaaagtttttctcttcttggcctttatttccccgtaaatttggggggcaagtagataaaattgtattcttcacataaacatgataaaatagctgttcgctcattagttgtctaatgacaacccctgaggctattgcttcactcttgtttatattgctcagttccgtcagtttagaagacattaaaaagcagaactgagttggctgttttacgttagtggtgaactttgtgcctcaactgtgttgcaaccccacagtttactcaactccacctggcaattcagctgtttgagataaagtagattttctcctggggaaaccagtagcaatttatcttgttcttgctctactgctggcatacaggaggttgggcatttaatagacagtcatctgccagtaggaggtaataattgttttttagattaaaaacaaatgaaatatgaagggagttactgccatataggaggaattggagccaatgctcaagtagtcttgtctagagccaatgtaagaacttctgttggaaaactacacttttatgtatatgtatgagtttctgcatgtgcatgcatatgagtgctttagcgtcttgtagatgtgtgcatgacagcgggtagggaaactctggaaaaatagccagtgaagacccaaagcaactcttattttctacactcacaagtactataagagttggatcggccgggcgcggtggctcacgcctgtaatcccagcactttgggaggccgaggcgggcggatcacgaggtcaggagatcgagaccatcccggctaaaacggtgaaaccccgtctctactaaaaatacaaaaaattagccgg

SEQ ID NO: 58512 - DNA, 2497 bp, Homo sapiens
caagtgctatattttaaagatatagaaaatattcaagatctgtttgaattgtgctgtttcatacaccatgaaagtgactctaatctagtagctcacaataaaatccatctttttatgccaaacttttaaaacgttaaagggtcactaatatctgtatcgggaaaaaaaaaatcaatctagccgtttggaaaaacccagcctttgagttccatttgggtcctttttggaccaactccctgacaccttcattaggaagtaaacacactgctggttgccaacgctttaaaaagagataatactgttaacaaggcctataaaagcgaggtgaccatatgtcctggctgatgcttatagtctgtgtttaataattaacagcaccctcttttactctcaagaatcacggtttggttgataaaattctcaaattttatcaaccaaaatggtcactcaaatggttatcaatcaaatggacacgctacctgtaaagccccacgatttggcctcactcccattaatttctctccattccagtttcactggtctttgtccaacccctcctgttcaccattactcttgagccaggttttgtgcatattcctctctctctctcgcctgccttctccacttaaacccctactcattcctcagatctcagctcaagtgtcccttcctctgggaaacctttctatggcagtcctatctctctattagagctctcaggacaccacttcaccacttcccttttcctcagcatgtctcagatccagcccaacatttgttggataaccctctctctgccactaggttccaagctcattgagggcaagcacagtgactatttttgcaaccctagtgcttatcacagtacttggcacatggagggactcaacaagtatgtgtttaataaatgaatgtaagagatataggtgatagacacaagacaaaacaccacttgtatattaatgaccagaaaatatcttaagaaagttaaaaaataactgaaagacttaaagggtagtggaaaaaagtgcaagaatctgagagggaaaaagagcttgtatctagtgatattacctaagagctccatccttaattgtaacaatgactaccggcttgagagagagaaatattcctgacaacactggccacctaacccttgttttaatgggttccaaactcttattcttacatcacaatcttaaacattataggggcacactgactgacttataaggctacacacataggttcaagcatggcctgaaccacacacgagctttaagatgcaagacttctgaaagggtcagaggctgattttccctagaagtctcttcaggttcaacaaagaatgggtcctttgtttcctataggattgcaaaataaattagcacaaagctctgctggctatctacttccctgatgtaaaccataatgctatacaagcccaacagcaagctattcaatgaggatatctgcacacagaaaaagcaacttgagtataaactaaaagaatccgtgatcactgactcatttatgactggctaggggaaatcagttacattattagtgattcaggcaaacattgcatcaggttacatcacaggaagaaactcaaattcaaactgacaatttataaaaaggctgcttttctttgcagtaaaggaaatactcacaccactctagattaagaagattgagaaccactgagttctgtttaaaaatcactgtttgaaaatctcttgcaaaagcatggccaaataccaatggtttgaaggactaaaaaccctgggaaaagtcaacttcatatagcaaagggttgttgtgaggattaaaaaacataatggaagcaaacatgctttgtacagggctacattgctatatatgttcggttgcattactccatctctcaacttaaggtgtcttcaatatagacaaaggatctgaaggactctttttttactgagaaaatagctctgaaaaccacaatgttaggcacacagctcaggaaagctctataaaataagatgcaaggcctgtgttgtctatttccatccttcacaatggaaaagcagttcattttccttcctatattattgtatttcaaaaacgcaagtacatttcttgcagctataggctaaagcaatctttcaagaaactcctaacaatcatactatgatcaaattgttaaaacacacacacacacacacacacacaagaaaacaatcagctatattttgttggcctccatgatagagtattcaaattccaagaatccaaacattcactagctatatgatttcatgtttaccttgacaacaaatgacttgtctccattattacacaaggaatgatgggctcagagaggctaagcaactggtccaaagtcacaagttggtacaagtcaagatttcaacttattggtctgagtcccagactagtattctttatgctaaattccaactgcctctcaaagaaaggagcctaattgtagactgct

SEQ ID NO: 58513 - DNA, 3825 bp, Homo sapiens
taatcatgacaagagattgattaaaatgccaagataagaaacgatttattatagagagaagaaaaatttctcatccaaaatatagaaatctgtacaactttgccacaatcaatatacatgaactgtacaaatttacaccagttcataatttaccaaataaaagatgactaacaaagttcacaaaatagatggtggtttgtggaaaagacttttacccaattaagtacaaggaaagttacaaaccagacctccactttctaaaaataagaagtttactcagtcttagaaaactacaagctagcaaatgtacagagagctggctggtgctaacaccacagttgagacagtgtctttttaagggtcttttttaaagcctgttgccatggcagattctggtcacttgctactttcaaggccaaaaacacaatacaaggtctgaccatttccccaggtcatgcttactagtttgtctttatgtacatttatacatatttaagtgctaggtaaaagtcttgtaaaatttccagtactaccatgtttaaaacgtttaactttcctattaaaagctgccgaaaaggttaacaataacaactttcaagtgtaatagtgcaaattcccctgcgagatttactgcagagaaagattctttgaaatacagattttctttaaaaggattgatgtaaaaatttaggtatgtctgggagaaactgaaaccaccctaggacttccctccctagcaaataaagtgatcatttacttggactcacaggctattaaaattaatcattgaaaggtactgtccaaactatggcactgtcacttaaaattttttttttttttaccattctatcttgtgccagatcttcacagctgtgacatggtttaaattccataatccatccccaagaggagcccacccaaagcaaaaatcaaatttatccatcatcatcagatgatccatccacagactatatcttaacctgatacagtcatcatattgtagtttttggaagggctcgttctgcccaagagaagttcctccttacagctgattcggctgtctaccatttgcacgttggtgctgttttgagtgctacctcctgctggtgaggcttcatacagcacacagatggagccatcctctccaattctgtaggacacttcataggggtcaacccagagtgtgagttcacttgggagaagcctgaacagctcctgactgctcagtccaatccgctgtgctgcctgtccaatcagaggatccattttatggttgatgcgaatacaacggtaacccgatcccttgcatggcttttctgggaaccagtgatgtttataatgttctatagaagaaaagaagaacagagaaacaacgcttaggatcgttagctcccactgcggattcctcctaccccaggctcctttgaggagcgaaaatgaaaactatcaactttttaaaatgtccaggattgcatccgttgttgtgcatgtgcggggatggaaaaagcgggcagggttttagaaataacacagtagtaccggacaaaacaatctccaggaaccaaccggttgagccgccaaaacaggaatcaggcgcgcagcctcggccagtcgggaagccactggcacctatggccaggcgagaaactgtttactttctccaccccaccccagatgcacacaatggagttgatggctttggagatgagaagcgccaccggactgttaaccccgaagggaagaaaaacaagcaaccctaaaccacgctctgggcagggctgttaattgtgccggtgacaaatccgatgattaatgggcaggggcaggaggcgcggggagacggcacgtccgttctgagctggctccggggcagcggcgcagcttcccaccccggggctgggccgccgaccacgcaacggttggagggggctgaggaaaggggacgtcgaacccaccccagccccacggctcctttgtccccaaatccgccgacggtcctcggaccgcagctcccgcctcggtgggcttaagtttctttgttgtgcgtgttgtcttctcctctccgttttgccagctggggggaagggggcgccctccgtccagcccctaaagcctcgcggggaaccgctgttagcggccacccagcgcaaccacaccggtcccgcggcggggcccaagcgcgaccggccccggggcgctgccgaggttcccgcagccccgacggccggactctgacccagggatgtggggcccgcgtccctccgacgccctcgccctgctcacctgccagcagctcctgcaggctctggctgaaggtctgcagctgtcgctcgctcgtgagccccttggtgcggagaaacttggagatgaaggacacggcggcggcgatctcgcctatcatggtggcggcccgggtgtagaagggatgcatgggggcggcgtgcgggggcggcccggggcggctggggctcggcggcgcggccccgacggcggagcagccaccccgggcttcctcaccgggcggaaggctgagaggaagagagggcgtgaggggcggacgactacttttgtctttctttctttagactaaaaaagttattttcgagacaggaggcggcaggagagaggaagagacgagcgatggcggcctggtcacatcgctcggacctccccagctgcctccgcctccagctccgcagcattcgaagatctcaatagctgcatttccagctccgagaggcgaagagatgcaagcgccgtgcagcaccctttatagtgccacgaaaaggaagtggcgtagctggagcgtgatggccgactccagccaatccgaatatcgcaccattgtgacgcaagccggttcggagccgaaaggggcgggaaaagagttcaggaggcgggtccagagatagggaagagagggaggagctgacgtaatccgcttgtaaacaaataaacccggagtggcggctggagacccagttgcttgtgtcgagggagggagggagggaacagagggtgcgcgtgtgaaagctccgcccccagccctagctcctccttcccgcttcagcaggtccaggctctgcgccagtgcatccttctccaagagtgcgctgcctgggcccgcttgccctggagtgtaagtgctgggtaaataagaaccgcctggcgcaggctgtgtctactcttcacgccgccttctcagatcgggctgcatgtccccactccgtgtttacatctcgttcccgctccgggtctcggtgactggctcctcaagccggagacgcgtgtggtgcggcgcgatgcgggcgccagcgctgtgtgtgctggcggtgcgctgccttagtgcgggggaaagtggagggaacggtcctgcggggcgttctgtccaagaaaaaggactgcagcctcggggagccagggtcccctcgcagacgagctgccaacgccgcggagccatttctgttccaccctaggggaggagtagggggatatcttttaaaagtttaattgcaaaataagtaggttagtaaggccatttgtggttgctgtttcagtaacttcagcagtcaacggagagaagagtggaaaccttactggatgcggacaggagagccagttactgaaagcagatataacgcggatcctgtaaagagtggtgtgtatccaaaaaaaaaaaatctgtacaatgtattttaaaacttgtgtgcacaaaactgaagattttcttttttacctagtccaaatgccgtcctagcctgagtcctgctctttataaaaataaaataaaaagaatttgaagcttgtgaaagtattaagtgtaga

SEQ ID NO: 58514 - DNA, 776 bp, Homo sapiens
tttatatctaaagagttaaaggtactttcacaggttatttaattcaattctcacatacaattagaaaacggagatattatccctccttctttaaaattaaaaaaacataagctcagagaatgaaaggggacgtggctaaagtggctccactaataagtggcatggccagtagttcatcacaggttttccacctttgagactgtccttaggttacttctttggactatgtcactctggccttttgaataattaactttacagagcaagagtgtaatgctatgtccctggctttcatcaggcaaaatgtgaaacacatccatttgaaaacttgctttttgaaaacacaggacctcattatgttgttcagtgtctctcctttaaattctcaacgacaaattattctccgagttcagagtcaggaaagtatctatatcatccaccaaaaccgggagctttcttttgttagatctagagagttatatgatccattgaatgtccctccttgccttggcttctagggtgctcagagcaaagttttatacttagtcactccggttctggttcttctcaatccaagtttctattgcatcctctctctcttccccttcacctcccaaaccactaccacctttaatatattactttcgctttttgtatttatcagtgattcaattttattttactgtgattttggtaaacatccgtagtgttcaactacttggcagatttgtccccctttttgtgataatagaactctaacacttcttggttacatc

SEQ ID NO: 58515 - DNA, 695 bp, Homo sapiens
gcaatctccacattctccatagtggagactataactgattcagggtatggtggagcatgtgtgtgtgtgtgtgtgtgtgtgtgtgtgtgtgtatgtttgcatgtgagtatgtaatctggctcctgtggaaagaaaacacattgctggaagatgaaatcactggacataattctttatttcaagccttttcagttacacagcttcttttaaaagtttgacatgcaaaattgttaaatatcaaaatgcaaatcatgtaatttctcttccagatgtcctgcttagctgcatattttttcagcctgtgtatgtaaccccaatgctcagtaacatagctttctgttcaaatcatctgtttctatgacctttgcctttattgattcgttttcttttttcctatttttaatgttgcctttgagattaaagtcatttttcttctgcaatagtaagtgaacagtgactttgctactaggaaataaattttttgataaggaaaaaaacgattggtagctccataaagtgttttattgtcgttgtttttgctgttgttaatgaacctactcagagagcaatgagatgtaaacactgtctccctctcgcataaaaacaaaggttatatagctagaacccaaaatgatctaaagaatagctaaaatgtattgagcacttattatgtgcctagaaatttgctcagctct

SEQ ID NO: 58516 - DNA, 767 bp, Homo sapiens
gatgaagagtaatcattataataattttacaacccagacataaaagagaaagagcagagaaagaccagttctcttgtgaaatatttgccatttaatatctttttatctttgggcaagccaacttattttcttacaaataagcagtaactagacacagatatttaagaggagaaatggaccttagatgttctgtggcataattttcctttcacataggggaaaaccaggaccagagcagcggatgaagatgccaagatcaggcactgccaattgttttgactacctctagggagatcctctcatgactcacacattgcctctctcttgaaaatgagtaaagagttgcccaaccaaattcttgaaataaggtcagttataaatgcctatagcagctaccttcttttttattatttagaaaatgatcattggaacttgttatcagaagacacaggctgagagggaagggatgtattttttcacatgtcaaggaaccaggggtaatataacattcacattctagagaaaggtcaaataataaattgccataaaatacagactgctcatgagctgttttgaaatcttggcttcttgtcaaaaaactaaaggtggaggagagtaaaatccataactgtgtgctttttgtgtaggtgtgttggactgaatgtacatatgattggatcatagagatgatcaaagaagtgtatactattcctcaacagaagaggacaaaaaacgaaattgacatttgttgacatttccttggcctt

SEQ ID NO: 58517 - DNA, 5334 bp, Homo sapiens
tagctagagagcagaaggggccttagccaaaaataatgatttgaggttcatctgcatagaggcaataggcaattaaaatcctgagtggtggaatcccaccactttgggagactgaggcaggaggatcacttgagcccaggagttcaaggccagcctgggcaacatagtgaaaccctgactctgcaaaaaatgaaaaaaaattagccaggtatggtggcatgtgcctatagtcccagctacttgggagactaaggcaggaggattgtttgagtccagaaggtcaaggctacaacaagctgtgaatgcaccaccgcattccagcctgagtgacagagtaagatcctgtctcaaaaaataaagtaaaaaaattaattaattaaaaaaaataaaatattgagagtttgtaagtttctaaagaaggacacaaaagagcagtgttacagatgctacttgtttccaacatccattccccatcttgacctccctaaccaaattcccatttggttcagctataccccacctcccttcagccatgtgcttccctcaaaggtgtttccagatacagagagtggatcctgagcaatctaagccaacagtggtccatcccatctctctcaggaatgtgcacaggacacaaaactaggtaatgagacagaagtaaagagcctaaggaggcagatggctcccctgtgcccctggacattgtcctatttctgtcctaactcaaaacctggaactgctatgccatcctccgcctctgagagtcaggcttcattgagcaaaatcatcccttgatacaatgaggaaccatgtctctgaaattactcaagaacaaccaaacctctgaaatcagtttcaaacatctaaaaaccagtgaaacacaaaaaagccttagtcagaagctaaggaagacaaaaaaaaaaaaaaattaagttaggttctaaaccaggtgtcaggaaagtgaaaagaagctggagattttgacagagcttaggacatgctggggtgaaatacccaaacagagataaagtgaacgagacctaggagacaacatttggaggcaataatcttttctgaccagcaaattcaaagagctgctcttcacgggattcctgaggtgattctagggacagcaaaaggttatttctgaactattacacacattctcttttttaagagaaatactcacatcgacagggcaagtcattccaaaaccagcctcgatacagctattactcagattcaccttgtcagtatgaaaatatgggttgaaatggactttgctacttgaaattaagtgtgatcacactcagtagccaagagaagcactccaatccaaactgcaattatgagaggctgggagccacagggagtggggtgtagcattcagaaaaagagaaggggttcattctctgggattttccctgtttgcagcctgaatcccacatgaatgttctttctcttccgtcattcgtttttcctgcgttcagcatcctcttctcacttctccctcacagttatctctcccttggagagagtaatctggacccttgggtgacagtcatatgtggctttcacgagctgctggaattaactaaaactcactctttcccaataaatctcccctgagccgacacacagcagctgcgaattcccagcatgggcctggacaaaatgctaagaaaaactggctgtgttcctgaatcttgctcgtcattggtccccaagaatcctggacattgacacccagatattccaaaacgatttgtgcttttccaagctcggctctttacttaacctgccttgaagatttggcactataatttcccagaagtgcaggctgggcttgttttgagaaaaggtgaaatggacaagagacagagttcagaaaatagtgattaaatacaaacagcaccagctattaagcaagagtcaaggccaggaaatgcaaataaaattgccgagggttgtttagacagtggccactcagaaggagaggtaatatttggttgtaaagtgaggccacagacatcttttctgatttaatgaatttgtgatagtttacttcttttcccagctttcatttcatttgtggggcgatggctgggggatgtaggggatatggaaagttgagcacaagtgcacgaagtatttactggctaaagatgcctatgcttctgccaagattgtgtttatttgttaaaaatatacttcattgtgttgttacaaaactaaatctgtccccagcccccatggagacagggcgatttggtttcagggtgaggtgccagctagtgctttcaggggcattaatgtgccagctgctcctccagtattcattttatttgcagtccctaggctggttttacactttgtgtttttttgtaaggaaatcaggattagagagccttttgtcactgatggggagggggagagaagtatcccctttgagctccatacacaggggcagcctaacgggcaaggctcaaagctttgatttacttctcattcgctaacattttcaaaaagaaaggatccaccgcgtcaagctgttctgttggaagcttgtaaggcagtagatttgggaactggagtttccagaatgcaatctgcagccaccaggccagggttacctttaagctccatgcagattaaacatgcccagcctgggcaagaggcatctgtagaaaggaacccctcaatatcaaacagcgaaaggcattattgggtggtccctgtttaagggctgaagagagtgagtggattcctattgatttttatgaagttaattctttttacccacttagaaatgccaaactgctactagggtccaaagtcccttcactggccagctcgtcccagtgcagtgaccagtgacctgctggaaccactccagcgagagtctcctctgctgaacaaatcacccagcctccaaaagaaagaagaagctgcttttagtgagcaactcctcttaaaatggaattgctaaacacacactcacgcatacacacacacgtacacacatcatcatgcaattttttggtggatgtttgtgacaggaagaaattactaacaaaatttccccaataatacttccctctttattttattattattattattattattattttgagacagagtcctgctctgtcacctgggctggagtgcagtggcagaatcacagctcactgcaacctctgcctcccaagctcaagtgatcctcccacctcggcctcccaactggctgggactacaagcacacatcaccatgcccagctaatttttgtgttttttgtagaggtgaggtttcagtgtgttgttcagactggtcttgaactcctgcactcaagcgatctgcccacctcagcctcccatagtgctgggattacaggcatgagctactgcacccagcccctctcttttatttttaagggcagaaaaagacgaagtgagaaaggagcctcccttatcctcctcctctttcccctcgcagtccagcatcaaaacactcattcttaggatggagcaggggtggaaaagtgcaggaacattaggccttgtctgtgtattggctccgttaggagctattgttgctcagcagctgttcctcttgcttcttaggaagccctgcctgcaagtgggctggggaaccagtgtgacactggcagctgggggaagtggggaggaacatcgaatattttttcaccatgagaaagatgggctttgtttctcaaaaaagaacagagatcctgtttctgggtagctgttatcagaaactggttttaataaatacagttggagagtgaaagtaagagtgtgtgtgtgtgtgtgcgcgtgcgtgtgtgttttgggggcgggggatagaagagaaagagaacataaagtcacaacctactcaacctttaatcctttttttaaggtaggaaaagctgaaaaatttcagccaaatgaaaagcataaagtggttgagaaaggctttatgactaagagaggattgcaatggaaaatacgtaaaaagagaagttaaaccagctggcttatttaattttgactccccactccccctttcacttttttttttaccttcagcctaaactagggaaaaatgtactgtgtaaatattcagtgtttttcttagtttttatccctaacaaaattttttacaggacttagtttagtgaatctccagagactgggtgtgaacgtgacttttcacccctgggtcacgggtcacttcctgcttcttcttgtaagtaaaagctcttactattccatgggtctggctgtacccagaagtgggggtaggggtgagggatgggagggtggagtgggggatgggggaaaactcaatgcctattcatttctcacattattttattgtcaggaacatttctcctcccatactaaagagctaaatgtcaaacttctattccaaagtacatgaataaattaatacattcctagtgtatgaatttattcatgcattcaataaacatcatcgaagcactgtcaatgtactaggcattgtgttaagcactgggaaaacaaagataactaaaatatattccctgtcttctacatcttcaaacaaacaggagagacagattctagaacagtaattacagcaattacagtaagtactgtgaaaaaaaaagagcaaaaaacatgtaactctgcccaggaagggcaacgaagacttccaggaggtggtggtattggaattgatttttgtgagctaagtaggaacaaccagaaggccaggaagaggaatggcatttcagacagagggagtggccatggaaaaaccttgttttcactttgggtaacgagcagtctttaatgttttactctgactagggttctgggaacttaggacaaaaaaaaaaaaaggtgggataggatagaattggcccatgaagtttagagttgaaaccaaggatccccaaaaggcaacatccagagataaaaatacacttaatccctagtggaaaataacacctacacatcatcctaagggcaccaagtaaaaagaaaaaaaaaaatgcagcaactggaggcagcacaagtttggagctgtgaggagggaagtctggagctgttaggaagaagccctggcacagagctataagggacttttagaggtaccgtaaggcccatctggggtggggcactgcagtgttaaagacgcagaacctgttcaggcaagagtggaagcaagaggacgcataccacagtctggaattgacagtcatcctgacagatgccctgacaattgaaaaagatggtagaaaagggggagtcaggggctacatcctcaggagccttgaacat

SEQ ID NO: 58518 - DNA, 815 bp, Homo sapiens
tgtaataattttcatttgctccatgcaaccacaatgctagcaagtatcaatttattaatgctgaaatatgaacattcaaacatatatgactatcatgtactctgtgtgtgtgtgtgtgtgtgtgtgtgtgtgtgtgtgtgtgagagagagagagagagagagagagagagagagagagaacagggggtggacagtagttatctctgcttaattatcctcaataaaaatgtttcttcaacctgcttcaaggcaatcatcccagctaacctgctctgaagccctttgggggcatttgaagaggagagaaggccctttgttccccctttcaacactgggctagagtctccttacctctctcagatactctgactcagtacaggctgcagacactgtaactcccttgatgagtaagctgtcctttccacctggagctggggctgctatctgaacaggagaagaaaagctgtgagtattacatgaaaaaggatagtcccttcttttcttagaactacaccccgccccccccaaaaaaaaaaggaaaatgaaaagggacccagggaaggggacccatatgccaagctggtgacaatagagtgtaagagaggttatccagagtggcatcctggagccattctggatgggtttgaattttggctctgagcttattttacaaacttagacaaaatccataaatcccctgtgcctcagttttctcatctataaaatgagaatcatagtgcctatactatagttctcatgtcatagggttattaaaacagtgcccaggacatggtgaacactcagtcattgccaat

SEQ ID NO: 58519 - DNA, 2530 bp, Homo sapiens
atgaatggctttttaggccacatctagaaatttagccttttcttagacaaggaaaaggattgaaggattttagatatagatctaacttgatttgcattttggaaagatcattataaatacaactcataagatagattcaacgggaaaaagatttgttaagaaaagtaattgagaggctgctgtagtaatacaggtggttggattgagaactgagataagcagatagatttaagagaaataaacaagagagaaataataggagatgaagatttgttgaacatctgattaaatgaaaaggaggactgaagagtccccaccaggtttctggatgtgggctgctgggttggtggtcatgccatccctggctagggaaatagaaacacatagtttagggaggaagggcagtccactcaggagttcagtttggcatatgtgagatgttcaataggcaggagactgtgtgagttttgatatggacctggaagacatcagtgtatattcacaagttaatgtcataggtgtaaacaaaatcatctaagaacagtgtggaaggtaagaagaaaattgaggctggatctctaaaaaacagttatattcaaaatttagacaaatgagatgatgaacaggagcagtcagagaagtaagagggcacacagaaaaaaatcagtgatagagaagccagaggaagatatggttttaagaaggcagagtcacagtggtgccccacacttcacagaggtcaagaagataagagctggaacagtcatttgactttagccacaaggaactcaatggggactttttgtctagagcaagtttctcaaccttggcaccattgacacataaggctgaataactttatgatggggggctgtcctgtgtatgatggaatgattagcaaaatccttagcctctacacattagatgacaggaccaaccccatttcccctgtccatctcccatttgtgccaacctaaattgtctccagacattgccaaatgtcccttaggatgcaaatcaccccaagttgagaaccaccagccagagtaatttcagtagaaagattaaaaataaagccagactgcagcaggtgccatcatggcagacacaagtcaagtcctccttggttctggtctcaccatcctgtcccagctgctcatgcgggatataagcctcttcctccaaaaataggatgcaatatttttggatggcaagtatttcaacttcctggtctcttttgttacactcaacacattgccagtatcaatgagaggtatgggtttttcacaggcttaactccaagactgtgttcgggaggccttcaaactgtggcccatggaaaagttttacagcattcccaggagtgtgatgaggacctggaaatgtgcataaggaagtctcatcttcctttgactgagttatcaaggagacagcttgagagatgatggctcattctgctgctatcctcatcacatatcccttccatgtgatcactctgagacctgtggtacaattcattggcagaggacctaagtactgtggactttgtgacttcatgaccatctatcagaaagagggcatcctagggtttttcccaggactggttcctcacctcctaggtgacatcatttctttgcggctgtgtagctcactggcctacctcatcaatacctatgcactggacagcagggtttctaccatgaatgaaatagagttattctcaagctgtcacaagatttttgctggcatgttgacctgtccctttgtgcttgtctctaatcttatggctgtcaacaactgtggttttgctggtggatgccctctttactccccaatgtatactgcatggatagattgttgatgcatgctacaaaagcagggaaatataagcccaggaaatagcttgtttttccagaagttcctcttaaggaagacttattcgtgtgatttgaagatgtggggcagagacagtgatatttctatagtcctagatacgcaaaattatggcagaaaatgttgatttccatacagtgtgatgcacttttataacaatcatttaatcttggggaaaaaaacagaccgcaaagggttatgagtgagcaggtagtgcaaagtgaagtcagcaacttagctggaaaaataaagaaggagagagagagatagtaactagaagagaatgtatgattaatggaggatttgggttttttttgtttttgttttttaagatgaaagaggctagaacgtgcttaaatgatgacaagaagatccaacaaagaacgtgcttaaatgatgacaagaagatccaacaaagaacctatatttgaaagtggctaacagatggagcaaagtctctagggaaacaggagagaatggggtgcagagaatctcctgaacaggttttccttagggatagctttataatgttgggagggactcaggactttcaaagaatttccctctgtttgcctttattgtttctgtgaaatagggaacaatctggagagtgagaagaaagtagaaaggcaaaggc

SEQ ID NO: 58520 - DNA, 1989 bp, Homo sapiens
agccaggtgtcgtggtgggtgcctgtaatcccagctactcaggaggctgaggcggagaattgcctgaacctgagagagagaggttgcagtgagccgagatcataccactgcactccatcctgggcgacagagcaagactccatctcaaaacaaacaaaaaaaaattcctattccctctaccctgtattcactgttcactgtactctaccctacagtgaacaaaaggtacctaagccaggacatgcccctgaatcttttatcctgataatcatattttcctaggcacaaggcctgagagttaacaaacctgattttttgatagtatttgtcctggaaaataaaacaaaatgtctttctttaagggatagtcttccttttgtcaaagtgtcaagggggaaaaaaggggaaattttaaaagcagcctatttcattgtcaccacttcataaacactgcactaaagggcaagagccacgctttattcctcttgcaaaatcccaaagcacccagtacaaggacctgcacttagtaggcggacaattgacatttgttaatcaatgtatgaatgatgagccaagtctcatagcttccatggagaatcttaaatgtcactccttttgaaatgcgaccatgcttctcaacctactaaaaatttcttaatgaaccacccacagacacagtcttgtgtgaatatctcctgtgttccccaaatcctttgtgacctatggacacaattgctaaacgtgagtcatgcttctatcactcccacacaatgggtatttttaatgctacagcatttcctgaagtcaagcgctcaggaaatggtttttgcaataatgacctcagcctccccatattccccccaccccccatcacagaatccaagaataactgaacaggtgtccaaatacccagaattacccaagaaacctcacaacctgtcttctgttttctatcaaagtcatgaggttaacctcttgtcctttggagttcgaaggaatgtgtccaagaactgaacacaaccatatctgtcctttatttatattgagacacagtttatttccaagactgtcaatggtctccagaccccagaactaaatctgtataccatcatggctaaaagtatgagttctggaattcaaaagccttagagactgaattctgactctgccactaagtatgtggcttcagccaagtcatttagcctttcagagcctcaatattctcacctgtaaagtggaaataatggaagaaactatttcttggaatgtgtgaaaatcactcacgtaaactgctgatctccaggcctgatacacagcaaaatgcctagtacttgctaattgttattgcgtcaagtttccccagattgaaccttaggtctggtcagtttctcctggacagcagtcattttgacagcttaggatctttaggtgcccacataccttcagaacctcaacccattcttgggagcactgtctgaccaccctctgaggaccagaagcaggaagagagatcagatggtgagaggataaggactgttgatacccaagggaggttgtaaaaccacttgggcacacccaagttcaaaacaaagaagccatcacacgagggtgagagaagaggtatttactcagtgaggccccttccaaccctcatggtaaaagtctacacttgtttagaaaagagtatgtctgttttatgattttattttttaaaaagggaaactcaacaacaaaaatgatgatgaaaatgacaatctgactatggaaaacaggctcctgctattctcatcagaccatctgacaaactacccaagggagtttccgaggcctcccaaacagtaacagcagagcagccactcaagaggatgccccggggagccgccaaactgcaattgccctggaaatcagattcgaacagctcagacatgagggcaaagggcgggatgcatgcatccctaagcaccagcccttcagcccagcagaggggca

SEQ ID NO: 58521 - DNA, 2929 bp, Homo sapiens
gtggaatctaaaaaagttgagctcatagaagtagagagtaaaatgttgattaccaaaggctcgggaaagtggggatggggttgaggaaatgttggtcaaaagatacaaatttttatctagacagaaagagtaagttcaagatatctattttatgtcatggtaactatatttaataatagtatattgtacacttgaaaattgcaaaaaaataaaaaatattaaaaaatatgtgaagcaaaagctatttaaaaaataaggaaattgaacaaaactataatattagaagggtatttaagtacaactcttatgaccttggatagttcaagctgaccagggagatgaaataaagatacaaataaatacatttttaaaaaataccactgaacctttttaaaaaaaacatatcgatgcctgtatttctttccaggtatattacaccagaatatctgggattgtggcccccaaacctgtatatttaacgagttctcaagataattcttatgcagacaactctgcaacagcctgcattgagtagccaggtatgtgaatcatgctcaaggccaactatgatgcaggaattcagaatccaatagagaagtgttaaggtccatttcatacttctttatctttgactctcaaaggtgtaacgcaacacctggaacttagcagatatttggtaaatgtttaataaagaaaacttaatttaacctgaccactgagtgtttcggtggagagagaaacacacaggaggtttatgcttaatcttgaaagagataaggctaagactcatgttctatacacttaattaaatagccatcaactgcaaccttcctccacctatctacactcaaacattaactacaaaacctgatcaaaaaatcattattttaaaatcaccaacccacggaagctcctttagttagactgaagttcacgtgattgcttaaaccttttttctgggaatggatcttttatgccaagtaggcagggttactgccccataaacctaccttctgtcattagctttgactgttgacacttgcaatgattagacagggttgagcaaagggtatttttgcagtctgtggggaagagtatagaaaataaacattgcatctcattacaaagccctgaatgtgcaaaacatactggtccaaatgccatgattagataagcacctgcaacactcattaactttgaagggaaattgaagccaaatttgggcccatatgccacctgtccttacacttcagcaatcaggtgacctctattctcacattaagttaatttctgaaacactctacatgatagctattgccccagacttctaataattaacccagggtgtcctctctcaaacatcctgtgaaatagtctccatctacaatttctagggtttcagatgagcctttgcccataacctgaacatgtcctttttaaagataggtcattgtaaatgactctgagtgacagcctaatgctaccccacaaagtagaatgaagtgtaatattgatccactcatccacaaacacaaaaatgcatgtgttttgtgtgagggcaaataattactaaagtagccagaataaaaactaaggttgacacaggaggattgagatgatgggcaagtgatctctaaagaagagtgcaccaaaggcctctctgtctcactctgtaatagtctatttgcaaattgccctacatgctgtatcacatgtagctctaaaagtctgtggctccaggcgagagcctctaagtaacctgagaaaaaactacatttggaaatgtttccgtgaggctactcgacaaagtagctcccaaagttatgattcattcaatcagatggcctcatctggtcagggtgcaacttaggcataggtgtagggaacaattggccacatggagtaagctgaagagcctgggaagactcctctgttcaaatatgtctttactgcttaagtgttaaaggtcccagaatcccatcatgagagtccagttcctttgtatgtttagactataacagagccatgtgccacagagaggagtacaggctggagagctgagtggtcagaaagataattggatgaaagaggtccctggtgtgccagaaagatctctccagcaagccatagttcagataataaagaaaattaaaatcggtgaccttctgtggaaagtgaattgattcatccctctcttcccagcaatttcagaattaactgacataaagccatggatagagagctggttgtgcaatgactacaaggtctcaaaagcagcaactgcagcagaacacagcacaagcttcatgagaagcacggggaggacagagatggcaattccaccaagaaggattaggaaggattttttttttcctttcccaagactgaacacatcatgtgatgctatgtgcaacatggagatgattaaaatcagcatgcctactgaagttccaggactagcaggaaattgtgaagcctgtactgcaaagtaataccacctccaggttaccagatggggtgaggggttactcagaagccaaggcagctaaagaattataaatctctatataattctgatatccagatagtaaagaatttttagtctatgagacttctaaatagcactctgtggcaggagcacatctcccttggctcagatatacccaggagagctatgcctctcagcaagatgctatgaaattaattacctaggggaacaagagaagcattgcaaagactatggtgtatcatatgtgcaggtgatctttttttctatgcaaatattattgatacgggtaacacttcaaatcattaacattttaatctgaaggagaatccttctagtgacagatggggtccagggttgaggtgagaggtaagggagaagacaagttctgtctataagcccactctgatacgaaacagaacg

SEQ ID NO: 58522 - DNA, 4806 bp, Homo sapiens
cctgcaattccagctactcaggaggctgagacaggagaatcgcttgaacccgggaggcagaggtttcagaaagccaagactgtgccactgcaggccagcctgggtaaaagagcaagactctctctcaaaaaaaaaaaaaaagaaaagaaaagaaaagaagaagaaactaagtggaaactcatcaattcatcaatatacacagggaatgcatgcaaagattagtgggaaccttagctctaagaatatacatatgttcagggccttgaccctgtactccagacaattagctctgggtgtgtcaatttcagacactcttcttcacagagccccagtctcctgccccatgtgcaacactatctggagctcagagcctttgtacccaatttcacttttgccagtactctgctttatgactggactctgcctccataactaatagatcaattatggtagcacttacaatctgccagggacatgtctacatgctttatatcctaaatcattaagatccacaaccaccctattacttaagtatgattattaccaccagttcacagacaagaaaactaagctacagagagatcaaatgccttaactgaggtcactccactcactccactagtaaggggtgatgttgggatttgaatccatgcagttggctccacagttcacactattaagcagatgtttctctaggaagcttttttatccacttactgagaggctgggggaaagagttccagaaagcaaccacctgactcatgagcagtgaccattctctgggatatgacccacccacttcactgatacctagtgctcatcactttgacaaatacaactaagattgtttcctgccttgggtttcatgattgcaattttcagagctggcctctggataaggtcctttttctagacattattatgccccatatttgtatttgtcaggaaactggagagtttattccaggaactaatttgaaattataagaattttttttcgtccgtcagaataaccattcatgaaaagataatgcatacatcagtgaaggaaggttcttaaaatgggtcagccagaaaaaggaagaattaaattggatggcatgattacataggacaaccaaggacaccaaaggggcccaaagaaaagagagcccatgaagaaatagaactgaccagcatgaaggttgtacttggatgtttaatgtgaagctgtgttcggttgcctttttcagatggagagaagacggtcccagtcttctaggtctgggaagccaggtctactatggaggccttaactcctgtgtggaaaaggctgaggtagcacatttcaccataggaggaagaagagacaccagtgaaggatacacagcagtaagagatatggaaaagaacaagggtaatgaatggtaattaattcatttatttgcccattcattcattctacgaatatatatggagcacctactgtgtgctaccctctggggcagattttggcttcagggagcttacttgacagttgggacccagaaaatgagcaaagcaattgcccctttcttcctgtgtacatatcagaggggtagatggagtgaatgctgtgagaacataggacaggaatgaaccttctgtcagggtctcatgaaagcccgggttggtgagttttaaaatgagacctgcaaaatgagaaggaatctgtcacacaaaatgtagggagagagggtaaggaagaagaacatttcaaaaagaagtgttgttgtttattccccaaagatggccagaaaagtgactaagaaaagatcacaggactccaggttgcctgggcaatctctgagagccctgtctagggtgaagtgggagtgagaccaacagaatagtgttaaggggacagcttatggcaggaaatggggacaagcaatgcatgtgatttgtctgagctggagtgggggaggatgagcttggttttgctatgtcaggccattagttggggcaattttcagtttccatttgagcctgagcctggagtaggtgcattccagatatgcagaaatcatgaccatggaatgattcatctccagttagctccctcaaaaattccccacagtcactatctgacaccttttcctcaggcctccaccttgcacctcccctgccccctccagaatgactttgtgtcattcttcactgagaatgaggccatcagagaaagccttcctcatttctcccttttctacctctttatttctctagatcttcaccctccctttttgggagaggaacacttcctccctcctgcaaccttcctccacctatctatactcaaacattaactactaatgtgatcaaagaatcattattccttcattccataaataactccacaccagcacttgatccctgtcttcctttctcttctgtaacttgtaccacaaatcatgcttgtttatttaatttctccctcactaccaccatctatttctaaaccaacagcctactcaagtctgcctgcttcccaagagtcctcactcaatcctgcttatctttttggccaacctccaactctctggaatttgacctcaggacttcttggagatgattggatggctgtttttaccttctagtgacccactcactcctcagcctttatcatctgactttccagcctgcctatgtgttttttaccctgttgcagcccctgccaccaccccagaatgctgttctgttgcactcctacccgctatgggactgtgtacctgccaggcctctagatgctgcatccctctccttgaccctcatctgaagcccaaccctatgccaatctatagaatgaaccccaattcagacaaaagagatgtcaaggtaaccaactccaccctctgagatccacgactagccaaggcttgccattgctccacgttacatctctgttgtgagagccatcttgattctcatgtgtgagcccagatttggctctaagactgatctcttagtttcattcctgttcaacctatttgttgagcatgtattatgggccagactctggcacacaactcctacacatgattacccctcccgttcacaacacggcgatgctggagagccctacatagtcagcagacccatgctacagagggtttgaggaactcttccaaggacacacagccattccatggtggaaccagaactcaaacaggcattctgattttagagcctttgctcaataaatagttataacagaagagagagtggagacgtgtgtgtgtgtgtgtgtgtgtgtgtgtgtgtgtgtgtgtgtaggggtagaagatagtggtgggggagctttctgagaccctgctactcatgccagattttctggtcctgattagctactgcctggctgccagaagctgttattatcactcactcccgtgctcctgtcactgggcttgtggaaacttgcccttccttctgctctcggtctctgatgctgacagctatgctggaaaatcccatgctggccactgccacacttaccagaggcatattgtacgtgctggtctggacttcctgcctgacccctacgtgtcctgtgcctgccccttcacaggaggtcggtctacttcctggccagggcctttccagcctgtctcacccctgtgcaggtaacagagctcttttctctgccaccacttccccacggagtcttttccatggttctccctgacagaattcatgctacatagtctttgttaactcatggcatgcactttcttcctgcttctttcctcaatttatgtgagattaagttaataccaacctatcttgttaaccccttctaatacgtaatcttctttattttaaaatttaaatgtttgttatattgaattcagtaactagaacattctcctccaaaataagaatggtacaaaaacctcaaataagtaagtctgttggggaaaacaagttcccccaaagaataaatctaccaggagagtaaaaacgatgataatcagaacaatgatcaataatcactattgtcaaagtgcctggcaatcaccaaacaccagattcatcggctcttcaccgtcctgtaggatgacttctgtgacttgctaaaacccacacaataagtataatggtgacaagactcaactcccaggctctgacattaagtcctattgtcttcctaaaatgctccttaaagagaggatttctgtctcacatggtcatctggatcatttgaaaacttcaagcagaaagtcccaaggtcaccattaaatgttttccaagattacacatcttcaaacagaaacccaaaataatgaaaaccaggaaccaagacttccagcttctctaatgagagtaagtcttagttctttttccttactccacaagaaaaattatatctcccaaggggagttatgggctttccaaaagaggagcaaagggatttgagcttaggaaatgaaactttgctcagcactcttcaggaatgacgttctccttcctcccctataacaatgcaagtgcacattcattttcttacattttaaatcactgaacaaaaaggcctagttttatttatcctgctgctgccactgtggcaaaactaaatgtgtggtgcataaactgtttataaatcttgtctccaacaagagaactgagtgtgcactttttgaggaccttagttcattcagaatgatgagaaaatttgggagaaatttttctcttgatataagagctgtataggccaaatggacttccttttctggcctaaatgctgtgtttataaaaatggtgtgctgtaaatagcaaagtatagaagtgaga

SEQ ID NO: 58523 - DNA, 2581 bp, Homo sapiens
gtgacctttaaaagaagaaaaacccagtaccattttttaaaagcaccctcactccaaaatagagatggcataaccctactgaagtggtctgctacttcccttttagtaacagtgaaacctagcaaagtcttccaaaggaaaaaactagaaaaaaattaaaggagtaacagtttgagtggcatatacacagaagaatgaggggcactgttttatggaaactaatctgtaggtgaaacaatatgggcattgtcacctggagatttgccatgaagtgagtccagatccatttcttgataaagtctacataaataaccagactattcagtttaccagtacatctcattcctatagcaatctggagtattggattgcattaaggttctactcactgaagtaatcccttcacagacttcaacatgttaatctctttacttgcttactgtttccataatgtaagctcataaagacaggaattgcatctctcttattccctgctgcagtgcaattaccttactcagtagctgtcacataattggggctcaacaagtcattgtttaatgagtgaataaacccaaagacacatgattaattagtggttcaatcacccatgaccattgtacagtagagatgacctaaacagttatagatttacagcagtcactaataacaagtcatcaaagtaaaactcaactgtgacagattaaaaggagcataaattctagagtcagttacctgggttaacaaaacgtattcaccacatgcttgctgtgtgaccttggtcaattttcttaacctctctggtataatttgaatatttgttcctgcccagatctcatgttgaattgtaatctccaatgctgggggtggggcctggtgggaggtgtttggatcatgggggccggtccctcatgaatgggttgggccatctctttggtgttaagtgagctcacgctctaagttcacaggagatctagtcatttaaaagtgtgtggtgcctctcacccccactctctctctcttgctcctgctctggccatgtgacgtacctgttccccttcaccttccaccatcattataagcttcctgaggcctccccagaagccaagcagatgcctgcactatgcttcctgtagagcctgtagagccgtgagccggttgaatatcttttctttataaattacccagtctcagatatttctttatagaaatgcaagaatggcctaatatactctctcttcagtttctttatctgtaataatgacaataatcaaatctttagaattttgccaggactaaatgaagtaatgaattaaggcatctaataatgtgtgagacaatgagtaggtgcttagtaaatgtcagtgctgtgcctattttccctccgcccacttgccacctcttttctaataataagaccaagtttatttaccctgataagcacgtctcttctctcatttccatttgtggcaatgtaggcaaccacttctttctctttcagtgctgacctactgttttgttggaaacagtcccagggctctgggctttagagattgctgttggattgcgaagcattatggaccaaatccaagtgctgcagcacataatggctctggccatttaaaaaatctaaactgctgtagctattttatggggtgcaatatatatccaaaattttataatagggttaccaaatgcagtgctctaaaaatcaagaatcattcaaaattttctcatctctccacagaaataaattgctatgttggttaaaacagacaccttgctcaggagtctgaggttttctctaagatgttccacaattatcatttaaagccagtgcatgttattcaaacaggaaaaggtagaattcttaacttaacttcaccagaattagactttcattctgtgatattcgttatccaattcccaacatttccggtacctccaactctcttagatctaccctcaatccccttatttacagagtcttcaagtctcagaaacacttgcatttatcctgtcatgtacacaccctaaaagtcatcctaggtctttaaaaagacttacagatgaccgagccaaacacaatcctttccctattctaagtcttactcttctcaacatttgagactgcctttgcttagaccactggggcagatctattgtgttgctacctgagtgctctcctagcaattagacatgtctttaaaacaggacatgtattacttcttctttatcttgcattataaacttgagcaatgtctggcttgatgaaggcagtgtttctactatcttggttgggttccaaccataacctttgagtagagaacagtttgggcaacttataaatcttgttttaaaaagtaaatcaacttcttgctttgagatctgggtcatttcaagaatagctggagtactccattcacccttggcctgaagattacatcttttccccaaagttctagcaagagccacccagttagaattatagtcaataggattagctaaatgtactacacccaaaacacaagcagcagctggattaccatcctacagctcacctgttggtaaatgttgatcttat

SEQ ID NO: 58524 - DNA, 7887 bp, Homo sapiens
tgtcggggggtgggggtctgggggagggatagcattaggagaaatacctaatgtagaggacacgttgatgggtgcagccaaccgccatggcatgtgtatacctatgtaacaaacctgcacgttctgcccgtgtatcctagaacttaaaatattttttaaaaaatagataatattggttactattttactgttaaagatcaaaccaggaagactaacagataattagtaggaattatgaaaaataagtaacaaaacgggaggaaagcaaattgctaatttgaatgataaaagagattctgttcaattgaaagccttaagatttcagatgggaagagcccaccagtggctgtaaaatgacttctaccacgtgatcacggctcaaaggaaaaagcagaaaggaaaagcagatcatatcatctgcaaaagaatgagaatcaagctggcattaaatttcacattagcaatactaaatgctcaggaaaaaggaataatgcctttaaaattctgaggaaaacatatttttaaactatattctctatacctaattaaattactatacaggtgtgaacatagatcacatttgcatgtactgattttcacacattcaaagaatcagaaaagctgcatctcacatacagtttcttaggaattgtgttgagtgtgtctttcaataaaaggctggagttccacaaatgaggaaagcagcccaacaaagaagagacagttgtataggaggcctagacaacaagtacagacaagagtaacaggatgaagcactcttccctgaagtagcttcagaagaaggaagtttctggaaaaattttaaccaaatctctgatgcaatggacaaaaaagttgggcacgtaataaaggcaaatagtacttttaaaaagccagttagcaacttcagaaaaattaaaagctgtacaagacaggaaatataacagcacacttcttgacactgtgataaacaatactgttttgagtccccgtgtaaacactattcattgatttacaaagttacagacaaagatgatggaattacaattagagagcagaaggcaaatcttactaatctcaacatcatgtaggaacagcaaaaacggagggaagcaaattgttaatgtgaatgatagaggagagtttgtatagctgaaatacaagatttcagatcagaagagctcgccagtggctgtaagaagacttccatctaggatcatgacttcaagaaaaaagcagaaaggaaaagcaggttatctgccaaagaatgaggatcaagctggcattaaatttcacatcagcaatactagatgctcaagaaaaaggaagaatgcctttttattgggagatggaagtggaagaaaaggactgaaaagatgaggactcacaataaattgcttactgttaaaggaacaaatgttttccttacataaccaataaaggtctaaaatagaaatatgactaacgggagatattgagtgacttaagttacattctcatctgtcagtgtaggaaaacaaatatcatatataaaactaataactcaagagttatcaatgtaagcatattattcagagatagagaggttactaaccaaaaaatgctataaaaattaaaagttacatgtgtggagagacattgaggataagaggagtgggacaggaatgattactcttcagctggagtgcttttgtcttttgttattgttgttatatggaattttctctttttgataaaatttttaaatggttaatataaaaactcaagtatacaaatgttactaagacatgtgcaatccactattagacacagttgatcaaatttatgtaaaacttaagcgacaaagtattcttctacaatatatttaatgctgaacatgatttcaggacagggagatgctcactttattttgataaacagccattaattctctaatgttcaaacccaacaagatgtagagtgttctccagtatcgccttccatttggagacatctgtgctcattgatctacaaagggcagggaatgcctgattattttattatgtcatttgctactacaggaattattcatgatcatttaccagcaagctgagaacacgtggggctgatatcttgattcagaacaccaagcctaaaagggatacaagtacttagtaaatttagaagccgattccactctaccaccagcacccccttcatcttacctttaaacacatgcatttatcaccatctacctttaaacacatgcatttatcaccagaaactgtatgtgcattttgcaaagaatgtccttttgtgcagcagagaacaaagggatttttctgcaaaacgatactgaaacctgatcactgatgcatactctcttgccagcatcttgcctattgaatatcatcccagcctattattcccatattgttctctttggaaaacaaaaagatgaggagtccatttaaagtgctcaaacagcaccctctgctggttgagtttaagctgaagatttgatgtgtagcagggcttagtgacacatggcagaaagaagaaaagaaagcaagggaaaaactgtagaccaggatgcataaggcaaacataaatagaactccatcagtaattttggttacatataaggaaacggatattttaggcatcatagcacatatatagtgcaaagacactgtattaattcctaatagaatactccgttcttacaaaaagaatatattgagcgactttgcatattaccttcaagttctttactttacaaaataattcacaaattcccccagtgagttcctctagtgctctgaatatgtggcatgacttacactctatctttgggtaacatattaactgtgcaaaactaactgcaaactgtttcttaggtcacagaccagggctcttcatgataccagagatacctgcacttacgtgacgtgtttttaagtgtttaggaaacattcaaaattaatttttaatgtcttgctaatatgtaagaaacaagggtttggagatggcaagattaatttctccaacaaagaaaaaaatgagtagcatatgttctccagggcaggggatctggagatctgttttgcttaatatagtataaattcttaatatattgagtagcaattaaaaacaagtgcagtcttacattttagaagagtggagctaggatttttttatatctttgactaaaaatcaattagatattcagctctccctgcttgcccagggagtggagttcacttcccattctcactaagcgttggtagcagagaaaacagtcaacagattttagacagttacatagtgagacaccctacgggcctttattctgtttcctccaaagtaagagcaggggaaatttaaatgtccacagtcaccaagccataaagtacatgaacggcacacactgagtttgaggaaaagcacgtgatcctcttggtctatctttaatttttggtggagacaacaatatcaagaaacaattatccactataagaaaagcaacagtgcaaatatgatgataaacgataactgaagccttgctttgatgttagggagaaaattaggagtaggaagactgatgaaatggagagtgtgtgcctcacttaaactggccagataccgccagatgcggtagctcatgtctgtaatcccagcaatttgggaggctgaggtgggcggatcacttgaggtcaggagatcaagactatcttggctaacacggtgaaacctcatctctactaaaaatacaaaaaattagctgggcgtggtggcatatgcctgtagtctcagctactcaagaggctgaggcaggagaatcgcttgaacccgagaggcagaggttgcagtgagccgagatcacgccactgtactccagcctggcaacagagtgagactccgtcgcaaaaccaaaacaaacaaccaaaaaaactggccagatacttagcacttgtcattgcagccatgaagcccacagggaccagggttgccacatcatttgatgattcaagaggagcttgaaatcagaatatttactctttggggctcaaatcttcacaaaagagtctgtgagccaaaacagaaaaatatttacaaactaaatttatcccatgggccagcagtgtccaactaccacagactcaaagttctttccttctgcctcagggcctttgtacatgctcatcattcttccagtaattttcttctctcattccccctgccttcctcctagttaactacactcatccctctgatattgactcaattgccactgcctccaggaagtcttttctgatcgctagattaggttaggcctccttgtgatatgatctcccacttttctgcatcttttcatcatagcacatagcacagtttgtaattatatgtttatttgtataatttgaatttttttctcctccaccatgaggtcagaggccatgtctctgttgttcagcagcacattgcctataataaaggaggtattggtaaataattgctaaatgaatggttaataactttaaagtagctcttcatagtcatagctggagctattcgtctgtgattaatatcacaggaacccttagatttgggcatgaaggtgggaaggtctgggtttgaatcttaaacagcctacttactgtctgagtaagttgctgaccctcccagaatttgtctcctcatctaaaaaaaatggacctcagatttgtgctgaggacatacctaaatacttttacagtactaacacctagtagttgttcaataaatgctaattattattattatcattacctttaatattaatagtctactcacattgacttgcccacatcccatctggtcccagtggtgagagtttgacagatctgaaataatagtcccatttccatgcttttgacctcagaagagcattctcccaactaataactagacacaaatatctggactctactctgtattcaggaaatcaggcctggaagaggtcttataatccagtgttttaatcatagaattttattttaagtcagaaagatttattcaccaccgatatctttcctgagtgtgtaagtgatctaaatcaatcccctaataacatgggatatttatcttaggccccacaacctgccaagagagagttacaaactaagatagaacaatgggcatattatccctgaggaaaaccatgtgattctccgacgtaggatgtctgggaaggaggcactaggtgtgagtcacggcattggagccaggctcacctgggctcatgttttttgtcacctcagctctgtagtcttggccaaatcattaggccttgcaggtaaaactaggctcataaaacttgctgggagggtttttttcaagatggaagagagtgtgtggaacagagcctggcacatggaataggtgctcaatgaatgatacctgcataaccaagggggatttgagcattgaactcattgcccaccaccacttcccccaaataaaattctatttagtccacacagaatagtacaaaccaccacaggctgggttgtgtactgtaaatcatataagatttcaaacttattatggaacaaatgagaccatctttgagacatttaggatcacagataaactgggccagaaatttacccattatatacaaccctttgtcctctccttccaccgaaaagcaaggagaagtctgacctcacccgtagtgcttctctggaagtctggcagggaaaccagccaactatagtcactaacctaccacatagtggctgtttccagcatttacattctaagatcaggttggtaccaggttcatcctgtgacacaaatctggaccactttgtaacaaaatgtccatgagtcccgcctttcatcattttcttttttctttttcaatgtcttcatgatcccagagacctcacaccagcttccccagcccttagcctccccctcaaattgagcacaatacggataatcatctattgctcccaatggagagcatccacagttctcagttatacccacgtggcagcaggccctgaggctgacccgggtacctgttggtcttcctgaccatgggaacacaaaaccatagtcagatttaccttcgttttcccagaaattggaacgtagaagatgcttgcttgtatctgcccacaaaagggactatctgtggctgatttatcagagaggaatttattcaaaggatgttgggtgattcccagagtctccaggaagctagatctgtgtggccaaaaacaaggccccaaatagagccaagtggggtcacccctgcagaacagatgctgccctggcaccaccaacaccaccgccacctcctcagctgccttgactgtcctcaggagccagctgtgctgctgctaagaaacagctttttctcttccccatctgctctgtactacctccctcccaattaaaaatccagggcatgtgcccaggcctacctgcaagggaaaatggaaatgcggctatctagcactatcagcttctaccaggagatggcctcttgcccaaaaagacttacaaggtaaagagtttctccatgagacagggtacaagtcctcggcagccagaattataacatggccagtcgttactacacctacttctgaacattgactggagtccagactgtgtgatatttggttttcttagggcttactacagcagctgaaaatgacagtgctcaatatctgtttgttggaattagaattaaaaaaaagaacagtgaatctaatgccactgagtttcttttcctctgggtcccatgacatccactttgattctccgtgttgtcctaaacttttaaagtgcccagactcagactcgctctgcgccacagagtggatgctgagaacagcacgctgtaggcacaccagccacactcgaaccccttcctccagcctgattgctcggccagagccccagagctgcctggcttccctgttctttggctttgtcttcttcccatcacccccttgccctttggacttcctgactgcatttggctcacttactttttgaccctgggctctttgcagtgtttctcaacaggggcgttggtgcagaacaattctttgtgaagctgaactgccctatgtgttgcaggactttttaacatctctggccatgctcattaaaggttaagactgttctatggtcatgggaggaagatccccagtggagaagccctgctttataaagactgctcccattcaccctgggttgctccttggttgggtcactccttcctactctgcactctggacttgaacccagctacctgcccatcttgacagaattccacacccatttggagggggcaaactcaatcaaagttagcattgggaggaactattgggtaataactgtacagagtcagggagaactgaacttttttcctcctctgatgtgtgatttgcacaaacaatcattttgagctccagattcttcatttgtaaaataagaggtgtcttaggtcaggctacccaggagcagagcctgagacggggattttttattcaaatgaattaatgggggagtgctcttgggagaaaaggaatggggagagcaggtaaaatagtttttacatttgcaacaatatgcacattgccacattaccttccagaatgactataagcatttctatgttccaggttctatatgaggataagactgactcttcttttgaccgacactgtgtaactgtaaactttaatagtggaaatgatgcatagtgttatttttaaatatttcaaaggaaacactcatagtttaaatgacccacataattctgctaattgctaactaaattttttctgtatttataacattggttatcatagacactttgaaaatactggtctaaaaatt

SEQ ID NO: 58525 - DNA, 6866 bp, Homo sapiens
aaaaagaaacaaaaaacttacacataaagagatatgaatatatgagtgggacatgctccaacatgatggggcatgttactgaaagcttggagggcattccctacgctgatgctgtgtgttagccttgcctttgggttatgccacacctctgctgtcttggtcagcttacaccactatcacagagtaccagcggctgggcagcttaaacaacaaacacctaattctcagagttccagagactggaaaggtcaagatcaagataccagtacatttggtgtcttgcgagggcctgtttcctggtccgtagatggctgtcttcttgctgtgtcctcagcaggtggaaaaagagctagctagctttctggggtcccttttataagaacaccaattccattcataggggctccactcttatgacctaaatacctctcagaggccctacctcccaatatcatcacattgggggttaggatttcaacatgtgaatattcagtccatagcacctgcagaaggatctacctttaacagttctctgttgtcaaatgaatatggtgtgagctacttacaggcacataaggtactttctaacctggccccagccctggtaagaaacagactggcataggtagtttgaagagagattaatagaaggactacaaagatgtaggtggactctagagaaactacgagggatagtaatgtggaaagatgggaggaggtgcctgccccccgaccgcaggcctaaagtggtggaaaggaggaaagagagaggctgtgtggagagggcccttgctgagaccttcagggaaggaatgcagccagctcaaggccaccctgacccctctcctctcacccttacctgcgccctatttactgaatccaacacagagggaagatattgaggtggcccacacaagcagctttccatgacacagaattgaatagagaagggtagtggacctggagaaaccaacggaagatattcaaaccaatctctttccaaatttctcattcattcattcattcactgatacttttatttcttcattcaacaacttcgattgagtgctgtgtcaggaactgactaggatactagagatacaccaggaacaagacagttggtgtcctgaccctgatgtctcatgctaccttccagagaagcaggtaaaaaacatggtgagaggtaaaataattacaggtcacaatacattcctagtgatagatgctgtgatggggaataacaggggacttgcatcagggaaagtggccatggatgatcttcctgaggaggtaagacctgaggatagagaagggattggccatgaaaataggttgggaagaatattctacaaataagaagcagaatgtgcagcagccctgaagtagaactctgctgtggtgatccaggcacaaaaaggaacaagtgtggccagggttgggaagtaagagatgggctcgggacggtgggcagggaccgccccctgccaggctccaccagctacagtaaggagcttgggcaatgacacgtccttgaaccagggcattttgtaaacatccttctgaactgctcaccctgccaaatattgtggctttcatgtgtcatgcctctgtgcctttgcgcatgtagtgcccctgcctagaaactcaccccctctcttctaccagacagttactcatcctgtgtgacccagtttatatgtcatttcctgtgcgaagcctttcttggtctcctcagtctgtctcagtcacttcctcttctgtgctcccttagcactttgtacatgtctccctgctttgtcactatttgtttactgatcatccctctctcaggacagtgaactctttgaaggcaaaagctattttacgcttctttgcatccctaccctactccacctcacacccccaagcccttgaagaactgataccatgttcatctttgcatcctcaccctactcttcccccaacccctagttcacctggcccagggtgtgccacgttagtaacatccaagaatgcatgctgcatgaataaagttgcagaaaatagacctcccactaattctgaccttcaatagcaataatacctgcccagaagaggctaccagtgaattgtgatgttttaaagcttcctgagcatataagacagctgctggaatccacttaagcaattagaagttagatgttcaactagagtttacaggatgcctttaatctataaaggataataataggtaacatttattaaatgcttactgtataccagtctattctagcagctgcactagaatgtattcatttaatcttcagaacaaaactctgagctgtttactcatactaacctactttacagatgaggaaactgaggtacagtggggttaactgattcaatgaggaccacacagccagtaacaggcaggacagggattgagacccaggtagtccagctccagaacccaaactctttttgcgtgtgtggataatttttttttcttttgtttttttgtttgtttgttgttgttcctgttttgttttgtttttgtttttttgagatggagtttcactctttttgctcaggctggagtgcagtggcacaatctcggctcactgcaacctccgcctcccgggttcaagcaattctcctcctcagcctcctgagtagctgggactacaggtggacaccaccatgcctagctaagtttttgtatttttagtagagacagggtttcaccatattggccaggatggtctctatctcctgacctcgtgatctgcctgcctcggcctcccaaaatgctgggattacaggcgtgagccaccacgcccagccacttttttttttaatttattttttaacttttagtttcagggttacatgtgcaggtttgctctataaatacactgcatgtcaagggagtttggtgtacatattatttcatcacccaggtaattaccatactacccaataggtagttttttgattctcaccctcctaccctccaccctctagtaagccccagtgtctattgttcccttctctgtgtccatgcatattcaatgttcagctcccagttataagtaacaacatgcggtgtttggcttcctgttcctgcattagttcacttaagacagtggcctccagctccatccatgttgctgccatctctaacagactcccttcaaagatagaaaaatagcaataataatttcctgtttgtggatgaagctaatactataaaagttcgtcttcctcatcattatcatttacagtcacatcatctctccaaaagagatggatttgtgtagactcgttgtcattctcagtaccatatgtgcacaatggctgctcatatttagtggagggtcttcattgtctgccctaccccatcaaggaaatagaaaaatctctgtctgtctctcatgggtattttgccctggaggacactcaatgcatatttcttcaattaaaccaacccaactaaggaatgtaccttaagtgagagagacttagttcacaccttgaaccagctgattcatggtagacccagcccttcattactctgggcatgagtttcctcatagagaaaaaattaaatgagaaattctcttaagattgtatctagctctaaaaattggtgaaatttaggaatacaagtccatgtaaaactataatttcttttatttaggtgatggatactctcacactttgtatcagcctattaactgcacatgattaaaaatctcacaaaacaggatatgagaatttatcgcttatcaagggccagaaataatatcagttctgaaaaacagaagcagaattcaaaacaacctgaggcctgcacagaatttcttattactccgtcctgtcccgtggccagtgaatacaataaaatgtgacaagagagattttctccatgttggtgacagactagaacccttgcactcagggcatgtttgggagcagcagcccctggggccctcattgtggaggatgtaatcagtgttccctactgagccctcattggtatatggagacagatgtgtttttctttaaactgtcatgaaaattgcagcgatatggacacaggctattgagtcatgcggggataaggtaatgagtggaacgctgttgacaggagagatgggaagggctagaggggctaaggaggcaggagagtcacaattcatactccaagtgtggcttagtgcagagattattctgcagagagctgctccagtgagataaccaattgcatgattctgagcgagtcacccgatctcctgtttataaaatgaggaggctggattcaatcaggagttttcgaactgaatccgtagaagagaagcatctcatggaaaaaccaagtgggtggagagaggcacaaacctaagtgatcatgctcttgaccctccattccatctcttccactctcatctctacttttacatgttttgcattggagttcaacaaaagagtgtatttcaaaaaaggtaggctattataaagaataaagattttgaagccacgtagattagatgacctcaaacatcccctcccaacttttgctatgagtccacgaaatcattaacaaataagcaggcatacacttgccttcccaattcattttcacacccccagcaaatatctcagagtaaattaaaagtaattcttttgaagttgcccacttttttctttgcccagcagtagatcccccagctccttgataaaatagtctaacttattaaaatcaccaatgatctctcttcaccagaaaataaggctggctttcagccagaaaactgatgtgacttgttttactgatttcccaaaatcattattctctttctgcctcatcatgataataattattattgttattattcatgacagagtccttgcataatcaactctaatatcacacgtaagccttcttgtctctaccacctgagcagaggttggcagcattcctcccagtgtttgatcaaaatgctgccactccgatgaatcccaactagtctgcagtctcatgatgctgcacacagtcacctgaatcttctgtatggtaaaaaacaaaaggcctccatttgctggaaaaggctctgaggtgggggagggatgatagagccacattaaattgaagtgagtaaatacaaagcaagccatctttgtgcatagaataagataagggaaattgagaatggtccaccatatcactaaatacagccatatgatctgattccatggcaattggcccagccagacctgtggaatttgcccagtcataattgggctgcttttctatacctaatggatcccagaatgaaatcacactgacatcccagaaagcttttcatttgttatcagacagctttggttcaaatatcatggtgagggagaaacactgacaacattgtatttcagctcttggaagccgttccaacttttcatcacatagaccgtcccttcaaagttttgtgcttgttccattttgcagtgttggaaattatatacacagtgccacacatgttgaggcatttctctgatgcattctctatactggaaagatgcagacagtgagcaaatacttgcttgctgcctcagttccctcctacacctaaggtagaagctgaaaattgatgacaacactctttactaaatccagatgcagcctcaaaacagtttgtagagcatctgcaaaaaaaaaaattcatgtgagttgacacttaagatgaaacttattctccaccctgaatgtacactaggtagtcatggatttaacatttataatttcaaccattcagaaatacccatcaagatcatgatagctatacaacttggcttagtcacatagctgagtcactcgtgatgaaaagatccctcagctgaagaatgagtctaactcttccccatattgatatctgaaatacaatatgggggattttctttctttttaaaaaaaaaaaaaattatgattaaaacaaaaatgcagactatacattacagactagtacttataaatttggagagttaaaaatttttcctaacagatctcttcataaaggttcctgttatttaaaaccccactataataactactactattgatatccatgcacaacacaggcctgatccttaattcattcattgtctccactgttatcatctcaatcaatgatgtgaacatttacaaagttgttcagagcagaaacttggaggtcaagcttcaattgctctctgagctccccatgccctactctgaaaatattctacagattctaccttaaaaatataccacaatctgcccactaatcttccactttgatttctgccatcttgatccagccatttgtcatatctttcccacactattgttcctgactgatctcttcccctgtctgcttcccattctactctctgttttttctattgtatgctcaaagtgtgggtctacaacaaggtaaggtgcttacatcagaatatatatgtaaatcaatgcactccttctttcattttgtctgtccataagctcagctaaaaagtgttctaggtgatatacttgatttatgtctgcacaagctccttttcaccacagacagagagccacaggttgcagaccagcccatgtgcagaccacaggttaggcaacactggcatcacaaccccaaataatgaggcctttgcctacttctcaaacttcattttgagcctacctgccttttcttcctctgttccaaccacagtgggctccttttggatcttagacataaccatgctgttttagagacataactaccttaaccacacctgtcctaaagagggcacttgctcttcccttagctgggaatactctgtctctgactttttactta

SEQ ID NO: 58526 - DNA, 2877 bp, Homo sapiens
gaggaccactgcttttgtcacattatgtccccatgtgtgtactgcagatggaaggttagagaaaccagggcccaccatgccaacactccaagatgttaatcaactgtttcaaagctgccctgggtcatttgcaaaatctaaaaactgactctttgactcaggtttgcccaatatataaagccacattgtctattgttctatagttacaagtcttagccagtttaaggttaggcaatttataaagaagaaatgggaattacttcatgtgagaaaacaatttattgccttacataggattttttcagcctgagtcactggaatgttttcatgtacatttgcatcatcgtcattctccttacagacccaatcatataacaactaaaatgtataaagagcctattatgtggtaaacactggggctctctcagggaataagaccaactagacctcatcttcactgaatttatcgtccagcaagtaataaacataaagagtggtgagtgagaagaacacagtgtgacaggagcacattgcaggacaattgaacatattttaggagttggggaagattggcaccagaggatgggtaagacacaaataaagagggtagaaaagtgattcagacaacaggaggctggtgaagggccaaggaataagaaaggacttataaattctagcatctaaaaaagtccaagaagctggaatgtaaaatatggagaaggaaaagataaggagtcaggttgtaggaatagccaagggctagatcttgtgtagcatagccaggaatttggactttgcccttttaagctggggcataacatgtcccaccttctgttccctaaccttttacctataatttcctatatttacctataaattgcttaaaatattttacctataaattgcttaaaatacttgctaaatatatgttacatattattagatgtctatcaaagaatgcaaagcaatggaaaaaaactgagacagtattgacatcaggggaaaaaaattgtagatgatgatgtcatgagtatgctagatggctcggctatgagccatggtaaacactaaaaaggatttaattaaatatgctatatttgaaagatttgtagacagtcaatagatagtatctaaaattaaaaactcaaatatttgtagaaacacattactgagaaataaaaaatacatattcgaacaaaaattgaaagatgtgcagttacttctgagtcaatgagcaaagggagatggaatggagtaagctgaggctggggattgtttttgattataatttttgtatatgtattattttgttatttttactattgaatatgtggggttttgacagaagcataaattgaatgtgtgtgcatgcatggactcacacacccacacaccctgcaaatctaaacttagaaaggaacagtgggaggcagccatggcaccccctactggccttctcatggatggtctattgatgggtctcactaccctgtccagacctgcccccattgctgaaccagtcatgtctccacaggaaaacagcagcctctgaccttccatttcttagaggtttcatgaactggactgccaagcaacatttggattttcagtactagggacaactcataggtacctgcttagattctgagttggctccatctaatgagatcctgaggacacatcagggcccaagaggagctgattcactggaagttcagggcactctggtttttccaagcaggctaggacagcatggaagtttaaactctcagtacagtgaagcatgagccagagatggagtgcctactctctttgatttgagtgaaacatttacttatgagaagtagattcagcatctgagtcaccagacactgaaatattacagcaaagatctttacgtgtttcctacctcatcactacatacccactcatctgagatgtgtgatgcttgacacggacagaactcaaactgtcttttactacctatgaaggaagaaatgatgatagatcataattgaaacaacctactgaggagaggaagctgttttcaagcaccttcaagaactttaaaagggctcgttttatcaacaatgttaattaaaaatcattcttattaaagcaattcctctaattttctctaccagataaaattgtattaggccactttcagtgacaagatatgcttgacagaagaaaaaagtgttaaaatgttttacgaatgagattttaactcttcagaataagttttacatgcattgattttttttttaagtaaagtgttacatattctaacacaatttcaccccacccacccccttaaagtcaatgaggatatttatctcctctcaatataaggttgttttgttttgttgttttgggggttgggtttttttgtaaaaacttttggatatttttccaaaactaatgccaaacatttcttcattatatcctaaaagaatcactttcatcaaagtaaatgttcatgataaatgttattaagtataaccagaataataactaaaaatagctcaaattgtctagctacattttgtcaacaatcttgctctagccaagttccccattcattgcacaatctatattttgggaaggacagaacataattgcttccaaacaaaatttcaagcctgtgtacatttccttcccaccatcagtttcagttaaatgaattaatctttgaaaagggggaaatgcagaaagcaggacttctcccaaaaacacatttaatgtgtattttatcaagggctttaattataaagttgtaatgggtgatttttgttataatcatcactggagagatttcagtgttttagagcagagatccccaactcctgggccacagaccagtaccagtctatg

SEQ ID NO: 58527 - DNA, 1218 bp, Homo sapiens
atacttattaaattcactatttgccttttcccagattcaaatgtaacatcaaaattcactgatttacttttcaaaggtccgaattattttaattgctttttagaatatgatgcccttagctcaatcaagtagtattaattccatctctctgtgcaactaacttaataacccttttagcctgtggatgcagaaagtagttcagagctttgaagatttgtaaccagacccctttaagtcccacagatgacctgattaggttgattaaagttctctgaacaccttagtcattttgcagtgaggcagctgctgtattactcagagcagtaatatgtgcctgacctaattcttcaaactttacactggggtcaagccgcttaaagccaaaagagtttttgttgttttgttttgttttattgtatcaatagaaaagtaaaacataatgatttagggaaaaaaaattcacctttcagggctgatttctatctttggcattctgaatcactttttcctatattggtcctccaattatgagtttcttttttgccatcttctctctgtcctaattcctcaagataagttcttctcttcttgaaaaaaaaaaaaaaagatgagtttacagtcactagctttgaatcatgtcataatattatgggctaaattgtgtccctctctcctaaattttagaagttgaatcctaacccctaggaccccagaatgtgactggatttagaaatagaacctttaaagaggtaattaaggtaacatgggctcctataggtgggccctaatccaatatggtggtatccctattgaaggagattataagagatatgtgggcacacagaggaaagaccatctgaagacacagggagaaggcaaccatttgcaagccaaggggagaggccttaaaagaagccaaacttaatgacactttgatcttgaacttctaccttccataattatgaaaaagtaaattgttgtttaagccactgactctgtggtgctttgttataggagtcctaacaaactaataatgcagctttgccacttcctaagcatatgacttctctgtaacggtgaaatctacgtctactttgaagaatttggagaattaagcaaaacatacgaagttctcaattttcctacataatgcattgctgaaaattttcaaattggttaaacttgaacatcacgattatgtattcagtaaatgggact

SEQ ID NO: 58528 - DNA, 1109 bp, Homo sapiens
cccaaagaatgcatctcacaaccttagagaaaataaatgaaatagaaacctagaactgcttcactgaactatgagtgatgatttgttgaatgcctcaagaggaagtaaaaagttacatttgcatcatttctgtatttgatcagccgttgtttacctgacttgttcttaggctgccttagattctgagctggcttccctttaggctttttcataaacaaataactggaaatgtctctaaggaggggagagaccagttcctcattgcagctggtagcaaggttgctttcactcagccaggaggacgcattgttacaggtgtggaacttgttgctccgagccctcgcctggcagctcactctggatctgcgggttctgaggagcctcgggacccacctgggtgcagttgccttcagggacagaccatcttacaggtattaaaggcaacattcagctgctttctgggtttctctcttgcactttccttttgtcctattgctatcagtttcgcttgttttgctgatctctccaggtctcattagaattagtgaatcattaacctgcaatggtttcatttctagtacagtgagatggcttccccaacagtgtgggtgggtgtttgctggattctcaaagcttggaaggtcaaaggttggtgaattttctttatggtgaccatgtattaatttcctcttttaaacataaagaagagttagcatgaatggattgacttgttaacttttgattctaccagatccactgggtgtagtcatttagggaaagcttcccaggagccttagccattatctcatttaatttctgcaacaggcctgtgagggaggttctttgatgtcctcttggtaaatgctgcatggcagttggcagaggagaagtggcttgtcctaggtcacacagccaattggcggtgatactggaagagaaaccagacccatttcttctggtgcttgagctcttcctgcctttctgcaaaccacctccctaagccctgctgtttttaaagtttctccatttccgcagtgcatcatgtcggcagttactattgccttggttccaatatttaagacagtggctaataaataattcttaccgat

SEQ ID NO: 58529 - DNA, 2466 bp, Homo sapiens
gcagtgagccgagatcgtgccaccgcactccagcctgggtgacagagcgagactccatctcaaaaaaaaaaaagaagaaggaacattacttgtgtaactatgtcttcttttttttttcctttttttcccttttttttttttttttttttttttttttagagacaggggtctcagaatgttgcccaggctggtcttgaactcctaggctcaagtgatccttctcccacttcatcctcccaaagtgctgagattacaggcatgagccactgcatccagcctatgtttcaataaagatggctagagaacatcagaggcacacttcagaaagagacaggtatcttactcatgagtgaaaaaaaaaaaaaaaaccacaaacattgtttagagatggaggaggcaataactgtatcctgtccaagaatagtagcaaccaccacaccaaggcttatccaaaacaggtagaaagtggcagaatttcaataaagtactaaagatgaagaatgcaaaatgaatctctggccaaaggcaaaaaaaaaaaaaaaatgagaggagctggatatgaggggtctccatttggttgtcgataccaggagacagtacccactacccgaaatgatgaaattgtaaggctttcatcctcagagaagtcagagaaggttaagccaactgaatacatgagtgaaataaacatgaattttagataccaccaatctagatcaaatctcacttcagcctaacttcaatttgctacaggctttagagaggctgcactttattgccaggtcttggagcctgagcactacctcctgcctcagcgtggtcgctgacccttcttctgggaggtttccactttctagacaagcagacaaagcttgtgaaataatcaaagcagtgatgccaaggatgtcatggcagaaggcctgggttcctgagtcactgagagctcagagggctggatttgacattcctgatgcattacacaggcacattcatcctgctgacactgtaatctgtcctcattgggaaagttaggatcatcttcctgggcactgaatagggtcagcttttaatctggtctcttcactttgtagtgggacaaaaggtgttggaagaattaggggagagggtgcagtgggcctctactttctccttcctcttgctcgttctcattttctttgtccttacaatcttcctaaaatgcctatgcttttttggaagttgatctagctttcttttctggactggaggcacagcaggatattgtgaaacctcagccacatgactcttgggtgtctcctccaatggctctgataatgattccaaacttctcttcagagggtgaacttccattctcccttgggtggaatttatcttccacatcttgagtatttggtgatgaacgttcaagtctttagtgacatgtttgggagactggagattcctaaagtctgtcactgaggactttttttttaaaacctactatgctgatcctagccagctttgcagaaacaaggaatcacaacaaaagggaccaaaagtcaaatgatatttttaaaatggtagttagcaccctgactgtttccaatgacgtatccttagctatcactgatacaggagatatactcatttcagatttctcccctcgacttatctaaaggcattcaatggccttcagaaataaagtcctcaagttgttcttagcctagggaatctcagatttcctagtatagtatggaagagcaggcctcagtctctacagtccctttaaactttcccaaaatctaacattctaaaactgtctaaatttatccagagtatgtctttactgtgtgtttttttttttacatttaatgcccacaaaattttcttgttttaatatcagctacagttctgcaaacaccaaagcaaaattctttcccaaaataatataattgagacatgaatttataaataaataaaagccagctctggatttaatgatacactcatggatgtggcaaaaagtaaatggcgaaaatgttttaaaagagcatttaaatttttttttgtagttgttttttttttttgtcttgttttatttttttgaggcacagtctcactctgtcacccaggctggggtacaatggtgtgatcttggctcactgcaacctctgcctcccaggttcaagtgattatcctgcctcagcctccccagtagctggaattacaggtgcccgccaccacgtccagctaatttttgtatttttagtagagacagggtttcaccatgttggccaggctggtctctaaatcctgacctcaactgatccgcccacctcagcctcccaaagtgctgggattacaggcgcgagccaacacgtccagcctaaactggatatttaatataaagaaccgttctataaaactagaaattcatttttgattcattaacatttcaataacttcacactacgatggtattaagaa

SEQ ID NO: 58530 - DNA, 3561 bp, Homo sapiens
ttgtcacaagggggaagggatataggggaatgctactggcatctagtgggggtagatgccagggatgctgctaacatcttacaaggcacagggcagcctcccacaacgcagaattatccagtcacaaatgccaatagcgccgacgttaagaaactcagttgtcaactgacttattcagaagtgatgattcaatatcacatctctgcaataaccacaatcaatttcacttttgtagtttcaacagaagcttctttaacagttgataggtatgcaccaacattaaaaatgatcttcatataatctcgatgtttaactttaaaccaagattactagaaagcatcccatatttctgaaaaccaatctataactacagctgagctacccttaaaccagtaaacacttttatttgtaaacttcaaagcaaaccacaggcaaactaattttcacttgcagaactatgacagaaacacaatctgaaacatgaggtaatcagttcctccaggtctgataaaagaaaaatctcctaaagcctgaaagtaaatcatgcacagatgtctttactgctgaactaaggaagtgatggggaaagtaaaggacatgcccttgttactgccaaaatcatcgcttaccgggatttcaaaattcacaaaacactgcaaaatacaattaaatgtcaacacaggttgtcagataaagaagttaactatttctccctctaataactgaccaagtttcacatgacttcattctttcaggagaaagctaggcagaagcaagagcactcccttcctatctactggatgactcaactctcttccgcacattcctcggctgaatcctacaaattcactaatttcttttgtcctttgaactagttatcctactccctcggtaaagaactaataggctcggcacctacttttcaatcatttacattttgttacaccctatcagcctcaaaaagaaaagaaaaaagctataccaaaaaaaaaaaacaaatttaagttgacaggtacaataactcttacaggaaaagagatgtgaattatgttattctagtaactgattcttaaatgatacacctacagttttctaatgctctaatctttctatcctcaaggttttccagatttcagagacagcacaggcagaaactaagtgtatataccacttgatcaagcttactgcggatttattcttggatagctaaaataaggtagtggggcttgcacagaaaacatatttttaattaaaaaaaaagtttccaacagtgagtaacatcttccttctcggctgactgtgccagtgtcagtcccacgcctgggcccaggctaggccggggctcaccacaccaccctccactgtggtccaaaggagaaagcagggccgtgtgtggcaggtgcgcatcgtgtcaaattggggggcacggggagtgcggcgggtggggaaaggcgaagcaagccgcccgaatctcccatggggcgttctccagcccggcaggcggcggctggcccgtcccacgggcaccaactctccattttcactcccactcagggttcccgggaggaacgcgccggcaccacaccctccagctcgcagcccgctcgcacacacggagccccgcgccggagcgggcgccaggcctggacgcgcggggccaccagggctctgcctgccgccccgccgcgccggccccacccgccctccccgcccccgggccgggcgaccgaggcctaagcgcctgccgggctgtggggcctagggaaggaaggagcccgcgctgaggaggggcgcccgcgccgcggccccgagctccggctgtcccgctcacgtgctgccagaaagacggtttcactctcttaccctctgtaaaatcctccttaacatggtttaaccaccacccggcgccgccgcggtgactctccagaccctgcgcggggccactcactactcggggtgcgcgggcgggagggactgggccgggaggggaccgggaaggaggtcggggcgaggcggtggcgacggccgctcgggcggccccgacttccccacaggcggcgagagggagcacgcgagagagagcgagcgaacgactaggcagcctgcgagcgcctccagcccgcccgccgggcagcccccgtaactgacagatgggcgggcccgcccgcggccgccggggggcggggcggtggcgggcccgcccctcgcctgtccattcgcgggaggcggggctgaagggggccggtccaggccagcgaccaatcggaagcggtggcaacgtgggcggctgcgtgacagacaggcggcaggacgctgtcgccgcagcttcttccggctagctgggggacgccgaggctgcggagtgcacgcctgggctccgtcagagggccgcgcccgcgcgacgaccgcgtgcccgctagtgggaggcgggcgaggacccctgggggtgtccctccctgacccaggcgggaggaggggacgccttaggctgttttgtaaaatgtgtcggtgtgacccttccggcgatggctcctgactcgacgtggtattgagcctgagctatatgctagtttctgctggaaacgctgactctgcctcttagcccctgggttgaagccgactagagaatctcagacgtgcttaaccggtctgttgggcttccctgcccttttccagtcccaggtttcctttccctgctcccttcctgcttctaatttcagccaaagagaaagcaaagatttagaaaagaagggtaggaagaagctggaatttgaattggcaagagaagtttgaggttgtcttttctagatcaaaacaatttttaataggctgatgttcacatgttgcactttctaaagcccgtgcttgacctcctaaggaattttaagtcctattctgataatcgatttatgaagtaaattgtcattaacgcctctgttttatagattaagaagaaaatgaggtcacagataaatatcgtgccaaaacgacgtggtctttgaactgacctccaggcacgatgtcattatttaactcgagaaatcacagcttctgcgtcctaccattctgccaatattcacagccaagaggctcaacttaacaccctggtagaaaaagagaagcctttaatattgcttgaatagggaaggagagggaataatggaactaaccttgctgggagggaaaaaaaaaaaaaaagaaaaaaccaacagaccactgaatgaagcctatgaagcaatgaatggagtgctttttggaaagcacttccagatcttttgaaaagcagcacaaaattaaatattatttgcaaatcagttaatgaataggaaaatgttttgtaaagtataatgcattatataatgtaatatgatatttctatcccaaatatatttggttttttattatgtgtgtgtgtgtctctcgatggtgcagcagcacggtcatgcctacagctaatatatgagtaatcactagtgataatgcacttacaaagaacatacttttccatctttctaaacatgaggtgctttattttcagacaatatgggaaacattctcagc

SEQ ID NO: 58531 - DNA, 693 bp, Homo sapiens
tctctactaaaaataaaaagaacttagccacctgtggtggcatgtgcctgtggtcccagctactcaggaggctgaagcagaaggattgcttgagcccaggagggcaaagttgcagtgagccatgattgcaccactacattccagcagcctggctgacagagcaagaccctgtctcaaaaaaaaaaaaaatccaaaaacaaaatcaaagagctcatagataagagagtcaacaacaggagaaagccaattcaaaggggcataggacaggtagtcactgaaagaaaaaacaaatgctagactatactagaacaaacaaaaatgctagactacgattactaaattacataaaaactggttagtgccgcatagggtaataaaactaactgttgggttgtagtctgtttaccagcctcacaacatctgcatctctatgggacaaaggttatttgcacttatattacacaatgattatttgcatcactatctggttttctacaatttactttctgctcttacatctttaccaattatcactatctattatattgcatatcttatatatttactttgtttgctgtcttctccattagaacattttcccacttctgtacactgctatatccccaatgcctagaacactgcctagcacatagaatgtacttaaaagtatgtgtggaataaataaataagaaa

SEQ ID NO: 58532 - DNA, 2941 bp, Homo sapiens
gttgcccaggctggagtgcaatggcgtgatctccgctcactgcaacgtccgccacccaggttcaagcgattctcctgcctcagcctcctgagtagctgggattacaggcgcctgccactgcacccagctaatttttgtagttttagtagagatggggtttcaccatcttggccaggctggtcttgaactcataacctcatgatccacctgcctcggcctcccaaagtgctgggattacaggcgtgaaccaccgcgcccggcccccgtctctatattttaacttttttgtttaaaaaacgttttagctatttttttaaagttgccaatctggtagctgaaaaataataacttattgttttgattgtatgttatagtcattaatgctccccccaagcacatgataagatttaattttatgagctgggcatggtggctcatacttgtaatcctagcactttgggaggctaaagcaggcagattgcctgagctcaggagtttgagaccagcctgggcaacatggcaaaaccccctttctactaaaaatacaaaaaaaattagctgggcgtggtggcacatgcttgtagtcccagctactagggaggctgaggcacgagaatcgcttgaacctgggtggctgagtttgcagtgagccgagatcacaccactgcactccagcctgggcaacagagcgagactctgtctcagaaacaaaaacaaacaaaaaagagatttaattttatggcccttgaggttaagcggggccatgtgacctggtctggtcattgagttgtgaatagcaatggtatgtgtcacttctgggttgagcaagacctttcagagttctctttcacttctgcaattgattaccaacaatgtttcagaaaatggcctgggtcccataattgattaacataaacatactctgttcagtttgatagaacaacatggaataaagactctaagtaaggcatgatgagtatgaacaaaaaatatgacttctttgttgtaagccactgagacttagggttgagcgttatggcagcattatctacaccatcctgactaatacattaaacatctttgctcactactgagactaaacatattttcctgtatttattgaccatttatttggacttccctttttgtgaattttctgctcatgtccttgcatgttaattttttaaacatatgacgctcagctacacatttgttaaacctggacctgatcatcactgaggtatcagggagaaagatgaagtctgtgaactaagaaaaatagatgtatcacaatagtctctaatacccagggcaagatttctccaatctacctttaaggatctgaaaatcctttgccacaaattgtttttttttaaagccatgtgctttcattcaatgataatgtcaaaattaatagaagcatattttggatcatttgaatggtcactttataactgaaggatgttatttacttttatgatcaaaatggtttcttatgggcatcaataccactacttttatccacacagactcataagaaaaaaacaaatgtgaacataatacataatgtaatgtttttgcaccaagtgagggacaagtggtatttcagcatattgtacacagtaagatcagaggttgcacagcagaattactaaagaaaattgtgggagcattgggtcatcccacagtctgcaagcaggctcagctcaaaagaatctggcccagaacacagcaccactttcacattgtcacttatctcagttatggtcctttgcttgcaaacaacagacatagattctgactaatttaagcaataaagaactgattggaataatacaagaaaacacagtattcaagcaacaaaaagaacaaatcaggctcaaaaagaaccagactaggggatctccaggggcttcagtaccagaaattcctgaatcagtacattttggatgctgccaagaaaatgactcaatgactcaatccagtcttcttttttttttgagacaggctcttgctctgttgcccagacaggagtgcagtaaccctatcatgcctcactgcatccctgaactcctgggctcaagaaaatctcttgcctcagcttcttgagcaactaggactataggtgcatgccaccacgcctggctagttttttaaaatttattttttgtagagacaggatttcgctaaattgcccagcaatcctcctgcctcaaccttccaaagtattgggattacaggcatgagccacagtgctgtgtccatcaaccccagtcttctatctgtgtgtctttatgttctagattcaaatttctggcttcatttgggtcatatgctcttcatatgagtggggtagggggaggatgtttgagacttcaaaatactcaagacatctggatgcttaatgaagaaaaaaagttgttacagtggggcacagtgagttcacacctgtaatcccagcacttagggaggccaacacaaaaggattccttgagttcaggagttcaagatcagcctgggcaacatggcaaaaccccatctctacaaaaatacaaaaactggccatgcatggtggtgtgcacctgtagtcccagatactcgggggactgagatggaaagattgcttgagcctgggaggtcgaggctccaatgaggtgagatagcaccattgtactccagcctgggctgagatcccgtctcaaaaaaaaaaaaaaaaagtttatatatctcaaagaatgtgtgagatattaagggtcactcctagaaggtatatgggatttaatccttcctgaacagaagagtggatgggacctttttcttataaagaccttttcttttcttgctttttttttttttttttttttttttgagagatggagtcttgctctgtcacccaggctggagtgcagtggcgcaatctcggctcagtgcaacctccacc

SEQ ID NO: 58533 - DNA, 1254 bp, Homo sapiens
ttggccaggctgctctcaaactcctgacctcaggtgatccacccagatcggcctcccaaagtgttggaattacaggtgtaagccactgcgcccagcccatgttattttatttatttatttatttatttaagacaggctctcactctgttgcccaggctggagtgcagtggcatggccatagctcattgcagcctcgaaatcctggtctcaagctttcctcctgtgttggcttcccaaagtgctaagattggggaactgtgagccactgttcccacctgctatgaacatctatgtccatatttgtacatgtagacataagttgtcaattgcgaaatatggttaggtaatggttggactgcaattttcttaactgactggaacttgtaagtctctcagtctttgctaaggagctctatgtgcatgttggaacttgcctttaacactcagccaggcagttttcaactctgacttagcattcacttcctgctaatatagtttcaagatcagccagaggtgagagttcagggccttctcaattctttcctgaacttgtacacagccctgggcatgcatatagttctactcatttgtattgctttctttttttttttttttttttttttgagaccgagtttcgctcttgttgcccaggctggagtgcagtggcacaatctcagctcacctcaatcctcaatctctgcctctcagactcaagtgattctcctgcctcagccttcctgagtagctgggattacaggcatgcaccaccacgcccggctaattttgtatttttagtagagatgggtttctccatgttggtcaggctggtcacgaattcccaacctcagatgatctgcccaccttggcctcccaaagtgctggggattacaagcatgagccaccgtgcccggctttattggtattgctttctagactcccaggaatctatcacagcatgtcaaagccccctgtggacatctcattccccttcttttccttttttaaagttttttcattattctattattttgccctcatgtttatctactacctcagtgtaatcacctaatgggttcctcttgcctgctgtccagaaaagcgaatgcactcagaacagcagatttataaagcaaagaaggaatttaataattgcaggtctggccaagtagaagctacaaatcttgtgacatctggccacatgactcttgagcagtaatgcattatagaaaagcaagctagggaacaaatggctgg

SEQ ID NO: 58534 - DNA, 800 bp, Homo sapiens
gttcaagcagctgtaaaataaaatgcaatcggacattttacagcttgtattttaaggtcctggctcagttcaatctgtcttctcactggttcctgcttctctcttctttgttctacttctatttctcaccatgttttgacaggtgaggttgttcatgcaaagggatccaacaaaaatacaggaatgccacctttgcctcctcaaccaggacagagcaaccctccctttcctccttgcaacaaagcaggcaaaacacacattctcctaccgccccaccatgaagctgaggcacgaatggcagtgatgctattgttttgcttgcagggagggaattttcatgcaatcaataagtcacctgccctctttgcccaggatcagctctccacccaaacccctgtgagcttcagtggtagaatacttcaagcttcagccagcacaaacatgtcacagcaagagggacagcgattgtatttgcacacacaatttgtttaagtacaggctttatttgatccttaaaaaaaaagaacagctttggtattacattacaaccaaaggaatttagcctttaacctgcagtttccctattctcagtgatataaaacctttttctgataagaggtgaggcccagtgaaattttattcttttccctctttcccggaggtgaggtaatgaactaacaacttaattagaccctgttttataccaactaaaataatagaagggagtctttggtaacatggcaaaaaaaaaaaaaaacaaaaaaaaaaccccaggaacatcaggcatcataatacagaga

SEQ ID NO: 58535 - DNA, 746 bp, Homo sapiens
atcgcgccgttgtactccagcctgggcaacaagagcgaaattctatctcaaaaaaaataaataaataaaagggaactgactggaattgggctaagatcatgatgtaaccttagcccaaggtggacgaagggaggatcttaaagcaagtgttgatgagtaaactatggcttgatgagagtgagcaatttgcccaagggagcagattgttatctcagataagctgatcagcaggaatttcctaatgcaaacagagaagttatttgttggcttacagtcttatctattctatgaaaagttttcagaacaagtaacttaagttatattgacacaggtggtctgagttctaagtccaaatagcaatgtcatgttgatggcagttgtcacagttctcaagagaatgatatctactttctgtggctgttgtcaggagtaaatgacatcatggttctatagtatctgccacacagcagggactaaataagatattattattatccattttaatttattttgaaagaccaaacagatgtaataggaaatttttatatctctcaaatttttattgcttttcataaataataagcaaagtaaatggcttgcggctttcctggagtttaggaactactaagttactaaggttatagtagaatttgcacttactgaaagaaaaaaaaaggggacaaaaggaaaaaaaacattgagagctctttttctttgccatgatgctagttgtcggcatatttgca

SEQ ID NO: 58536 - DNA, 1026 bp, Homo sapiens
atagctcttttcccccttcacattgtggagagaacactaatgaacagattgactttgttttttctgccaactcacatcattccaagttttatttgcgtttgtaatacagatgcatacaagtggactcatcatccatcatctcgtctgagctaaccaccatgacatcattaccaatccccagataccaaggccagatcttctagatcagtctctctacatatgtgtattgctttttcctttgcattacttatttcctttttgtactatagctgatattccaggagctgactcctggaccctctttgcccccagtgactttcaaggtgcaagattctgttgcctctcttttgctgatagatgttgctgaaaggcctgtgtggaaacttacaaaatcaaatgagttttcttctcctccccttctgttaaattctaactcaccatccctcacccatacctgaagcccagctctctcccgcaggcagtctctgccagccaggccaggcctgagcttgttctctgcgtgtctgaagcagggagtcctaaaaggaaatattgctctcattccaaagttgcttcatcttcatgggcaaagaaaaaaaaaaaagcagaggaaggtaaatgcagcaactctgagaaattcttagttgattatttactgttgcttaaccttcaaaagattccactgtagaaagggagggccggtattcatacagttcctagcccaggtaacttctctttcctagacctgctagtccagttagcttgagctcatttgcaaggaggccaattctgtgacccctttcgtttcccagaatgcctcacagtggacactcaaagcagtcgacttgctaacaaggctaaaggagttaggttttacatcattcctgaattattgatgtgctttgcaaattagcttttcctgtgcacatgactctccttagctaatctttacaacatataagacagttgtcaaaactgttttgaaatatgattctggggtttcagagtaccgtttcacgggacttg

SEQ ID NO: 58537 - DNA, 1263 bp, Homo sapiens
cttcatgcaggtgctgataacagtaaacacatcatatatcttcagcctggggtttaaacacattcatttctgggtttgtcatatgttctctcgctatttatactgctttgggtcagctacttgatacttaataaaatttgcctccaagctgtcctgcagggaaaatgacctatctggggggaatgctgttccaactctataacctctgatgattgcccaatagtcctccaaaaaggttgcagggcaggagcaagggaaggtccatgccacttcctggcatttaatggcaacaagtgctttagtgtaagtataattatatcccctgctttcaggaggcctttccagccaacctctcggacacgggagcaactgtagatggcatgagcaatgtggaaattcggcttctgctcaaggtcagaacaagccgttcaccagcgttgattttaccaacctttcggttattttggaaagccgaaagagaacgcaacagaggcaagaatggatctatgggatggaaataaggagccatttataacccaaaatgagactgccaggaaaaacaaacacacagaaaagtacattttatcagaggcttgggctgcccagggctattggggtacaaagtactgcgtgttcagctccctgggccaagagctacagtaagtcaggcccccctgcaaagctcctctcctgtcagccccatcaagcagccttagccacctggcggagacaagctttagtgtttttaaagtgtgtgctgcgtgaatgtttcacatttttggtaaagatgtggggtcatgttgcaacacttaagtgcttctgcgtaaaccttgcgcaattccgacaggcactgggttcctagcatcagtggcatcctctgctcacatacggcttatgtaatgtgtgatcaggccccccaggtttctccttgtagcctttgaaaaaaatttcaggctctgaacttggccctggtttccggcagttctttgctccgaaggtgcgtggaatggctcagctgtcagcacctgctggtgagatacagaaaagtgccacgggttgatctttctctggcaccagtacacaggaggctggcgatgctccccagatgggcttggcccgccctgaggcaccctatagggaaggagagtgagggcggttcatctaaggaagagtaggtcggaggattgaacgggggctgctaccaataggtaacaaacatgaaaaggatttccccaaagcaaaactttctagccagagcagcag

SEQ ID NO: 58538 - DNA, 1451 bp, Homo sapiens
gtgtgtgtgtgtgtattgtgtgtgtgtattcccctccccttccttacatatactctaacattcttcagtgaaacttaacagatattgtgaagtttgctgcaaatctgtacagctgcactatatttcataatatgagtgtcccataatttacccagcctcttctgaatagacataatggtggttttcagttttttacttccacaaacatacttttgcacatatgtatgactaggactacagaatcaattccttaaagtggaattacagaatcagaggatatgtgagttttcattctgatagacattgccaaatggtgacacttaacttttgatgagaactgccaaaagtaaagtatttgttcgtgccagaaacagagtgaagatagcattttattttaaagtttaatacctcaggcaagcaagtagcacatttattcatgaaactcatttgcccctgtcttgcccacctaaagcacatacacattgttatgaacccattcaaaatatacttgtgacaacagcttactcaatgaggaacttgctagaaatttcgtatcaccaaattgtgtgagtatttgtcgcaatggggttagcttgcacgctctctactttgccctggctgtgtttactacctttcatggccctggtcagttagtaacactgtcttgtttttcttttgtaaccaaaggtcagtttgtgaccctgctccactccccacctcctctgccttagtttcttcttgccttagtttcctcataagagtaaccagtcttaaagtgtcagggcaggcacattactgatgtatcagtgaagagcccctgggcacaatggaacttgaatttgattttctattacctgtgagggtgagttagtaagcagacagccttgtactctgttcagcggcttcccttgctgcctttctataatgaaaaaagcagagacccagaacattctcccgtttctctagtgtttacccaacacacactctgtgctaccatccccatttgtggcttctttcctatttgctcttgtaacatgagaaacagtgtggaggttttatgcttgttttgtaaccagctataaccatttccttttctctgcctctgattataaacacatttccttcctggtaaccattgaaaatctatatctgaccaggttgaaaccaaatgaagtcattttggttccattggtgacaaccaattaaatataattctgtttacatttagaatgggttgtaaatttaagaaaatgatttaagccctacttaaaatattttttggctcataaaaccatgaaatcatttctgtaatatgagtaatcaagaagcttcatatttacatttacctttaaattgctctaaaagagccagagactggacattaaaaacaaacaaacaaaagattcagagtctgcaaggaagctatttcactatccccatgctgcgagctg

SEQ ID NO: 58539 - DNA, 1220 bp, Homo sapiens
aaatggagcttctaagattagtgtccaagattattcatgacttgaaagaggcccttgttatgtcaaatctagcaacctttgttgaatcatcaggactgagatttgggcagagtcaacctctgctgttgtaaagtggataattactaacttggtgcaatttcaggaatgcagaggccactcttccccactcagctacactgcctccattatgggagtggtgacgcctgtctgctattattaaagatcagagctgctctctaatgactatctactatatgtcaggccttgtgcttagtggtttattaatctgttccttacaaaaacctcatgaggtaaacattattattcccatttcctaggtgggaaagtgaggcttaacaatgtaacttccccaaggacccaagcagctaatttaagatgtgaaccaaaatctccctccataactaaagttccataattccatgttccatgtgatgctcctctattccccagtcccagtcttacctcattccctaaatggcttttccttctctctctagagcatacattacactggacatctgattaccccattttatgccaatagatccttctacaaatgctaaccattattgtgtgtgccaggtccagtttgtgccaggcaccttgctgaatgctctacacacccaaactcatttactcttcccaagaaccccagaaggaaggtgtgcatcagtaatgtcctgtgaccactctgatagtagatggcagaaagagaatctgaaccagatctgacttcaagcctgagttcctaacaaagataggaagaacaaggcaaccccggatgatacagtagccagacacttgctagtaaaggccagaacactgactcactaagctctgaactcctctgcccccatgctgccaggggcacaaccccaacagactgcccagcacactgccctaatggccattgactcatctgctccaacgagcaagtcactgcacaaaactcctcccccacagaaaggtgttggtcctccggcattcagaaagaaccaggagccaacataccactcacaggaagaaaacgcacacactgtctctatttgttattcctcctacacaaactctttaaaatgattgagtttaataaaggaagatgtttccctgcagctgtagagaggaaatgttctaaagtaaaaatcagaacacagtctgactaggatcactatgcctat

SEQ ID NO: 58540 - DNA, 632 bp, Homo sapiens
acaggccaggggttgctttttccccccttagcaaattcatggagcagaaaaagaacagctgcactgtggtcaagaggaagactggattctgtccttggccatcctttaccctgctgatcacttttcagatccagagattctcagtgcctttctgttcaatgttctgctgcttttgcctgccagctttgtcagctcctacctgtgacccttcttgtctttcaacccctcccacttcaggaggaagcacttctgtggcaatatgttcagctgatgagctgccctcctggttcagatattgtgcaatgcaaaacatttcttaacaattccggaagcaaactttttttttctcctttattgctgtcaggatcagttcagtagctacactaaagctttcaccactcactgcttcactgaaaagtttaagaccagagcgttctgctgaatcaagctgttgttgagaggttcagtgtacgtatataaaacagaacaataattgatttttatagaggctgaaagaaagttaaggaatcttggatggctcagggtgggagcttgaaaggcttttgactcaggatgaaggatcacatggtcctcaatttgtgcttaatagctacaacatggggaaagagaga

SEQ ID NO: 58541 - DNA, 1131 bp, Homo sapiens
aagccgtgaaaaccagaaccaataatagtaatgggattaaaaataaatagaatttattaaatatctactgtgtcccaaagtggcatgtgtttcttttcttcttttttttttttttttttttttttttgtagaaatggggtctcactatctttgcccaggctggtctggaactcttagtctcaagcaagcctcccgcctcagtctcccaatgcactgggattacaggcatgtgctgcccaacggtgtttcctggactcaaacttgctttgatgtctcaggtctgcatctacaaactactggatgttgagaaagtcctgtaactttcccatgcctcagtttcctcatctgtaagtgggatgacaaagatacctatcttgtaggcttgttgtgaggatgaattgagttagcttatgtaaaacgctcagaaaaacacatagcatgttgtaagaagacagaagtgcctgcggctatcatcaaaatctcacaaccttggtaatacacatttttacatctgaggaaaacatctgaggcttagacctaaacttgccgcaggtaactcattagaatgtggctggggcgggggacagtggtgaaggttccaacccaggtgtggcagattccagagcctgcggtctgaaccagcccctggtgacctttaccccgagagcggaagaaaggcaaacaggcggaagcccacagccgaggccatcgcgctgcgcatgatccgtggcaaccgtccttccttgacctttgcccactggaaaagccaatcccaagtcagcctggggtaaaggggcggggccttgtggttggcatagcaacagacatgggtcaaactcacctgggggttagggcggggttgtttgtcactaaggaatcattgctgaatgacactacagtggagaaccagagccccgggcttttctaaacaaacagccctggtcactgctgaattcaaagtgtactgccggggccgggcgcggtggctcacgcctgtaatcccaacactttgggaggctgaggcaggcggatcacgaggtcaggagatagagaccatcctggccaacatggtgaaaccgaaaccccgtctctactaaaaatacaaaaattagctgggcatgatggcgggcg

SEQ ID NO: 58542 - DNA, 3379 bp, Homo sapiens
ctgtggaagggcagaatggcctgagtttgggtttctcgagctaccttaagatcaggcctcctggctcctatcttagcccttctaacactctgaagtgtagaggttgtttgttccaagtccccaaggtactgtaagctcccagatagcagaaatcccattatattttagtgctgtggccccagcatccagctgcgctgttacttagcatgagatccacatgaaaaccatttcgcaactattagccattgccagtattaatactttccggaaggtggcacaaagtgggggatgttatagacagcttcaaagaaacgtttaagctagagttgactctttaaataatacaagccatccccaaccaaagattaaaaatttaaatacaaaaaaaaaaaaaggaaatttgcctaccccccatttgtgaaaacaaagaaaaaaaaaacagttaacgtcttaacttttctaggccttcactctcgcctctccccgcgctacaagggcgaattctggacgtatctacacagtcaccgcggagtctgcaatcgccgcgacgtcccctggcatttcttggccaggctgcaactttggtgacggtgtatgtagttacatcccctgtagtgcagctggtatttagggtcctcattggcaaagttgagggtataagcagggagggaggggaccttggcttctttccattcactggcatgttttcggggcacggtcatcccacgctgggctccagcgccagtcccaaggcctcgccgaactccagcccgggagtgcgcgcggccccgcccaccgggcggccgaggtcccgcccctacctcccccgccacacctacccacccaccccattgcaatggtctctgcacgcaggcgcagtggcgcgcgggggaggcggggcgcatgtgggcttcatttaaacagagcagagggggcggcgcgcggtcgccgcggtgctgctgctcagtgggagcgggtcttcgcaactgtctccgcgtggcgcgcgcctctagccgcccttcccctggcggctacggccggagggagcggaggcgagcgggagtcgggctccatggagagcggcggacaactgggcagaggcggagctttcatctcggcaccctggttccagtgacccgcgctagcgtcccgtcccgcccgcgtcggagcggccgccggccccgggactgaccggcctcgccgcacctcccgcaccgactagcgctcccgggcgctcctgcgcccgactcgccctcgcccccactccccggcggggtggcggcggccgggcccccacggcggcggccggagcagcagcagcagcagcaggagcccgcctctatgatgaagttcaagcccaaccagacgcggacctacgaccgcgagggcttcaagaagcgggcggcgtgcctgtgcttccggagcgagcaggaggacgaggtagggcgcccggcgccgcacgctgccctccggggcgccggggtctagggcccgggtgcttcccctcgctccccgcccctgcgcaggctgcggggctgggagggattagcccccttcctccctccctcctttcctccctcactcctttcctccctcacttcttccttcctttctctgggctgatagatgagacaaagggggctcgcccagccccagtttctccatctgggcactcgagaaggcgcctggtccccgggaaggtcccgggccgcgtaagtctcgcctagcgggagtcaccatcttaacgtgcgaattgagttgaaagccggataaacctcgagtgctcagcgagaggagggtggaaatggcgtgagtgttgcagcagagcccttgtgcctcttttacatattttccttccatgttacagccgtttgcggtctcggattcgatctaagcatgtttgtggagtaacagacagtcctcgtgcttggaattgagtctagtcttggcaattcttgtgggtccatgaacccgcaagctgttggcataattatgcctcatttttaaaacggccttcccttcttaaagttttctgactgcagaaaaatggttagtgaaaaatgtggaataatgccaaaagggagacgatggactagagatgggcaaagctgccattttcagacagtaatctccagctctcagcttatgtataaagggttctttgctgtctggcttgacatctggaaaggagtagcctttctcgttctcagagcagtcgttcttggataatttacccatctgcattgggctgagaatgagacccttggggtttccctggagagcgatttttacttaattcagtagtatttatttaaaatggctaactgttgaagtttgcttagggcaatagtagccttttggtattgccactcttaagataaattacataggtgaaaaaaattaacattctgagttctgctttcataaccaaccgtgtataaaatactaggctaaggctggagatgggaatttaatggcttccttactgctagtccctgtagttgtgatgaatatgacacagaatacactcagtggcttagttcttgttatgttaacgaaaagttctcgaaatttgcccttcaaacccttgttttgcctttatttttttttgaaaagaaaccaagccctttaaatgggttgctctgtgctcactcataacctttacgtattagacttgaatcccaaacgagtgtgcagagaaatacggccccagcctttgagatgggtctgcttaggagagctagaaactgcaaagggaaaggttattaacttttacaaaatgaacaagtcaacaagcattaagtgtgttctgtaaaaaagataaagccttagcggaaaggggccatgttgaggcaaagtagtaaactttaaatataaaagaaatgatagccaaaagggatcaagatagatcaaggatcttgtctggtttcctcaatattgtgtaatgatattcttaattgagtgcttacaatgtgccaggcgctgccagaagaaaacttgttatacatttaatccttttaacactgggaggtagtgaagttactcccattttataggtgaggagacagttgcagagcataagtaccttcccaaatgacacaattaggaagtggtagagtcaggattcagggtccagtccttactcctgatgttgggctctgtttgttgagtgagtgagatttttgtgaggctaagtttggaagcctatctgaaagtggtgactgaagtgttgccataatgtgaacttggaattcaggctttgtaaaaatactagactctaggggaaaatatgagtgatggaaattgaaatgatgatctctattgtgcttatggtaaagcaaagactgatagaagctttaggaattactttagcaataaa

SEQ ID NO: 58543 - DNA, 2208 bp, Homo sapiens
tttaaggtttagttgttgtgatgacaaggaatatctcacgtctgaagacttgtcgatatttccttaagactttacaaaatcaaagaatcgaaaatgtcatggttccatacatacttgtcaaaacacagtattcataaacagccaattaataattaaaacgcacaaaattgaggggcaaaagatttcacgagatcccccacagaggccaaggtaggaagatctctgaagccaggagttttggaagccgcctgggcactatagcgaggcctcatatctacgaaaaagagaggagaggagagaagaggagagagaaagagaatcccccataactgcggccctcccccagccttgtgttaaaactatttcctcggaacagctctgaaagagtttgccaaccagagtaaaatcacttcgcagagataaacgagcggaaacgtattcagaagagagagatcgcggaagcaagggcagcggggcgcggggcccccacgtcccgggacccaggcagccgcggcaaccaggggcgagcatgtgctgaccgcggcaggacgcgcgggcctcccagagccacttcccggggcgcagggccccgcccggcctgaccctcccggttcattcattctgcacccgcggttgccgcacctccgcggccccgtcggggcggagaagaggggcttggctgccgagggaccttgtcgggccacaatccccaccaggcgcccgagccccgccgcgattcccgcgcgcccgcggcctccggcgggggggtggtctcagaagctatggaggcccgcgcccaagcccagagacccccagccttgccgccccaccctccgccggggcgtgggacagcactccctggcccgccgggcagccgcctggaagccccgggtccccgctgtccggctgccccgccgcggccggaagtctccccggcgccccctcctcagcacccgacttccctcgccgccgcggccaacccctctccgcgccgcctcgggcctcccagagcgggccgcgggccgaaggaggcgagaggccgcgctgcctgcccagctgagccgacgagagcagagcgaagagctggaggccggcctgggcggttaccttgatgatcctgcggggcagcccggccatcttgtcagaacccgagttcggcctctggtctcgtctccggctcctctcgcctcacgcacgagtggaagtcccgggctccacttccgggggacgttgccgcgcccgtcgccgcagccgccgccgaggcccctcgggaaatgtagtccctgctcgggcgcgggctcgggcacgggcgggcttccctccgacctggccccctcccccgtgcgccccgccccaaccgctgccggggatggcggaagtgacgctctgttgcggggcagggacttgggacaggccgcgaggggaggcgcggggctctggcgctcgtggccgagcctgcccgcgacggtggtacggcacgacccgcgcgcgactgcgcgcgcgtctctcttaaccgtggccacgcccgcgccggtggacgacgtaacagaggcctggcctacgacgtatcccattcattcattcacgcgttcgttctttcagctcacgcgttcgttctttcagctcagcctgcattgcgcgcgttccctgctggctctgcagtgaacgactgaggtggggctcatcgtcttgctccttcctcaaagggagggcaagaccgaaactcggtggcaaagctctgactgggggtctctccagttactcacacgctgttgggggagttttgatgtttaaattgtataaatcggacctctgacacgcccctaggcccagggtaggctgaaggaaaagggtttggagcgagttggaggcgggaagaatggttctgaacgcctagacctaaaggttgagactcagaattgttaacaggacgaatgaccaaggagaggtttaaagaacccagagtaatccgtaaagcagagattacctatagagtgcgaggtcctatgagagaattagagtgggggtgcccgaaaattgaattgttggggaagcgttttatcctgatgacggatggtttgctgtgtgatggactgtttgcaagcactttacttcatcttcacagcaatcgtgaggaggtgttgtttccattttacaaatgaggcttagatagttaaccttttccaaggagctgttttgtccccaggc

SEQ ID NO: 58544 - DNA, 1497 bp, Homo sapiens
attaacataatttttttaaaaagtacttataggtttgcatggtggctcatgcctgtaattccagcactttgggacgccgaggcaggaggattgcttgagacaagcctgggcaacataccgagacctcgtctctacaaaaatattaaaaaattagctgggtgtggtggtgtgcgcctgtagtaccagctactcaggaggctgaggtgggaggctctcttgggcccaggaggtagaggctgcagtgagccgtgagggagccattgcactccagtctgggtgacagaatgagactgcctcacaaaaaaaaaaaaaaaaaaaagcttgttactttctaagggtatgtgtttggggcagtgattttgtttttctgggcaccttagtaacactgcggccacgcttccccaactaaaggtaaaagtccatagcaacaatcctccctttctctctgcacccgggccgctttcccgcggagactacatttcccagaatgccccgcgggctgggacggcgcgcgcagcgctgtttcgtgggaccaggattgaaacaagatggcgggttcgtggtgagaagccgtcaaggtaaccgcttccctctactcctcctgtcgaggacttcctcgaaactgggcagtcccacagtgttggtcggcagttgtagaggtctcccgcctgtcgttcccggcagggcgaggttgcctgcatccccagcctttgtccttcctgcagaagagccggcatgtggctgcgcgtttcttatagcgccccctttgttccctggcggacgcccgtggggaggtgatgcagcttgtggctctagggactcctttaggtcgaagagttctggtgctcttggtagcctgttcctcaaacctctgaccctcagaggctctgtagcttttgttttggggttgaattccgggctgagggacttgatctctgaaatgatcttcctggggtgaataatctgactcccagcagggcgtgcttttctctgggcttcggacagaggggacctaatttcccccaagatgttttattcgtggtcagaagtcatgggtttacgtcccacgcatgtattaagcagcgatatactgagcaagtaatcgattgacctctctgagcctttgttcttaatctgaaatggagatgctgcttcacacacttgtgaaagtcagagcacatattgtatatgaaagtgggttgtaaactaaaaagcacacctatgagctcagggttaacggtgttaatgtactggcagtgcaaggtatcagtgtgagtggtttagactagcaaataagagggcctgtgtcctaattctcttttatcactattggggggaagggcacggatactcattgaagactattaaaaacaagatttaacaatggttatttgtcatttattcacaacaggccatgaagattgtggttttccccattttgtcattggagaaactgaggatcgtttagttaatgacttgtttaaagtttcccaattt

SEQ ID NO: 58545 - DNA, 840 bp, Homo sapiens
ctggaattacagccatgagccactgtagcctgccgttatttattattattatcaagtattatgtgctatacataattgtatgtgctatacttttatacagctggcagtgcagttggtttgtttacattggcaccaccacaaacatgtaagcaatgcattgcactatggcgttctgcaccatcactaggtgacaggaatttttttagcttcatgataatcttatggtaccactgtagtatacactgtccttcatcactgtacattgttgactaaaacattgttatttcaggcagaatcttgccctgtcacccagggtggaatgcggtggcatgatcttggctcactgaaacctctgcctactgggttcaaacgattcttctgcctcagcctcccgagtagctgaggttacaggcatgcaccacaacacctggctaattttttgtattttcagtagagacagagtttcaacatgttggccaggctggtcatgaactcttgacctcatgtgatccgctcaccatggcctcccaaagtgctgggattacaggcatgagtcactgcgcccggcctcaaaacattcttatgcagcccatgactttacttaattgtgccacctccattgctttttaaaaaacacacacacacacacacatatatatatatatatatatatatatatatatatatatatatatatataaacagagatggggggtcttaccatggtgcctaggctggtctcaacctcctaggctcaagcattcctttgccactttgaccttcctaagtgctgggattacaggtgtgagccactgcacgtggcccacattgccttttttt

SEQ ID NO: 58546 - DNA, 837 bp, Homo sapiens
agccactgcacccggcctggattgcttttataattaaaacagaaaatgatttaaaaatctagcagagaaatgaaggttaacataaaataacaacaacaacaacatagatgatattaacactcctggaaaagcattgaatggaagaaggaaagatgaaaacaactccttctcctcccccaaaataaacaacaaaaaacttgatcttgaatatgggtccatggaagaaactctccttcaggacattttagatggaaatagagtccatatgcagtaatgggtgtgctttcatctaaaatgagcttctgttaataatagttctagagcactttgtgtgtgctaaaatttttttctgagattttggtttgaggatctttcctaatttaagagaattttattcgttcactgttttgttaggtgaagagttggaaatatttctgtctcattaaacagcctcgattcaaagacagaccacctgcctgatttcctactctagtcctctaaaataaagacaggcaactgtgggcattcctgaaaattgtttgccttgtccattcaagctcatttttaaagaatgactcacggccaatctgcactccagcctttgatacttaagagtgtgtgtgtgtgtatgtgtgtgtgtgtgtgtgtacgcagaggaatggtggagagaggtataaaaagaaaatgaacaaagaagtgtgggttagaagccatactctgagctaagggctgcacttaattggaaattaggggccaacctacaagtacaatgctataaaactaagatcaggacaaagccatcaaagtccaagattactctgggggatagagacatga

SEQ ID NO: 58547 - DNA, 594 bp, Homo sapiens
agagaacccacttgtgtctcctatttctctgctctgcagttctacagggttgcatttgcctgatgcttttgattcagtgtttttacactatgtaacatagtgagaacgttaggttaaggaagcttgccatttcccttttcagagcagtcctttcaacaataccaagaattcgcactttggtagataatgacaagaaatacgacagcccagccgttagtaaacaagcaaatcatctaatggcaaaggctgatttaatcaaaacattctggttctccctcatctgaacccacacaaggaatgaaccaatccaactggaaaaaaatatttgttttatctttgccacatttatttactcttaaggactgtttaacttgatggggcagagaagttggaaagaacaaaaatactcaaggcagtgaacagcctcccaggtctctggcagcaggcaggaatgccagtggcctggaggtatttccacaggggcctgtttgtgagcagtttctgaagttgtttgccctcatcttgaggggtggagaaatgacctgcttatgtggcaggtttgcagggcagggggtgcagaataagaactagaga

SEQ ID NO: 58548 - DNA, 1514 bp, Homo sapiens
actttcatttatattaaaccctatatatactgtttttctaaggacaatttgtttacaagtacagaataaactacttaatgtactttggtttaatttacttacatgtgaggtaagtatttttttctaccatcatcaaagggttgccacaagaataaaatcaggcatatgctataatatgttggtgaagagagattaaaaccataagtaaaggcaaagtgataaaggcaaactgatattattatatcacattcctttatggtgggacatgataattatgattgtaaatttaacgcgataggatagcagaaaaggcctatatgtgtgatcagctggcctttccaggtggaatgtatatagaagttgtcctgtggtttgaggaagcagctactatttgcagagcctccctcatgtggttctgccacaagccttggctaaaggtagcctcacccgtgattgccagcctgcaggttggttcactgggtgctgctgcttctcagaattccgtgactaagccaggagtggtgtttgttctttactgataggtattcttctgcctgctctgcttaccacatcatcacaccaggccttgacctttgtgaacctctctggaaagtcaaacatacctagaggctgaccaggcttaggtctaataacaccatcaactgctctttgcaaggtcatggaaaagaggttggaagtgattcaaatgagaaggaaacttaatagctcatccagtccaaatttctcatgacatggatgggaaaacaaaaattcagagacgttagggggctccatccgggtcccctctactgtgatgcctttctggacatcccaaggtgattacagtggtgcttctggctgtttgcaaaaccattctgtgcactctcccgtgacttctcaccctttgttagaattatctgttgatggtttctctctcactagaactagacctctttaagaggaaggctgagtccccctagtgggttctacgaggcctggaacattgtaagtactcatgcatgtttgttgacttgatgaatctctctcatgctactaggtactattgttttggggccaggctcatggagattaagcaggaacttcaagaaagccaagctcttcttggtagcacaccagagtctgaagggtaagccaaagagtaagctgggaagcacatccaagtaggggaagataaaaaaaagtggatccagggcagaaagaaggtggcaaaaatgtttcggttccctcacttacagacgcattagattcatttatttatttattcattcaataactttatattgggccagaagctgttgtaggcactgaggatagaggggtgaatataacaaagtccctgcttatatcacagtgggaagaaaggcagtaaacaaataaatgagtaaccattatatggtcagagaagagtaaagtgttaggataaaaaaataaagcaggaggaagaaatggtcactggtggggcttctattttacataaagtggggagggaaagc

SEQ ID NO: 58549 - DNA, 4901 bp, Homo sapiens
cgaatctagcccttcatgttataaaaagggccagaggtccaaagagggtaagtgccttgtgcaaaattattcaactactttgtagaggattttaactagggttcagttagctccgcccacactataaaaggctctttctaaaaaacgaaacatgattaagggcacacggctccagcgttaacaaagctctttgttagctgggaaatgcccccctccccgactcatctgcttatcatctgcatagaattatgtactcaaaagcaggaaaattattgagaaaaccattggtccccggctgcagaccccaaggttgggagctggttcccgtttcctcccagagccggcagggggggcaccaggcaaagtttgcaagacgcgcctccctcccacccctcccccttcctcgcccaacttcccatagccgcggcctcaactaaaagtggccattgacctttcaagctttcgagcagtgatgcaatagaatagtatttcaaagaaaaatgcttatcgaaattttggatccggttttcccgtgattgttaagggtttcttttaaaaagtaggtcacatttcaagtaggtcatatttcgggggcgggtgcgcagacaaggagatgagtttccactaaggccagggggcctccaacggggttggaggtgagaatcccaggtagggtagaggtgccgagatccttccgaatcccagccctggggcgtcagccctgcagggaatggcagagacactctccggactgagggaaccgaggccagtcaccaagccccttccgggcgcgcaggtaagggcgcccccttagcagccggcgcaggtgacccgggcgggccgccgggtctaccggagacgttggagcagaggggaggaggaagggaggagccgggtgggtgcgggtgacaaggagccggagcgccagggggaggggactaaggacggccggcgccgcttaaggaggcgctgctctcccgctcgctgccttccaggacctgatcaaggggaccgcctccggtccccggccgtgggcaccgggacgagcacggcgtccccacgccatcgatgtgtcttagagccggagagtctggtttccgaggacccacagtcgctcctgcacgcccaccccccgcaaaagtgcggccaggagggtcgcatcgagggggcgccgccgggatgtttagaggaacccacccccgtggcaggccaagggccaaggatcgctatccttccctgaacccgggcgctcagctggcccgggtagggggcaggctccggccgccgaaacggggttggctgtagccggtggccggggagatctctagcttgcgcccgagcaccccggggtgtggggccagaggcaggccgaccccggcgtgcacaccgcccgccctgcacccgagcgctctcacccggtcttccctgaagcctgtgtattgcgaccgagcctctttaaagcagtagcggggcccgcggtcacgtgaggccgattcctggaaagttcctggaaagccgcctccgcagcagccgggcggggcgcgagcggagcgctgactggggagggaggcggggagcaagggaggcgcgtcggtctgggaagtcgcgcgcactcgctgctcctgggaccgacgtttaactcttgccaagtctcgtcgcagccgccgcggctggcgggccttgggcttcccctgaagcatgagccctctcgcccgcagccaccctcaccgcgtggcccgcggacagtgcgcgccggggtcccgggtgcacagcctcaggataccccgtgcccgcagctcgggcgcccgcggcaggtaccggtagtgggggaagcccgaaggctccgccccgaggagagttaccggggagggcggcgaggcgcggccgcgtgcgccggggagcggcggacggcctgggcttccgcagctcggagcgccggggaagagagagtccgaaccgcggctctgccccgcggcctagcgttgctgcctgctttctccagccccttctcggcgtctggaagtgtctggagtttcttttttttatttcccctaaactgccattcaaattaataatcctcctaataacctgatctcccgctcctccccaccggcctgcctcccgccctcgctccttcctccctccctccctctctccttcccacctccagggtcgcagccggagggaaacccggcagcagtccgagagtggaggtgtcccagcccgtagggggcgtcgccgcgcggtgggggatggggtcgaggcaatgatcctcgaggcttttgtgtgccctctgcgcacggaactccgaccgccgcctccgagcgcggggctggttgcatccccgggcatctcgttcccaaattaaacgttaacgggggaaacaagggcagacgcccctcctctcccgggcccctcccacctccccttttccccccacccccccgccccatgtccgctgaggaggctgcctggtgcggaggcggcggcggcggccgcggccgaggtcgaggtaagagcgcggcgttggtggtttgcattttccgcagcgctcgcgaccgcccgctcggccccggcctcgcctcggagccccgcgagggctgcgcgctcgggccgattcctcgacagcgcccgcggcggcgagaaccaccgcagccatcctggtccgggagcgaccgccgcggcacccccaaccccgccagagcgggcaccaggaagcggggggaggggagcgaggagcctcccgggcggagatgcggcagctcccgcacctccgcaccccgggttggtgcctcggggccccgcagcgctttagggcggagaaccaagtttgtgtgggtgcttcttcctgggggccctcgggctgcgccaggtgtgagaccggaatgccaatttggggaatctctcctgttctttcctttttaattttttctacttgtccttgacaagggcctattcccactggatctgcaggtgactatttgctcttcctaggtcgccagtctttgatttcagctagtgaccctgggcgggaagacaccctgttcaccctcctcctgacctccgccccccacctcttcagccaactttatcttggatctctgctctctttatcttttctctagagctgggccagggcgctaactggaagcttggggttaaatggtgcaggaacgtagaggcggaggagtccctgggattttccacgtctatttccccacccccaccccagccgcaggggtccagtttggactgacccaacctcccgctttctctttgtaggcgatcagtgggtgaccgcggctgcgagggactttgtcatccgtcctccaggatctggggagaaagagccccatcccttctctctctgccaccatttcggacaccccgcagggactcgttttgggattcgcactgacttcaaggaaggacgcgaacccttctctgaccccagctcgggcggccacctgtctttgccgcggtgacccttctctcatgaccctgcggtgccttgagccctccgggaatggcggggaagggacgcggagccagtgggggaccgcggggtcggcggaggagccatccccgcaggcggcgcgtctggcgaaggccctgcgggagctcggtcagacaggtagggagccgatcggccgcgacgcgtgcgggagggagcgcctccccaaggaagcagctaggaagcggggtcgaggtgggaagcaaagaataagatggaaatacgtcccttgcttccaagggaccgcggagagcacgctcgcagggtcctgggtccttgggaatgcgtaaggaaagtggttctccagggactcaggcctggcggagcgcagagcgcgggaagagcttcttggaaatagcttcttagcacgctggaagatttactgttttccgcagctgctcagggttaggctcccgggctcgaaccccggccggggaaagcgtcgggcgcctccctttgcacggggtgcaatcagcaagtcggtgccgcgggccccgcaggcccagcagcatctggctcccgggcggagctgcggctgcagcccaggatcttggcggccaagttcagggactgacactgccgcgagggcggctgcccgggcgtcgagagtaggctgcgaagcccccgccgagcgcggcttccatggtcggcgcgcccagggtactgccgctttcaagtacagtcaggcaattcgcgcggcacgctgtctctaggcatctgaaaaaagaaaaaagaaaaaaagtaaagtatctggcaaatcattctggctttccaaatccgtatcctaaaagcttacagttgtggcacagttgaaattttggtagcaacagggggagggagagggaaaagttctctcgcttgcgattccggtctttccgtgtgggccacgggctttccctcccggggaggcaccggcagattgcaagtatcccggtaattgtgggggtggggggagcacaaatgttcagacttcttaaatacggacggtctctgagccttcttagaaagcagagtgggccggggagatggtgcaggcagatgaaatcaagaatgcaggggagatggatggttgtgattgggtttggattagggcaaagttcaaaagagtttagggaagattgtaaacttgaagtagtaattatcacttgggaattcccatttcttagtgactggtaaggtagtcataaagcagcgaacagaagctattgtactagagctgtgcttttacaacaagtacatagcagtgctttctacatagaaggctgttcatagcaggctttgcagattctttttttttttttttttttttttttggtggggggcacaccaaccatccaaaaaagttgcttctgtttttactgtagttcaattacaggagttgggtttt

SEQ ID NO: 58550 - DNA, 2372 bp, Homo sapiens
atcacgaatattaataggtggggtctttaggaggtaattaagtcatgagagtgaaagcctcatgaatgggattagccgccttgtaaaaggtctggaggaaactagtgtttgtcccttgttatccttccatcccttccaccacatgaggacacagaggtcaaggtgccatcttgaaagcaaagactaggccctcaccagacacgaaacctgccagcgctttgactttggacttcccagcttccagaactatgaaaaatacatttctggccaagcgcagtggctcacgcctgtaatcccagcactctgggaggccaaggcgggtggatcacgaggtcaagagattgagatcatcctgaccaacatggtgaaaccttgtctctacttaaaatacaaaaaattagccaggtgtggtggcaggcacctgtagtcccagctactagggaggctgaggcaggagaatcacttgaatccgggaggcggaggttgtagtgagccgagattgcaccactgcactcagcctggcaacagagagagactccatctaaaaaaaaaaaaaaatctattatgtgttaattaccagttcttaggtgttttgttatagcagcacaaacagactaagacaatactcatcacccaagtcactctggaaggcactgttttataagagcagaacagagtgtgatacatgaatgctgcaggcatcagaaattgctggaacccattaagttgctcccattaagttgggggcagggtaaaataagtagaagtacacagtatgccactgtgtgggcaaagttgtttctgatttcatactaaagatagaaccctaaaacaagacctaacaagaggtttctttgtggaaacaatcttcttgggttaatagctaaatatagtgactaatgcttcttcctgttctttctcgactataccttatgagctacctttagaacaagcaggttgaagccctgccttttactaatcccctgagataatctttttaaaactctcagtggcaagtgaagaccccagtgttttccccatctctgagatttctttcatatccctttagcattcgcatttgctcttactggttatttcccatgctgaatcattcactgactatctggtcatctcctgggggagccaaatagttttaaacattctcagtgactcatctatcctcaccagttcttttatttatttgttgttgatgtgtcatacacacacaatctctctctgtcattaaaatgctaaaaaaagtttctatttaccgtcatagtatactccactttctcagtgcatgtcttcacttgttttgtagttttctagttcatgcaattgaaataaaggtacagttacttagtctttaaccaagtcccaggtttagccaaaattgtcaaactcaggattcagcccttcaaagcttacgaatttattgagggccgggcgcggtggctcacatttgtaatctcagcactttgggaggcccaggcgagtggatcaccagaggtcaggagtttgagaccagcctggccaacatggtgaaacccagtctctactaaaaacacaaaaattagctgggtgtggtggcacgtgcctgtaatcttagctactcgggaggctgaggcaggagaattgcttgaacctgggaggcggaggttgcaatgagctgagatcacgccactgcactccagcctgggcaacagggtgagaccatctcaaaaaaaaaaaaaaaaaaaaagagaattacttggtgaaaataattccatatcattactattttgtaaaagggaaactgctctcttagcacattgtgttgtttgctttgctaccttcagttgctctgcgtcagaaccctgtatctgaaatccctcaataatgagactaactgaggtagtggtgatactctatcttgttattttaaagcaggcctgcaaatactgggtgctcagtaaccatgagaaaaaggcctgataaaagcaacaacagaagcaattgggacccaaggtggacaccacggcaaatcctcagcgcctgggttttagacggttctgccaaaggtttggttctttccagcctgagatcattgcttagatctttctggggtgtagttaaagtaaaatgagcctctttctatttatcccacagatgccgttctctcttaacaatgtactccttgaaggcttcttaaggtaatgtctggtctctgctgaatgcagccataaatgcaatagaacgctacctttgctgaatgtgctcagtcctccccccttagcacagctcaccctactagccttatcttgctggcctccctctacccccactgcaacctcccaacaggctttaaaatccagacatacctaacgaatcac

SEQ ID NO: 58551 - DNA, 899 bp, Homo sapiens
gcagaaaatagcatatgaaatggagatgcttcacagtagccttcacttcctgctgaaattggatctgtctgtaaacactgtctgggatggttaattttaggtgttgacttgactagctgaaggaatacctagaaactgggtaaagcattatttttgggtgtgtctgagcacatttccagaggagattagcatgtgtgtctgaatagactaagtggggaagatctgccctcaatgtgggtgggcaccatctactctactagggccctggagagaacaaaaacagagaaaagaagaacatgtccatctctctgctggggctggggtacactcttcctctcctggccttggacaacaactctgggctccctggcctttggatttcaggacttacatcagcagccccgccaggctttcaggcatttggccttggactgagagttacacaattggcttccctggttctaaggcctttggacttggactgagccatgctgtcaacatctcaggtctccagtttgtgaatggcctgtcatgggacttcttagccttcataattgcagagccaatttccctaataaatcctctgtcatatatctatatctcttattagttgtgtttctctagagaaccctaatgcacctcccaattgtctccaaacaattaaaaaagggcactattttaaatggtcatttgtctgtcgagtatttactgggtaactcctatgggccaggcatcacggtaggcattacaaacaattgtttgtaataaatatatagtgttttgccgagtcagcggtaatatgcttatgcagagttgaagaagagggatatttcttgaaaactggaaattatacagattaaaggaatagtgaataggaatataaacagctaaagatatag

SEQ ID NO: 58552 - DNA, 3831 bp, Homo sapiens
ctgcatgtcagattggtctcaccaatggcacgcagcaaagcaagatttgcaggtgctgttttcttgctgctggcaaatgcagccgtggagaccaccgttttttgcagcactgttccagtgtcctgttaattgttctgtcggtgttgagaggaggttggggaccaggcatggcaacttcctgacgccatcttcctgattgtgggcagcagccacaatcagcaatcttatctaggtagtcatccatggatgttcagctcagcccttctccagcctttccaatgatttcgaatgtccccaattccccctaacgaatccctttctgactaggagtaactagctgagtgctgcaatgaaatcctgactgacagatttgtaaactctttgcgggcaggaacccttgatataaataaatgaccttgcattttaatggagggaagcagaaggataaacaaatgaataagtgaaaagttttaataagatggtgatgcgtaaaaaataaagctggttaatggggagtgcaggaaatgagcgcagctgtcttgccgttttaatcagataggtcagagaaggcttctctactagggtggcttttgacctgcctctctgttaggtcaattgtgtgcgaggccctgatggagttactgtgttaaaatgcaatgattcaattactccattacttagataccctttaagtgacactacggttgtccatctccccgctattgaattgtttacccacagtaagcatggcgggaagagcttcgatccgacccttgaacgctcaataaaaatggcgacagcacttcctgtacttgccctcaacaaagatggtgtcaacacttcctgtttagggttttcgccattaacaaagatggtgcttatggggcaggttccctaacagtcaggattccggttgcagtttttctcccccgccccaaagatacgtggttgcagacgtaagtaacaggaatccatctttctttgaaagtcctgcattgtagcgtctgcgacctgggccctgcgggggcttccccgccccgctaacttgctccgcatttccgatccgggccaaggctgggtggctgcggcagtgccggaggcccgctctccccttggtccgctctttagttcattcccagcactccctctttagcgggtcaagttgccgcagaaaccgcccgtagtcttcctgtttgatacaagggtttcagcggccgaagcagagcctttttaaatagttcccaatgggcgctcacggccaaacgtgaacacctcccctcctcacctgtcacctcctgaactttacagggttgcgagggggagtgtgggatcgggtgtcgcctagccgtggtcgtactgcccgggtgtgtctgaagccccatctgtcatccctgcctgccttcccggtcacttaaccttcactgccttacacacaaccaagccacagcacactggtgcaggggtggtggaactgcaccttcaaatcgtgcctggctactgaccagtgctggggtgtgtgctttttttgaaagaaaaaaatcccataaaatgtcccatgcatgtgcggccacgacagtgttgtgctggagattcggaattcttagtgggaaggaatggagtctgtgactgtatattgtgtaaagtttattgtagactgggcacaaacaacaattttcttaaaggtgatcgtgtagaggacttttagcgaaaagagccttaaattctgaacctgctgatttctgtcctgcactcctattactgatcaggttttgcaaatacttgtgatcaaaaaaaggggacctgcgtccaccttggcagtttctgccttggtggtggtggtgcaggtctgatgagggcaatgtgaaaataaaaccaccatttcttctccagcgtgttaaaattagtgctgctctgtaatcttcagataaaaattgcttgttcagaagggtctctgacccactttttttttttctttttccaaatttctttattgaacgaggaattgagctgggaccccattgtgtgaaaagcagaaacagaaaagatgattcatcttcattgttgttcattatgttaggaaacattcaaaattaacctggcttggcttaatcagtgaattaaataccatgacctggcagtctgctatggtttaaagatgtgcttgacctgaaggaacttacattgcagtgacactgtctttagggccacatcaacatgtctgtaatttgagctgtgattttggctctttccagggagaaatggaggccagagacaaacaagtactccgctcacttcgcctggagctgggtgcagaggtattggtggagggactggttcttcagtacctctaccaggaaggaatcttgacggaaaaccatattcaagaaatcaatgctcaaaccacaggcctccggaaaacaatgctcctgctggatatcctaccttccaggggccctaaagcatttgatacattcctagattccctacaggagtttccctgggtcagggagaagctgaagaaggcaagggaagaggccatgaccgacctgcctgcaggtaggcctcagaaagatcactttgaaccagctccaaaatgttgtaactatgctctttgcttttttgtttatttgtttgtttgtttttgagacagagtcttgctctgttgcccaggctggagtgcaatggtgtgatctcggctcactgcaacctctgcttcctgggttcaagcaattcacttgcttcagcctcccgagttgctgggaatacaggcatttgccaccatgccctgctaagttttgtatttttagtagagatggggtttcatcatgttggccaggctggtctcgaactccgtacctcaggtgatccacccacctccgcctcccaaagtgctgggattacagacgtgagccaccacacctagccagaactatgccctttggatttgaagttgggatgtaaggcaggacaagggtcaatggttgatgaaagtgggtaaggatttgggactgaagggacatgacgttggaggaataggatcaggaggtggcattaggaagtgcagggaaggaagaatgaaccgtgactgggaggtgagggagggagctcagagaatgcatttagaaatgcttccaggaaacctggcatgtcacttgggaagcatgttctcatcagagagccaggtcatatctcagccgttggcatcaggagccatttggaaagtgcagatgggaaagcaggcattcggcctactgacaactgatttgtgaggtgccagagctaccagctggaaaaggtcagattcatggaggaggagacagcctctaggaaggcatgccctgcacctgtcccctgggctgtcctgtgtggccaaaggggattattttgaaggctgacttagtttgtttttaaaggttattcgtttaaagtgtcctttttagtttagctttgttcagacactggagtatttaattttgcaaagagcaatagtttggggagggtctcagtttaatttgaaggagaattggaagctggagaagagagaaacagttctggttctgttagcctggcttgtagcaggaagaagatgtgatatggaaacacttgctttttcttaacctcccttgactctgtttcacaaagatagaggggcagagaactgaactggcaaaaattaaaaattgaaaaaaaaaagtaattgaaagttggcttgcaaatttttaacaaagttagagaatcaaggttctctggggtttctgataagagtgatagaactattccggttcagtgggccccagacttcgtggttgctattttttaaatactggttaa

SEQ ID NO: 58553 - DNA, 2441 bp, Homo sapiens
attcccaacccccacgcagtgaaaagccctgaattgggggtttatcattcattcacttcttcactttatagtttcctatctcctaaaaatcacttttaaaatcttcatatgtttttgaaaatcctgtataccgtaagttctagaggtgtgtgtgtgtgtatatgtatatatgtatatagagagagatatatatgttttttgtgtgtgtgggaaggaaagggtggaagtaatggaagaaattatgcatttaaacttgatagttaacaccttctcttgtttcagaacttaaaatattttttacatgtttaaagtaatttaattggtggcaatattttaattctaaaattaaattgggatttactgaattggaaacctaggttttgttattttgtaaatcctgggaagagtatcagagttgaaatcccttcaatttaacgtccctataaaaaagaaatccagaacctactgcctaagacctcggtgcttctccagtgttgtaattgagtaattttagtaagatttaaaatagtccacttaaatttttgtaaagatatctttgagttttgaggatctagactataggagaatgtgtgtacacattaacctcttaatgtatgtacacattaaactcttcctaccttttcctcattttgatcatacttattaattaatttgtatggattcagtagtctcttgggaggccttgagaacaaatgggaaggaatggccttcttttttagccaagacgttgatccttctctaagaatgaactgattttatcttattaaggttttcttgtgttggtcttcccagagatgcttggtttcccctttattggtttgttgttttaattttcgttgtttcacttgtaaattttgagctgtctcagaggctttattttggtgattgttcctggttagttgctttttacttatgtgctggatgtaatttgtttagagaattgagctgtatcttgttcttctctactcttctgaacgccacccccatcaaatctcaaaacatacaaaaacaccctaaaccttttgattctctcagaatctgcctctgtgactagtctcccaatctctgttaggaaaaaaaaaaaggtttaagttgttaaagttgttaatggatcattggttttgtgtttttctcaccctgtaaggactcttaccttttaaaagaggaattctggtgataaaatgacttaatccaccttggcaccgtggagagaacacttcatggtttgtctctctggccaaggtcacatactagacattagatcagctggaaatcctctctgggctcctgtcaggtcatttaggagatagggacagtgccgtgtctgggtgaaggcagcctgtgcctgcctgcctggcttctcactgctcatggggcctgtcggcactgacaggctccctccagtgcctgagctaatctggatctggaaaggaggttgatggcagcccagcctccccatctggtgggactcagcgtaaatcacggtgggagtgactcctgggccacaggaccccctccctgttccactgtgttggccctggctgtgggtctgggtgtctgccatgattctctgccttttgccccagtcttcctttaagcttgggagtgtttttgtttttctctcctccgttggtttgattcatgctttatgtattcttagccatggcgagagtgaagaacagagctctgggaacacagctcggtgcctccggcatcagcattggatgtctcaactcttgagcctgttggaatggctgtccctaagctgacacttgcttcaaccttctctgggcttgatcttgtcctccccatagactctgtgccctggactccctggctgctcttacaacagcagtgcgcaggactggctagtccatttcccctctacctgtgggctcaagggctctgcctgccccttgtggcgccagccttgagtgacaacacagaaccacacctgccgccctcctgagatacattctagctctgagttgcatacttggatgcatctaaagtcactgagctcttaatggcagatattttagatattgtgatgggtttattagagaggtttctagcttgggattcttttcataggttcctccaatcataccacgtaattgaccttgctctgcatgtaagttcagtgttggtctcagtgtatctagcttgcagtctatccatgtgcttccactgtgactgagtagtgtttgcctagtggcgtcctgtgtgctagagtgagaacagtgggtcagtatccatagcaagacccttccctcggtaaagggagagtctgcagagggcccaggtttctgtgtatacccagcccgattttcatatacttcctaaggacctactgaatgccaggtactgggtatataaagacaaatggaggatctccagatcagttgagggcattcatg

SEQ ID NO: 58554 - DNA, 2281 bp, Homo sapiens
ccttctatgttggattaagtcctctctcatgcgcttctgagcatcttgcacctcctatttggtgtgcttctctataataggttgtaacttccagagggcagggacctagtgctattggacaaatggcaagtgctcaaataaaagatgttgtttttttcttaaaatatatttaaattttcctcattgtctacaaaattaatttcagacatttttaaattcatttcagaccttctgtaatatggcccgaccttatctatattaattattgaattagatttggcaacatttaacagaaaacccaaatgacagtgattttaacaagatggaaggtttatttttcccttctcctcctcttcctcctgtttctcctccatatccttctctctctctctctgtgacacacacacacacacacacacacacacacacacacaatctgtaagtagtctccagggctgtgggctggtgtgactgctccacagttaccagaggccaaggcttcttctctctttatgctttgccatccttggcacgtgatttccactctcaagattccctcatggtcctaactggctgctggagccccaggccatcttgtcccttgtgggaatagtgctagcagagtagaagggagactcagagagaggaagacaaaaaggaagctaacatgaaaaagacattttcgtcaaatgctagttctttgaacttctgggaagaaaagagtttctaggagaccacaactttttactgctttgaagattccaaattcctgagaatatgattcagttagtgagtaacattctctatgctggcaaaggaggaaattacctggatctggacctatctttggaggatgagagaggagctgttatctctcccccactgatacaatgatgttgtaatgtcttttcagtaggcatttgcctgagctcttttttttggactataatttccccccaccccactttctctaatctctgcttctcaaaatcttatctattcttcagagcctaattcctttcttttcccagaagcttttccacattctcctcatctgggatttttttttttctttgaacctccacagatttttgtgatgatctttctccatgttttaacatagataccggtaaacttatctaacgcttccctagctccctctcaccatcgaatgccatccccttgagttaagtcagggactatgccttgttcacatctgctgcagccatcacagaacctttaaaaaagtaggttcttaaatcttaaatgagtgcatgctgtgagggaaggaaagcaaatagactttttggctcaaataaagaattgatgtgtttagaagacaggtaaagagaaaagggacgagttgttggatgatcttgatatctaggctttgaatctgggcttggcagggtaggtgcatgagccctgaatataagggagctggcctagggagagaaaaaaaaccatcacttcaactcctgtcttccagggtgttgacatcattaactgccccacatccaccagatttccccagatcttagttgacatagagacattcattctgtttctcaccttaagaaaatccatcctgagttagcttcagttggtgctgctgctaggctttatggtgataggctttgggaggaactgagaatcccaaatgctaggtggtatctgaatgtggcattacgagatataatgctctaaactctgcaatttctcttgtaagacggaaacaattcaacctgttctttgactccttttctgggttttcttggctccaggcttcttagaacactgatcacactgttccaccacccccaatctttacctccattctctctaccctcccagcccccaccaaaacacaattcttttcaggcaagtgcaccatacaggtgctctggtggtcccgtaactgaggatgtagttgccagccttttagcaatatcaagagttctctggaggctcttgagagctgtggccttggttaaattggacagaatcacctttttggtaaattcccttccgattcatttcacaaatggcttaaatcatttatgttgttttgttcaatccagtcaggaaatgaaagcattgccattttaattgttttagaacagcattttacacctaatatagactcccaaagccagccaaatgcagattttggctcctagatcgctgactgcatgctgactgtgttcttgagtgtggaagaaaacagatccagccaaagactgattaccttccaaaggtcacaaaagaagtttctctttat

SEQ ID NO: 58555 - DNA, 2959 bp, Homo sapiens
tcgtatagctgccaatgagacaagtgttgacattttggtttcttttgttatggttttattgttgttattgctaatgaatgatttttgaagcaaatatgtactttcaagcaaatatgtgcaaatatgaagttggaagatgatattttctcttaaaagcattttaccattttcacattgccatgcccttagctttcagggtgttttcttgagtcattattttcttttgttgattctttaaaatgtaccaatggtgagtgtgaattcatagtatgaaaaatgtgggtgatagactatgattagacatagttcaagataatagtttatatgaaaaattgatgctctaaagcatttgctaccaaaatttgtttttttgtgtgtgtgttacctttactcttctccctgggtccacttaatggttctgtatttttttggagagccaaatatgtcttgaaggtagtcggggagagggaggaggagcaacatgaaatgagtgtgctgttttatcagaagccacttattcacagggcctgaagtgatagctgttgggagaagtgatattcatactgatgggggtaaaactgcctactcattttggggagcttttgttttcataataaaaattgtttgtacaaataaaggatgttctaaaggagaggactatttgcaattgagtgttttctattctggcagcatccgattgaaaatcatttcagaaattcttagtattgcatgcaatcattgtttagtagctagatctttttaactttatgatagaattgtgcatttcatttctgttttaagtcctatccatgtatttaagtagtgtaataaattattttcttgccagcagggtgacttgagtgaaaaaatatgtataatttggccaatagcctaattctgtgacctctacaatccaaatggatgccgtggcttttactttggttacatttcaaatgactttaattggcctgaaattctattagtatgattgattcaggatacccattcaaagtcatctcatttgtctgtgtcatttgtcatggatcaaatctctgggcaaagcagtcattgaaccttggttaaacctcagactgtgtccgtctgtcaattttataaatgattgggaggaaggcactcttgtgagttctggatcagtagtgatataattctgtttctgttttttgcttttttaaatctactgctacataataaaccactccaaaacttggtgccttaaaataaccattttaccttggtcatgattttgtgggttaggaattaagaaagggctcagctgggcagtttgtctctgatccacatggtgtcagctgaggaatctggggataggggatccacttttgagatctcagactcagatgtctggtgccttgactggggtgcgtggctctgggcagggggcttagctggggcccagcatgtggtctctccatgtggcttaggtttctttcagcatgggagctgggtttcccaaaatgtgaggatggaagcttcaaggctgaaggtttctcaggatgtagactcataagtcccagaacaccagttctcctgcttattggtcaagtaagtcactaaattcaacccagacttggggtcaggagggggtcagggaggggagtagcattatccttcacttttcattgggagaagaaacaaaggatttgaggccatcattaatggctagtgatgagatcacatcagaatagcatttatttaatagcaatttattactctcctgaggttcaggtggcttaaagtgcaaatattagtaggtagttccatgtaagggaatcccattccaagtggcacagccttcatttagacaaaactctgatgtaattcattctagtcatttgatggatggagactctaaaagtggcatgaatataatctcaaaatatctagaaagatgtcagtcctctgagtcattgtgcaaactagtttgttgagagagttcaaaggcatcatggatcttaacagctagaaaagattctaagagattacatcatcattatcaccttctggaaagatttattgagcatctgttaggtgccaggccctgggaatacagaagagaatatgactgattcttgccgttgagacatagttgaggacatagaattgatacacaagagatgaatagaaatccatggaatatagactaactggtaaataaaagtacaggtgataagagcacaagaaggagaagtaatcaatagaggcttagctaggggctgggaaaggctgtagggactttccgtcactccgaaaacatgaagtccaaagtggtggccattacctacaagtccctttgagatctggatccctgtatcctctctgatcccctttgctacctctcttttcctcactcactggccttcttccatggaagtataggcatttgaggatctttgccacttgctcattcctctgcctggaatgctctttttccagatattcccatagtttgctttctcacttccatcagatctctggtcaactgtgctctccaccagccttctctgaccactctatctacttcctgttcatcaacacatttatctccatgaagccagggcattgtctgccttattaattattgtatcctgagcacctagagtagtgcctggcatcattggtgcccaacaaaatatggttgaatgtatgaatgagtaaatgaatgcagaatcttgaaacagggtgtgctttttgggctgatagaacaaagtagtgtaaactgggtagcttataaacaatagaaatttaattcccacagttctagaagctgggaagtccaagatcaaggcaccagcagattaggtgtctggtgagggcccatttcctggttcatagacggtaccttgttgtgtcttcacatggtaggagggtcaagatagctctctcgggcttcttttatatgggtaccaatcttgttcatgaa

SEQ ID NO: 58556 - DNA, 1262 bp, Homo sapiens
aaacgttcagactccacaattgaaaagatcgccctgattgagcattttgtggtgcttttgcttgttttgctgttgaacaaacaagagttcaagacaggtgaattttttccagatgtgcatttgaataattggacagatccctgtggtctcttcagtaataacacaagtgactgcttattgtcgccttcttcctccatgcctggcttcctgtggtcactctgcaaagggctctgtagttgcaagatgactccacagttaatattgagctcatgaggagtaaatagttcatccaagctgggaatctctgagcttcattaggtctgcttatttgggtaccagaacctgtcactatccaggagacacacagcagatcagctttcacttgctttgttaccattttaggcatgaaatagaacgattttctcccagaacatgatgtccctgtgaagtaataagtgatagcactttatgggctttaaggaatctagagccaggccagttagcaactgaagctgtagtaactcagctggacactgatgtccttttcctgaagttatatgagcagaggcatgtaagggaaatgtggctcggtgacccacagtgctcagtgcccagttcagtgacaggcagccaggagagctgagccatggagaggccagcaagccaaagggatttgctgccatgctgtgacatggaaggcagggtgcactcagcactgtattgatgacgttcttaagtctgaaggacttaatgcagtttctggatgtgcctcctcatcaccacacctgttcaagggggaaactgggacccaccccaagagtcagctctatagaagtttttcctgacaatactctctactcctggaggtagactgtgtttttctcctgtactctcctctaacacagaacttgcgtgttactatatgcaacttgtttatctgccccctggactgtgaacccttgaggacagggatattgtcttatcactctttgaattctcagtgctgggtacatattacgtgttcaatacatgtttgttaaataaatgaaacagtcacgtttggctcctttcttccacaaggcattctacccttccacggaaacaattatagcagcatggaaacaattacagcagctatctataattgataatcagaactaatgaaatatggtagcacaggcatgaatagagttgaaattatcagagtgattataaaatacataggaataaacttaacagaaattgggcaagacctttatgaa

SEQ ID NO: 58557 - DNA, 3782 bp, Homo sapiens
atatcataaaaatctttctaggaaaatataatcaaaagcatcaaggctgtctcctacagttagtggtttctattattttggttctcagagctatgacaatgtcactggatttcaagaattcagaaagacaaaaagaaaactcataattttgaaatggggaaagggaaagatcttggacatagtcttctgtttttaaaatagtcattctcattttaaaataggaaaaaaattatttttcatttaacaaagcaaaaaacccagtctgtacttttaaattaatgcaaacatcaatattttatagggagaacattaataatcattgtggagcccattaatcacaattctgcttttgatttattgtaaatatgcctcccattttcctcctcattaccaatcaccttctttaattataagagggctttcattaaaacttttgaatcatttattttggagcacctaactttagaagacatttattgatttttatagcataaaatacaaatgtttttattttagaaaacatcataaactaaaactttattggaggagtttggctaaagattcaaaaatatatagaagtaaaaatatatttaaaactgcacagtttttacaacagcatgtatggcatttggattcagaattttaactagcagtaacctcatctgtttagtaatgaattttaaaatagaaaaaaaatctgccaaaacagaccagttgtttattagctatttaactttgatgagctgaaatgagatagtgaagcagaataattagaacaactttttttctcaacatctaaatatttctctttttcattaacatttcagttaagtttgaagaaattccaaaaatgagattctcattaactaaaaggaattctaagggttataagccatctacattttttctatgacctgaagactttttttcgaaaaccaattttgggggaggattgtcagatttacctaaggttttggtttttaatttaaaaaaatttaaagaaactatcttagtgatttttgtcatcatttttatttgttgccatgattaatatatggaaataagataaattggattctatttctgtgaaagccatattcttaacatcaatgcctacctaaaaaatatacgagtcacacttgatcattcagaatcattttgaaattctctggtaatcttttaaaaagccagcgttgactagtattatgtggctagttatatttattacagcagtctagttattgtttgtgtaactatagtttttttctaatagaaataaaatgtctatttgcaggataaaaagaagtatgtatatttgatgattttgttgtagaaaatacttaataccttttaaaagctgtttgactttcggttttaaaacagctgtgtagcttggtgagtcctgcagattccggctttctctgtggcctttgagccaagtaattttttgcaacattttcctttgctttcttataaacactcaaaaattatacttgcttttcctgaaggccagctattaagttagaaagcaccaaaggtgttatgaaattgccctttattttttcgtacatcagggaggaatgatagattttgtgtatctcttgtgtgtcattagaacagaaatatttagggctgctaactcccggagttgtgtacttacccttattacagatgcaatgattttgtctgactgcattgctttaagatgagttttattgctttcatgcttaggcaaggatatttaattttatttgtgtttagagtatcttgttgtaatatacttctcccccatcttgtgctcctaaatttgggataagcatagaatccttttaagaatgtaggttattttccagtttactagaaagcatgacacatataaattagcgactaaggattatagcgtcctttcctaaaggttatcatgaaaaaaagttaaaatgtcaaagaagatcctactccagtaaaaacaatttactctgtaaaatcctgatacctcataggaagctttggatcttgttctcagctaccaaaattctttaaatatgaaagttaacatgacaggaaagtggaatacactctgtgctgaagacccactgttcaaggtgtgtggttattaatctgggtttgaatttacaaattatatggtctgattaatttgtagataggggtcggtggaggttagacgatgggctttagaacaaagaggctgataaaatactactcacaagcctttctgcttgtttgtgactctctggaaatgccattagatagttctcatagctatggtcaaaataagtaggcttagaaataaaagacattttctcccctgtaaaaggaggcggctggcctgtgctctttctaggctcttcccagagacagcaacctcggcttctgaacccttagtgctcattctatgctccaccgcgtctcctctacacgccatgatctttgttatctgatttgctagccattgttatggaaagttctcgactgtaatgcaaaaagctcagccttgggtccttgctaatgtcagcaacccaaaggcgcccctcaaaccacctcgaaaagaaaaatcctttaaaagatgtcaaactctcctttcatgttagcccaaaatgaagttcccgagcagcatctggcagagcagggtaattcaatctattttaatgcaaagattttccaagaaggcaggaagccgtcaaggagaaggctttgaggcatctgctgttttgtttccagatcccttgtgttaatttaatgtttctagggaacccggctctttcttttttctcggaatccctgctctaggaactggtgagtgcgggggcgctgtgggagctgcagataagccagcgcttggccgggcacccgcgggccgcgcagcggggcagggaggcgcgcggccccagccgccctagggcgccggctgcctctgcgggccccggctgcccagcccagcgcggggaggcggcgccgactgccggggggcgcctgcaagacctgtttatttgcatttgtccaatttggctcaagtgaaaggtaaatacggagcgatcagcttgtcctcactccagcaaaaccagggaaactcagctccatctccaggaaacaaacccaacccaaacctgagtgaaacgtaaatcttgcataaacaaacacgttcttttgcttctgggaaggaacaccggagaaatgggcattccttccgactgcccgcctcccactgtcggtaaaaatgagccgtcacaggttgccggcaatttcttgttgtgtcccgagccattccgcggatcttgttttgaaggggcgagtcaggtgtttgtgcggctccagatcctgaacaggttatgcgctgggtccttccttatcaggaggggggtcaggctgccctcccattctcatcttccgccccagaccagaggctacaccaaagttcacttttgaaaagaaatcctgcagaattaaaaataaatgtctgccctttaaaatagtttcgttttagtattatgcatatttctgtttaggaacttgtaatgctaataatttatgttgctatgacaattgtcctgcatacctaatattaaatttaatgaattaatgtggcgtatagagtaatagtaacttaactagtactccgataatgccagtattccctgtgttactaagttaatggaatcagaattttggagttacaatatagaggttttttaggccaatttttctatgggattctagggatctttttataacatttctgcttttcgaagcagtctataccattg

SEQ ID NO: 58558 - DNA, 1522 bp, Homo sapiens
ctcacaggtttccaggaattcaaggcctaagaaacattctactaagaacttgaaataccaaggcatttaatttttggaagtgtagaatgttttattacttttgaagttttgaggaccagcaaaatagagaagtgtattgtgttacacaatttgctatgttataaatgtttacttttagtggacatgatgtaactagaatggaaaaaaacacagaaatagtaattgttgatataatcttgccttggaggtagcgatgggtgggggaatggggagtgggaacatagcatgagaggagaaaaaaatctgttaccaatttatggtaaaattattacagttaaaaagagttgcatatatgaataataataaaaccttcacccagctttcttgaaagtttacaaacttcctttctttgcttagaactagctcgagaaaggaaaaaaaaaatcttctcttagattctttgcataaaaaactaattcctttatttttctcaccggttctcttcatctttcattttggtccccagagaatactgtttgactattttgaaatcatttctcttctccactttgttgcactttgccctctgggatcgtttccccagctcactcttcttcctttgtcctactgctccctttacccccacctctctttctatagccaagaaagaaacttgttaaccatgactttttcttttaggaaccaattcaaaaatccctttggtacacaggtttacaggcaccctatctcagtctgattccagaaaaaaaagcaccaggaaatacaggaaaatatgtagctattaataaattccacagataggcagaagttgccaaaggaaaatgggagaacaacaaggactgttcattggacttccaggaatagaaattgttgggagtctactcttttcaaaataaactgacatggggctgaccaccttgtcagttactcccatctgatggtggggtgtggcaaacaagggcaaaggtattgtttggttttcaaggtcaggctgctaattgtataattggattaacccagcccgcagagacatggagactaccagtcacttgttagcctgggtcccaaggtagaagcagcacaaaagtatggggaggatgttcagctgaaatggaaggaagaaagtaaagaggatagagaaaaaaatacagaaatgttagccaaaggagttataattaggagaaaaccattatcttattaatctctgtgtgattaattaattataaatgagttttctcttggaaaagagcgaagctacttagtatgacttgtggggagagtgtgtgtgaggagaagaaagtgtactttttctgcccaattatggaaggtcttaaacatcagccatgtttttaggagtttgactaataaatccagaaggcttattatttattttatccaggcatgttttatttactatgagagatcttcttagttcttgcttttgttttgtaagaaaaatgagctaggttagcagtgtccgttttctgtttttagaaaataa

SEQ ID NO: 58559 - DNA, 799 bp, Homo sapiens
tctacaagaaatcttatttttgagatatagctggtaaatatggaaaactcaaaacgcctgcctgttctacttgtcatcgttcatcctctgacagcttacaccagtcaagttactaagtctctggttatttttgagactctttctccccaagcgttccttagtgaatcttaagattctgggatttagcttagcagacaggctgtgccaccatgcagtgtcttctttggccctccctgccccattgcaatgtcttttactacaccttatttagccaaaaatgtgcagtcctttagtgatgagaatgtaataatggaatacttaaagtaattaaagatactgctttttctgattgaaacaaaagctaatagacttccaattgtcacctgtcacagtgtacttttttggagttgccctttgagctgtgttatctgatttgaacttttcaagcttcctctggccacactgggatttttctctggctatgccctgcagtccctttactgaattggcagtgctcctaatgcttttctctagctttcatttgaccttcagtagaggttaaaattaacttcaaggtgaaactggtcctcgtgattggtcgattgcttctctttcttgagcactgcacccatttcagaagacagatggttttagtattaatggcatcaaccatcctttgctggaagataaagagtcagactttctatttggaatgtaagctccttgagggcactgagcttgtttattcaaccttctattcctagtgcctagaacagtgcccagaacactgtagaagaag

SEQ ID NO: 58560 - DNA, 3449 bp, Homo sapiens
tattcagaaaagagtaaaagcctataaattgtaactttaagccataaaataacatttatttatgcttgttcttcaaaagcttatatttgataatcttttttgttagaagtcgaagcctgagaaaaatggctaatttcatttttcatgtgtttgtaaaatatttttaggactatcacaagaaattccctaaaaatgtcaaagcaaatgaacaagtgaaattctgcacatcccttgtgccactattttgtttacttactgaaaaaatgacattggcttttgtaaaacctgggtgtgctggtgggcatgtgcagatgtgtcgctgtcatctgtcatgtgtcatgctctggatgtcagaaccagacatcagtcagggaagagagtgagtagcaagccacctcgccaaactcttgctgcagggtgcacggggttcacatcctctgcttagatttagtgcgactttccaaaacacctgcagtgcggtacttcatggctggtcccacgtaacaatttatgccctagagatgtctgactagatcttaggaaattatactaatggttctgacgttgtttccttcaagaatcgaggcgctaaatatagtcaagctgaatgacaaaattttactcacactcagggcatgtcagtgagggcatcaaaaatggaaaaataataaatactgctgatatttactaagttttatggtatgacaggcactgcactaagtcttttgaatatctaatcatgtttaactctcaatgtcccattttatagctgaggtggccgcagcacagagaggttaagtgagttgcccaaggttgcacggttaataaatggcagagctgggctctaaacccaggccgtctgacccctgagcctttcctcttctaaccactgtgcagtctccaagcaccagcagaatgaagtgagcacgtgctaatccacagctgtcatggtttggccctctgtgggctttcagagcaccttaaaaccctttgttctgtgtcagagctgtttttcagctttgcagatgtctgaagtcaagcagaagagatggagagtctgataaagcacacgtggcaaatctctggccgagttgatattagaacacagagtcccagagtgatttactgtccagggggaaagccagttggcctggctaccttgcaagacggttaaaggacataagaatagatattcattcaagactgtcagaaagaaagtaggtcagcaatgaaataaaaacaaatgtcaaagaaacaccactttggtataaataaaaagtcgattcttcttaataaagagctgtctgttcttcattaattagaaaagtacagagcctgcttactttgagattccaaaacctcttcaggcacaactcgttattaatttgatcactttcctcaaaagaatgatattttgacaaatacagtttctggcttcagtcacatatagaaacattggaataagtacaatgttgtgttttgcttttttttttaaaataggaactatgtttgataatgcatatactccaaacacctctaaaaataattttcaattggcaagctattttttggtgtattttcctagtctgggagaggaagttttatcatttaatttgataaacttagtacctttgagagaaaggaggagaaaattttaccatcttatgtggttgaaatatgctttagtatttacataattgaaaatgattcaaactgatttcctctgacgaacatccgaaatgaaaataaaaattgtgtctactccaaagggtagtggcttgagtcacccactggtatgtgtgacctatgagtcactcactggtatgcgtcttcccgatcccctggcctatgggttagaagtcaaagatgctccactggggcttcctttgtagcttcttttccccttcagtattcaaccacagctactgctggcagctcctggcagaacaggaatgggagaccaaggagaggatatgtggaagctgagtgatttatttataggggacttttggcaaatgaaagaaaatagatgtgaagtcttagcagttccagcatgttcatcagaaatgcaagctcatgatagtcatttcaaagggaattgtggaagaatggtgttaccctacttcacaggccattaaatcatatatatgtttggttgccagtgagaatctgagtagcagagcagacaagaataaggacgtatgggatcgaggcctgtagcttgtgaccatgaacaagtcacgtgaccctttggccttaaattcaccataaagtcgtgtacttgatctcagtgattgtatcttacttcatcaaaatggtatgattctaaattcctgtgggatatacaggtaagacaggactggtggagcattaggtttggtttttcctttaaaagaaagtgttggggaggcagcagggaatagcaaaggtcacagactcaaaagcattaactgccgggcctatgaagacacgaatgatgtaggtttgatataatggaggtacaaatccatgttttatgcaaaacctcatatttctaaactttggcaattcattcatgtttatcaaatcactgttttaggccccctttggctggccagtgggccctctgctttagacttctggaataaactccacagttgagagatgaaggacagacctggattctaacagacctaaatttgaaccttagctctgccctctaaggaatgtgtaaacgtatacatctgtatttaacttctcaaagcttcaagtttctttatctgtagaaatgagaatgataatacctcttttgtaggatttcctgaagactgcgggtactatgtattaagtatacatagtaggcacatcctcaaagggaattccattaccttttctatggaggtagatcctgtataatttttaaatttttgtcttgatggccagttgctcacagtttttaaaagtgtagtagatgccagcgcttctttatagattctgaaatcccttcaatttacattttagttgttttaaaataaagatttctttaagagacaacattcagagggataagttttctacttgccagtagaggtagaaggcagtaaaaccaaatagatctgtcagttactgtcttgaggtagagcccctaaagcaataaaacccacctttgacaatgaggaaacacgagacatcattttctccttaggacaaaagtctagtgagtaatggcccttctgtgactaatggtaattctgtactttattcccatagaaaatctaattttgaaaacatttgctgcatgccctactatgtactaggcactatgccaggggaataatgtaaagatgaccaaaacataatggaattgttgcctacaagtatgtttcggctatttaaggatttatattgcagtttgtgcaaattgtgtatgagtccactttgagaggttatacatatcttccaataatgtt

SEQ ID NO: 58561 - DNA, 1308 bp, Homo sapiens
tcagagtgtgtatgacaaattatctcaaagcccagagggcctcggtggtccaagtcccagcaacaagggacacctgctgtcatgacatgggcttgacctgggttctgtggacattaaggaaccactgtcctgagaggggggtatggagctaagctaggggagggagcaggatgagcttagagctgccgaggaaacggaaagagtctataggctttaaaaaagaggagagaaagaaagaagaataaaagatgtttctggagactctgagaatagttaagagtccagggccagccagaatcaccctttcccccagctaccgagagtgccacagagcagaaattgacttggaagatattgctcctagaccaaaagtccaaattaaggggtataggcagttaagggcaagtgagggcagtagagatggttgtccgagtccagtggccatgagaggtttctcagctgcctgccaattctcttctgggacaatgccagccataaagtacaagccatgctttggtgtgggctgtagacatattgttttcccataactactgtcattcaaacaggatctagtttcttggcatgagcaaattgttcccgctgaatacacacactatgtccgctatggggcaaggcaaagcgaatcctccaaggaactggatggatttttcattctgagataagcagtttttttgtgggggcgggggaggtggagaggagccagcttcactctctgttcatgcgagttttgaatgaaatgagtaaagttcatgttccccccagagtacacaaggttcaagtgggattacccagtgggaatccagcccgattgtaatttaacttgttcgagggatctaaatatttaatctgccttcatcacgaatcctagaatcctatgtaagcagcaaaggccgagggtctgaaagtaaacactgcagttagaatcagaagtgttgcaactagcacaactgctgctgtgacgtcctacaaactttggagagtgccagaggaagctagcctgagagcacagaactggcagtcacgaggcctgcattctccagcttcgcctgccaccaactctctgagcctccaggcctcctttgtcaagtaaggacacaagcaaagcatctcagaagacaagtcattttcataactggaaatgagacagagccaacaaggatgcgtgaaaccagccacataaattgtgaaacctatgtgatcatgtatatgtacaatgttttcttaaaaaaaattaccattcctagatctaatatcaattttttgtatgattttgccccacattttgct

SEQ ID NO: 58562 - DNA, 1686 bp, Homo sapiens
ccccctttgcaagctttaaaggaaattatttgtctcatagataggattattccctttgtgggtgagccctggcgagaacctccgtcctgagccaacttccttagcgggattctcaccctgccaggtaagatccctctgttaccaggagctccataaaatgcaaataagtttcaatattcacttaggaaaataaaaatgagcagtaagtcagctaggagcaaaaggaacgggacattcaaaggctgtgcccaatgtcagacagaagtagctttgtaattctcccagtgtagggctgcaggcacctggcgctggagacccggcctggacgaggcagggctcagggcgcggctggaggggctcgcccggcggggcgctggagcgggagaagggcgccctctgccgggggtgaggaagatcagtccgcacgcgcggtgccttggtcttgcagcctgttcgaacctcgcgcgaggacatccacttcttccacggggaaagtaggagggtgggggcagaaaaaccaaactcctgccaagaaggtgctttgcacgagcattttgcgaccccatcccttcagccccgaacctccccctggcataagtgaaaggactgtagtcaattgcagatgctgtcaggaagccaggtgcgtcctcactccccagccctaaaatccaaagaaagaagagattgtttgagacgatctgaagaaaggtcaggtcctaacagatccacgggaccttctttttcaccttccttgtcttgggttctggagcacgggcgctgaatcagctgaatgcggcctgggcatctggaagtggtcctgagggacacctcgcggtgcagcccccgggacgacccaggacaccctggacaccctggacacccaggccgagagccgggacccgcccacgcctcctcactgctgctcgagggtaggcaggagcacgcggaccccgtgggggctgaagcggggctctgctgcccgccctgcgcaagctcccggctctggttgctggtccacaaaatcgggaggctgaattagccggtcgggtggcccccagccttatagcttcgaattctgtgatcctattttagacccagacttgtccgcgaagggaaatgaagaggcgcggaaggcttggagcgtgaaccaaaaaacaatgggtggggatcgtctaaccagctcccttccctagaagggcggaaacggctttcgaagcatccgcgattctctttattgaatcttgagtgacacctagtggcccatccgcctcaccgtcacggcgatgctggtttcactgggcttttcagaaggcgtgctggcctgcccatggttctcggctaaaagactttggagcgtagggtgccgatgaagtttcctgggaccttccggaagcacttgctgtcccgtcaacagccctgtacctgcgatgcatgcaattctaatgaaaatgcccttctcgtctggagggcttgcttgagcacatcctgagctctcaggcagcaaatatagagtcgggtgctattccgggagctgggcacacaaagatgaccaacgcttggtttctgatctcaagaatctcacagcccagctggggggaaatggaccagtagaagagtgtgtatttgatgctgtggggtagagggggtggacctagctcggcctagagacatcaagaaagtcaccct

SEQ ID NO: 58563 - DNA, 895 bp, Homo sapiens
agcacatcttaccaaatattagccctatgagccagggagaaaaaaaccaggaggtcttttgcaaggcttcttagaacggtcacttgctgctgcttctttgcctgtcaagctgtgtgctgggacacacacattaaggccttcattttgttactggtataatttttaaaaatatgtaaaaacacatatttgcctcctaaatgacttgctgttgccgtacacatataatgtaatatttgattcctgtctttattagatctttataatctaacggtttaagtttggtaaaattatcgtttcctacttctctgttgaaagacttgaaagtacccccgaaatattactttgtgtcaagctttagacacacttagtctctggggttaatgacaagccagctcagaggcccacagcaggtaatgagggtgaaagtccaagctttgccatctgacagctgtgtcgatgtgtggagccaaaacatttctcttgactgcgtctctctacctattgggtcctggaagactcagttcccttccaaacccagccagcatcttgaatgcactcaaaatccacgttttggctcaatcaggtgttcctgcttgtgccgggatggggaggggcagtggcagaggaagtcgcggagcttctgcgagagagctgccccttggaaatcaagcaaaggataaacacatgctgccaaaaatctggaactggaaaaataaataattaaaatgggtccctccacagcatttcttgctgctatttatcaagaactcccagtgtgctcagagctgtgtgttctgaaagacagggtctgtaccccctgagcttgtcagccaagttaaataatatactctggttcaaacaatagcatgtcatggctgcacaggtgggagcttgg

SEQ ID NO: 58564 - DNA, 925 bp, Homo sapiens
gtatgcattgaaaagccttaatggaattgaatttcaagaggagtttgaatgaaaaagggtggtagttttgatgaaaaagctgacaattttctaacctattaaataggtagagaagatactcaattcaacaaatatttgtttgatgcctgctagtgtaagcaatgctctgtgctgggtgccactgattttgccactgaaaggacgatagcagattgcaaccttgtgtaatggggtcatgggatcagtgtgcccctggctgtcactcagaagaatgatgtcatttgattgcatttgttctgcattttattttcaggtcttgaatgtgtttttgaaaaggcatgctgaattataggtgcctaaaacaggagcaggacttgaaacactctagagggaacctcaatagattccaacagcaattcctttagagcagacacagtaattttaacagtaatccacaggctgcaaggcacaagcggctggatttgcttgccttctttctccctctcctcctagctggctcttattttccgtcttcaatcagccataggtagaaaagtgacaggactgactgggttgtattttcccactttctggttctcttatctcttgtcactgatcctcctctccttcagcttctgctaagcagtgatttacgagatgcttgtgtaatgagtgtgtactcagctgtttacacactggaccattactttttctgccttgccaccaactttgaatccactttcataactgtagcaggttaactgcagctctcaaatgtgctaaggcaaccgatttctgtagaccctctctctaataatcttctgtgatatttgtacagcacttccacatgtattatttcttttgagccccgcatcaagtctgaggttgattctatggggatgatttcattttccagatgaggagg

SEQ ID NO: 58565 - DNA, 1360 bp, Homo sapiens
ataggttagcctttgcagggctgtgacaaaaactcaaccctgattctaaagcctctgataaatgatattaaatccaaaatttgtgaaaactggacattccctggctcagtggttttgacctatgaccgtttgaacatggaaagtgcaaagaagataattgagacttacataattatataatggatgtaacagatactctcagcccaaccctggttttccattcttttcctttcagtcattctaaggaaaatagcaatgacagcaatctacatgtgctttttgagtcacagataagatgtgcaagcaatttgtagtttctggtattcttataaagacgatactgttctttgcacattgaaaagtcagttatatcaaaatgaccacactgagatggccacatcttcccacagagcttgtaaaccagtccttcaccatatagaatctcctatgccaatttgcttcaccatgcagacactttgtattatgtttcttccctggggatcccatctttgaaagacttttgtctacccaacaaactgcacatattaagtaacagttcccattcccagggtttatttatcaagggcgtctcaaaactgccggtcagagtactgactgtgttcccacatggagctgataaaattccaacccaaagcaaagaaacttgatatcttccttaatccatgcgtgtttttccattcagctgtctgaaatattgcaaatagctcataagcccccattacttccttcatggatagtaatggaaccccagaactcaggaccccaggctgggaaccattatgaaaagccaccagtagttgatgggttcccactttctagaaagcaaaaagttctagcctctgatcattcaaagcctgaagtcctgggaagagtttttgactgggcatcaaagctggttagccctgcattcttcactgaggattactgctagagatcctactgtttgaactctggctgagcaaatataacgcctaaagagacaaagtccaaggaaggctcttggggagataagaacagccaaactaataagctatgggatatccataaaatggtatgatacggggccgctaaaaataatcatatggagatgtaggcattgatatggaatagtcactacggtctgttattaaattagagggcaggtctaatgtagtatttttagtgtcctctctctctctctcttttttttttttatggagtcttgctctgtcacccagcctggagtgcagtggcgcaatctcagctcactgcaacctccgcctccacaggttcaagcagttctcctgtctcagcctccctagtagctgggactacagtcacacgctaccatgcccggcta

SEQ ID NO: 58566 - DNA, 1583 bp, Homo sapiens
ccaccatgcccagccaggtttgttttttgtttagtggagctagtaactgacgttctcggacctcagcctccgtgctacttacctgcaccatctctaatggatgctctctgacttccaacaagcaccattaagaacatcccttttagtaaatatatgttgtaatggaatagatttttttgaaatgaccttatctcaggcagcatgcactttcataagaatgtattgattggcctttaaatattcctcaaatgttttcacttgtctctgtgacctaatatttgtcctgttcccagcatctcctccatatccaaacacaatgttcaggtcttcattcgaagccttcctgccagtcttttgttttttgctttttaaacattttgatgcttttattctgctatatggagggtgcactgtttctgataggccaaatgtgggatttgatattgctttcaggaggatcgggttttaatatcattgccacctgtttagtggtggagaaactgaggcccacagaggctaaggaatgtggcccccagttacacagggagtatatgggagagcagctttgaacccagacccttctgactcaagaggtgtcattttcccatttttatttccatgctgctgtttttttaaatggctcccctaaattatttagttcatggtttgcatttggaaataaacaccaacttttagtacactcattgcccacaaaagaaccacatggagcaaaggccacaaacccattttgtgtgagtgtttcagtctgcaaatgtgttttttatgtgctaaatagctcaaagtttcaagacaaaggctgtttttccaccacgccagtgaacaggccaacctagtgaacaaaaatcaatgaaatgacttctgctggtatcactgaaacacagacaagaatttagccattttaaaatttccttgttaatccaattcagctaccttttgttgaatcccagccatgggccaagtcctgtactaggccctgggggaaacaaagatgaatgagggtctactctgatgaagttcacaggtgagtgtgggaataatttcaatacactgtgtaaaatgctctaatagctggtactcaaggtatgaaaggactccaaagaaccctttaatatttaggaggaaacagagctgtgattaagaatcccccaagaagcctcgaattgtgtctgcctccttacatagaaaaggcatgttgggcattgagctggtgtgtgagcaatgccaaagggcatctggtcaacctcattgcccaaatccctttctcatcactaccattttgtctttggcttatgtcatccatttttttgcctaaattttctgttccattttcccatataatataataataataatgaatatttattgaggcataattgtaaactcttagaacagatgtacatttttctcccaacttcatcaggtgaaaactattatttgcatttctgcagatggagagcctgaaacacagagagggcacatgtcttgcttgaggtcaccagcttgcaaatggcacaaccactatcctccttccttcactaagttctagccaagctggtctattt

SEQ ID NO: 58567 - DNA, 1292 bp, Homo sapiens
gcggggatggcatagccgaggggtttgtggcaccaattgtgcagttaggcaaatctggcttcaattcctggttctgccactggtgagctgttcctggagcaagttactcagcccctctgtgcctcagttccctcactctacaacagggatgggaataataatccaggaaacatttctagaaaagggaggtgaggagagggctcgggtgtgaggcttcacatgttggttccttctaggcactctgcccaccagctccctgccttctctcctgtctggtattttttgtttcttgtttgtgagcagacaggcctttgaaccccttcctagtcggtggctggcccagaacataaaggttctctgagagcaggcaagggagtgactctgttgtaggagggaaactcgtacaggccagacggagatcaccggcttacctcagagttcagattccactgattcggagttttaatcatttggttgagaccagaacaaaatttactcttgcgtaattatcaacaggattataagggcaagatttagtggtgtttgtctcagctctttataaacaccataaactgggtggcttataaataatagaaacttatttctcacagttctggaggatgagaagtccaagatcaagagttggtgtcctgtgagagccccctttctcatgatggcgccttcctgctgggtcctcacatggtggaaagggcagggcagctctctgaggcctcttttataagggcactaatcccatttatgaggactctgccctcatgatctaatcccctccaaaggccccacctccaagtaccatcaccttgggggttaggatttcaatacctggagttagggggacatcaatattcagatcatagcagcattaaagacaagaaacacccctgagaacctcccgaaatttcagaagccccacatccacgtcagtggtccataagtcacgggctcacatgccagatgctgttctaagaactgtgcggttactgttgttatgccctctttgcagatgagaaagcgacatacacagaggttacacagctggttagggatgggttcagaggtcacccagctggcttgcggtggactgggatgaaagccaggagtctactggcttccactgggttcattgctggcagcctcctccttattcagagatactgagcatggagtgggcgtcctagctgtccaatgtgggctgaatctgtttgcaaatgagtggatactaatgccaacaatagtaattgtacaggttttattgccgatactatcatcaa

SEQ ID NO: 58568 - DNA, 1805 bp, Homo sapiens
aatgcccattgattatggtcaaaagttggacactgaggattaaccaaagtatttaaacccagcatatgctaacatattttaggtgtttatctcagtaatgacagtcgacatcactgttcattcaaattgtcttcaaagccaaggaaaatggtagcatagctttttcatcgtaaattaagctggaggtacttaaacgtctggccaattaccaaactggctacacaaccaccaagccagagtgcatccaaaagctccatgaagagtttcacgtgcgtctctctgcctacttttctagcacgagcttccactactttaacaggaaaataaaaaaaggattcaagggcagtttgtggagggacaaaatgagtattccaaaatacaaacaagacaccgtccccagaaagagaggttacataccagacgcacgcacgctccttgcaacccgcacacggaaaacttaagtgaccgcagttctggccgcgctcgccaccggggacacctccacagctccaaccacaggcacccactcaactccgcttacggaggcattgggactaagggttacggtcctacagcggggtgtcggcccagcgagaggaagagggccgaacggacccctcgggctcccgtccctagggaaatgtgaagtatcccgggagaggtccgagggcggcggcggcggcggtgaaaagccccactcctccgcgtggaccgggatcctcaggggtgcggcgccaccccacgtgctgacgtatggcccagaagccgcctcatcgcaccgccccaccagcctggaggagcgggctctgtcccttggcccagcggcacgcgaagcaggaagtcccaccccccacgccgacgtcacccacgccaccgacgccggttgctgccggagccgttagagggaggagacaaacgaaccgaggcgggagcggccacgggtgacagcggcagcggcggggccgggctgcgctcccgaaggcgttcctggagggccctgggatggactcagagatccccagagccccaggggacggaaaatctagccccgggcacttgccttggagtctgagtgatgcgcgtcgttggagcgcgaagccggtctccctagcctccgcccgacacagcgtctccaggggttttcctccttttcgcgcctctccttccctcttccccacaccatttgagagcctcaaatggtagtcctgccgccacctctctcccttcgccagcctgccatcgtccccatgggtgcagatatgcgctcccgaagccgcctgcctgccgcgtctgcctcgggcatcagcccacgagtggggagtcggctcagcttgccacgagggaacctcgggttaggaccaatcgcccgggagagagccctcctcgcccccgcacctcctgctccaagtctcctgtcctggttatcccaagttcagggcccacctggggtcacatggggaactacttgtcttaaggctgtaaacaatagttggaagaggagttgctagcttttgagaacttccatgatcatccaaagtctgaaacaaagtaggcggtcagcctttcaaaatacgtgttggaagaaacagacaccttcccatccccagcgtttgttcagtgccttggttgggctttgattctcactgctttgtgaagtacagcttatttttacccccaagattatgattttcaggctgtagttattattggacaactgagaggtgattttgttgttgttgaaatgagggaaaacgggccattagaaaggaccgtgtctcttaagaggagggaaaaaaaggacagcg

SEQ ID NO: 58569 - DNA, 856 bp, Homo sapiens
taactattaggatgttcacaacagttagatagatgtatagatagataaacatattgtgtaagaaagaattaaccttactcaaagtaaggtatggcctttgctgtcagcccctaggaggtaatctctaagcccttgggatgtcttgcctgatgaaagtgtccttgtttacttgggggccttgagccatgccagatagtctgattacaataatttgtggtaggggctttggggcacatgctatcagctcaacctccagagaagctggaggttaaggtcatccacatgggcagtcaactatgtctatgtggtgatgccccagtaaaaactttggacaccaaacttctctggttggcagtactccatgagtattgccacacactattgctgggaggcacaatggctggctctgactccaatgggagaggacatttagaagtgtcatgcttgaaactctcctgaactctgccccttgcacctcttcctttggtttattttaatttgtacacatcactgtaataacccataaccgtgagtgtagcagctttcagtgagttctgtgagtctttctagtgattattgaaactgagagtgttcttgggaatccttgcactttcatttggtgccagagtgagggtgatcttggggacacctgaactttggagttggtgttagaagtggaatttgcaagaatgactgtattagtccattttcacactgctgataaagacatacccaagattgggcaatttacaaaagaaagaggtttaattggacttacagttccacatggctggggacatctcacaatcatggttgaaggcgaaagacatgtcttacatcacagcaggcaagagag

SEQ ID NO: 58570 - DNA, 1533 bp, Homo sapiens
tggccttgaacgctggaaaaggcgaggaagagatcctcccccagagcctccaggaggaactcagagctgccaacacctcactcccagccctgcaagacccactttaggacttctgacctctaaagctgtagatgattaatccgtgttgttttaagccactaagtttgtaattatttgtttcagcagctctgggaagccaatatggcgccatggaggggctcctagatctgcatttttgagtgactcctggtagaattgttaggcatgctaaattttgagggctagaggtgtagtaggaagagactgaggaacaggaggtctgtatttctagccctggcgtcatgagctatgtgacttcggcaaagtcactgcctcattcactgggcctcagattcactgtctgtaagctgaggcagttggctacagggggcagaggggaagagatctctggctgcagtattctgagaagctgagagaaaacagtgaagctctttgaaaacagtgaagtctggccagtgtagatcttaggactgggatttcctagaagaaagagatactggtaattcttttaacagctcatttttatacctctcttcctgtgtgccaggtcttggtctaaacccttcccttccatgaactcctgtctgtgaggtcatcttggcacagcaatcagtcttctatgcgatgaataattaactgctctgaggagatgatttcaaatcgggagtcagatcaataagctactaaggggggatgggcgggtgggcaccatcttcagctaatgaagggggcgattccctgtctccgctatgaaaagaaaaatgtcacagacattacatgccgcctgaggggtatggatagaagggggaaggggctgcggttgccaggcaaccggctcatcactaatcatgcgcgtaaaagccttgggcctctgttatgagcacagctagtgggccaccctccttctctccgccccctgcttgacagctggccttgggttctggttccagacacttagaccctgaaacaggcccaggtccccctcagtatccccgggtcgattctgttgctagaaagcaaactgggagagcaaagactctttgtgtccactccagacgacaaaggtctggcacccatattccaggacactctttcctacaccatggccttttgaatgagctgtcaccccagaggcttacttagatttgaggaaaatcccttcctgacccctccattcaagggaggctcttgctgtttgccgtgtggatactgagcaaacacgtgggtccccaggctggctcttgatgtgctctgtaaacactcctctctggatacagccaactgtccaattatgcaggagtcaacccgcttcccctggggatttgttgtcttaaagaacgaggacccactgtgactagaaagttgacatagcacatgtcacacagagaaagtgcacccccggtggaagccggggttccctgggggcccagccgtctttccaaacagaagggcagaaggctgtttgatctgtga

SEQ ID NO: 58571 - DNA, 636 bp, Homo sapiens
aataaaaacttgaaagaacttgaaggcaggaaccagtggcttcatcttggtattatcatcctttctatggcacacaggatatggtcccagtttttacaaaatatagcaagaagagtcacggcaaagaaggtgccaagaatgtggcagcgactcttcatcatgggtgagacgaacttcgcgatggtggacacacacactaagatgacagtcatgaaggccaggatcacgttgatgcacctccccaggagaactttagcattcacggtgtctgtctgcagagcttgctgctcttgctggtggagctccagcttagaaatgcgagtctggcaggattccaaggcttcctgtgagcaagagggagagcaagggtcaaacggtgttgggatggtgagcaacacgtgagtgctcgctcagctgtacacaaaagccccagctcagaaagcccaatgcccaggcggctgcaaatccccaaaccgatgatgatggtgatagacaaagatgtggaacaagaatcccaggctcattttctcctgttgttcacgagtagaagagcatgtggatacaaccacaaaataccataaatgaggaagtatggctaagttttttgactttacctgttttttttgagatgtagtc

SEQ ID NO: 58572 - DNA, 647 bp, Homo sapiens
atctagaggtagaaaggttttcatattttaccttaccaaaccgagcagtaaataaacacctgttcttactcctttaattctcaactgcatcagggctggtcatccaattctgagtctcaaggcaaagcctcatgctctcacagacctctcgttacaggacagccttgtatgcacaggaatgtttatgcacagatggccaaatgacttttggcttactttatgatttaacaatgctttgcatgttctcaagagtccaggttggcgaaagcaacagcatttaaagccccaaatcaatcgatcttactgcttgtcagcaaatctcagttaaaaatgtttgatgagggtataaagttggaactattactgggctgctccttttgcccttttataaccctagctagcactgcatgggataattgagagacagctacacctatcattgttagatgcctgtaaattccctgaacacaaactgaaattacatgtgcgtgctaaaagaaagctgccagtcctccacccttcgtttaatccagacttggcactgaccctatacaatacactatacattgcagcttggtttcagggttaggacgcaggaaggacaaaggtttctggttatctagactcagtgtacactgtgtggatca

SEQ ID NO: 58573 - DNA, 1795 bp, Homo sapiens
agacccaaatgatcaaatgacaagcagcaaacttttccaactttccctcctctcccacccccaggtgttttggtttctgaagactggggatcactatcaacaatgggcaaacctttgctacagaactgattaggacaaaaccacctgaattaataaatgtgtgcaaatattttaatgttcagggaaggaaagaaagattgcattttgtgtcaatatagagaagtcttctatgacaaagagccacaagtgaacacagatttcctgtgagatcaaaggctcccccaggcagaaatcacatgaacctgagccttcaccaccctatggggaatgaatcccacactatggggtgtccaagcatggtccgaggaggcccagttcagacgcactctccatttcccccatggctgcttcctctcccacagctcgaggcagccaccacacccttcttccccaacgtgggctgggcagcatcacacaaagtcagttttacagagtttcaagtttccaggcaaaggcaggatgactcaaagatgcccacttgtcgaaagactagatattaaagtacaaagttagattccaactcagagcctggttagacccggggttactttcgaactcccagggaggtgggaggagacctggctcttctccagccagtagctggcacaatccaacccagatatttgtccatctgttaaatcactcacactggactgacatttttaaaaggacataacaataaggagactggtggttcattaggcgtttaggcagtttaagtatctagaaaccaactgagaaattagggagggatttgggcaagcacaaagataactattaagagcacaaagacaaattgcatttctttctggcatctcccaggatattaaagaccacaaagctccacaatacatatttacacactctggctgaaacggaagagttgtgaagagacttaccaagggccacacagcaaacccaggagcagagcaggatcggcagctagctcaccctcctgcccgaggcatttgaatctgcaaggcaggcaggctagatattccaaacagcacctaccatatgactcagcctggactttggagatactgctcacattatctcggggtattcctgtgtttgtctcagagaaactccacgccctgcactgtacccaatacaaatgtcagtaataatgcaccgtattcaacacattgctgtacaaatgggctctttgtgcagtcagcagaagagatccacattctatatctttgcagggaggtcgactagaagggcgcctgctatcaatcaccccgactctgggattgcaagaggacattcagtctggtactctctctttaccaataaggaaatgggctcggctcaacaaaccttgttaggcagagcaaatgccagcagtggactgggcacagtaaacaccaatgtgatgaaggcagagcaaaggggccagccagcaccaagggaagggaagtggcttaaagacagtgagcagtcaggagactctctgttgattcattcatgagacagacacttgctgggtgcctcctagtgtcaggcgcagcgaggcgtgctggggaggcaaaggggcatagccgcctcctggcgtagtggccgggggagagacacaatgacagccactgataagtgtcaggagagtacttggtgctaagcgagcacttggaaggagctgctaagggggagataagaggaaagggggaggggaaaaagtcaatggaaagcagaaaggcttgtcagaaggtgaatcagttagacagagaag

SEQ ID NO: 58574 - DNA, 2054 bp, Homo sapiens
ttagggtagggtcagtttgtaaggttttgccctaaaccttaaaaagaacacaaaatccttcaggtcttaagcaagattgatgcccaggccctatgaaggacacattgaatcttctgtatattttttaacaagctccacaggtaatttggatgtggctggcattgcctcgtgcacacctaaagtaaccatgcttagaaaacgctgtgttatccaaaagaaacacagcacagagaattctatgaacaaactattgcagtactctaagattttaaaataagtaactttctcaaacactgatatggggtttagagttaacactgcgggtaagcaaacccaccaggctctctcagttgacacagctcttctggctccttcgaggaagtgaggaccagtatgtggaagagcctttggggctggtgtttctcaagctacagcttcaggcaatctcagggacagaacctggactgtgcatctgacagccgcctttctacctcccacctccaccccattcttatgtccaagtagtttgaaactattgagctagatcagtatatcccgaacaccaaattgttaagagtggatggagccccagtgatctttcccactccccagaccagtgaatcaggaaatctctactggaggttctgcagtaccccaggttctttatctaaacaggaaagttaggaaacaccaatttaggtcaaactcattttaagataaggaaatcaaggcccaagaagtttaagtgatttcaccaaggacttatagctgattaatgatagctgggagctgtgaaacctggtgagctaattcttccctcttagaccaatactgcttgttatattatgtgtaatcatgagagccccagtatctgtgcagtttctgattcaccaggaagaggccccaagtgattaataaagcctgaacccaggggcatgtcagaacgcaccactggtttaaaggatgactgacatggtaaagtgtccaacgtcaacctgccctcggaattctttcactttcagtatcagtaggagaaatatacaattgtacatttcatagaaaagtaaacccagccccacacagttaacaaccaggtgaagcgggaacacaggacaattcaaagttttcggatcacaccatttcttggtcaaatattagtaccttcagcaaaagacctctaattaccacacacttttggttatggcaacagcctgctccttacttttgggagagaggagtactccacacccatggcctgaaaccaggatctccaaacccatcaaagagaaacatggatgggaaaccaaaccccccaagcttggaaagcatccagcaagctttaattcagggagagttcaatcgagatataattgcctctaattggccctcccacacgatctcacaacatacagctataatcagttccacaaagaatatgttatatttcttttctcccttgaaaagccagaatcctctcttgttaggtacttaccatcactgttttgatttttgtaaatataccgagacattaaaaaaggaagaatgaatgggtaaaagcaaagaagtagatggatttcttttttaaaataagcactgatccctatgaccttaatgataacccagtgcgattcaaatctgtaatggagactgatgtcgactcaggaaacctttctagtccagggcacatgtgatccaaaaaacacattcatctggtcggacattttccatactctgatttttatctttcttggcatgctcaactctcctttaataaagtcacaaccctttgttgccatggaacccaatcagacacggagcctgttactatgacttccctgcagatataaaaaaagacccagtgaccaaaagaccagctctttcttaaaaaaaaaaaaaaaattacaaggcaaagaggctccaaaaaaacctcaacacttctgtatttactgaagtttaatcttttatgtaggctcacctgaactcttcagccaaagctagctcatgtttcagctggaactttccaaagaaaatgattttacaaataaatacctagg

SEQ ID NO: 58575 - DNA, 1441 bp, Homo sapiens
tcatgagcttatttgacagcctttaagacttcaaactactagcaaaattctcatatcctaggcattaaagttcatgaactatcattctgtatcattcattcacatgtttactgggaatatatgactacgtgcaaaagactggcaatgtgcatgtcataagaattagagcacacaattagggtaagtgcccagcagatgctgtacacatccttccccaggcacccaactagtttagaaagactgggctgctctccagtgttcgccacggaggcagacagggaagtggtaaagaatcaagctctggagttgagacatacacaggttcaaaccctagctctaccatagtttcctaatagccacaagatcttagagaaactaataatctgtctgggcctcagcctccccatctgtaaaatggaaaagtgggatattgtggaagaccaaggagatcatgtatttgaagtgcttcatgttgcctggtgtacagtaagcactcagtacacattaactattattgtgactgcattcttcctttcacctatgttctttttacctccttacagaggaataatccacaaatatactatggttcctttcaggcagcacccctcccaagtcgacggaagcagttggcctatgcacaaatcatatatcctgatgttctctttcgaaggaatgaaaagtcctcattctgattcacagtacagtgattcatggttctcttcctcttctcttgtcaccctcctcccctccactgaaaacatgaaaacacaattaagaaaccacagggctgaaagctgcagactcttctaagtcaagctgcgggcattttccaagtaggactaggttgatttctgaccttagcagcagtcctggagatgccggcagagggtctgaagcaaaatacaccctgagatccaacttggtagcagctgtcttggtgatctctacagcggatgtgacaggcgggtgagctggtggtggccggcagttccttctcctctaaaggaaaagcctgcaacaaagtacagctcgaaaaacacacaccgcatcactttgctcatcctaaatgtaagaaaaacctggcttgagacactcaccattattcattctctttaagaggctctttagaacaaaacaaatcaccggtgaaaacgatatctgtgtactactcaacttaccacttcaccgggtcagtgtcctccaggacagaggtcagtttccactccccctatttcctgcccagggagtaagcatgtgatcatcaacttactacatcactgcccaaccagttccactgtgagaagggctacagcatcctcttcttcactgcctttggtcattactcatcatgtaattgtagatggatttccaaaccacagaacacttgaagatatactacaggtggcactcacgcttgacacaagttttacttcagatg

SEQ ID NO: 58576 - DNA, 2221 bp, Homo sapiens
aacagtggcagatgcggcagaaacactctgcagttaccttacacaattgctttaccacattccacctaagcagttgaggcacaaactttatcaccaccattttacaggttatgaagagtgagttttgtaaagttgcatgagttttgccaaaccacttaaatgagttgacaatgagccatccatcccgctaagattactaatcttgtttacacaaagaagatcacagttgtgacaagaaaaaacaagctttcacatttcaagtctgcaatattaactttacagaatcctctcaattacaaatgcattcgaagatgatctccttttcttcatagttctgttaactagcattacagctatccaagaagaaatgtctacctgtgggtaagcacatttcttcaatgtttattccaaatggagtttctggttattttcacagcaaactgttacgaaacttatacacaaagtgcaaaaacaagagaattgtaagattgagatgagtgcatgaggtattattccaccaaatatattcaatctgtaaaaactcaaatcatccttccaaaatgattaacagatgctaaaggaaaaagggaaagcgggcaaataaaccagagactcattgcttcacttctggggcaatcgattactacttcaaattatgagtgaagaccaaaatcctgcacaaagggccgcgacacaaccccgtcactattgctactatttccatccagttggtctctcgatcttggaagtggcaggccagaatctgagcccggctctccctccgtgaactttacacagaggctgacacccaaatccccagttctcggacaagcgagtaagtagttggcggagcaaagaacaactccaggtgcctcctgccagaacagatgccagcgtggaggaggtgctttgttaaatggcacttcaatcagccctggggagaacgggttacagagcctcacatccagcctcgacgattcaacagcccgggagggcaaaggtattcaccggggagggcgaaggcttcctctcccaggacagacccgcgcttgggctgcggcctccgtctttattttgaagccctacagggctcgtctctgcagcaggctcagaatgagctattttcgcccacagccaaaatcagcaacagcaaattacactgcaaacaatggcgagggcgcctgctcggctcggctcgaaactccggagaggcagcgcaaagattctgacttttcacttgggcagagcccgtccgccgcctccccgcgctccggctgcgcaccgcgctcgggttccggccacacgccccgaggacagggagacagggcggccgccgggacgttcggcggggagggcaccgtcacacccagggcgagaccccggagacctggagacgcggggccgcgggtggccgggtggcgggattccctcgcggagcggcgggcgctccctggcggggaggacagcagagcgcgggccgtcggggaaccgggcgtcccgcatagcgcgcggggacctgggcgccgtgaggggcaggcggacctgggatcccagaaccgcagcctgggctccgacgcccccgacgcccacccttttagctcggaggatcggggaggcacggacctccggcggcagcggagggcggcggcgaaacgccgggggcgcgtgggttagcactgagccgccgccccagcccgcctcgcccccgggcccgcgcgcacccgccgccccccagcccgctgcgctcacccggctcttgcagcggtggtgccggccggggtacgagtaggtccggtccacggtgagcgccgtgtcgctgcccggcatctccgcgctccggccgcgaactttcccgtcttctggggctgccgcgccgcgagccaccggctgtgctcgggatcaccctgggagccgcgggcgagggggcggcgcggctgctgcagctgttgcctctggtgccaacacccgcgcggccgccctgcgccgccgccgccgcggggtgggggaggcggggcaggaggcgagagtctcctcccccttcccttctccccgcctctcccgcgccccgcagccgcctggaccccccacccacccccgacccgggaggcaatgtcttcgcctccctccctggctgaaagttgattccatcccctcccacacagccctctttctccccaaaagataagcgacatccacactacactatctgttgacttatttt

SEQ ID NO: 58577 - DNA, 668 bp, Homo sapiens
gctacgtcaatcctcgagctgccaaacgttcatttccatttaaaaacatcgtgttttagcagagaaacgtggactagggaggcacggtgcagacaccagcctccatctattactccaggctgacagattttttttagcagagtcttgtttttctcctctgaaggaaagcttgtttccatagaaggatttcccctctttgtgttcttgcttcattcacagttttagtgtttacttttgctttttatctttgcataatccttgctgttttaagaatctgaggagactctggactatagtccctcaccctcccctgtaaatatctctggttcatgccaatagtggctgacacatttccccagttttccttcacatctttgtcgtgtgaaaaaatgctggtaaatcatgtggacaagcctcagatgacttggtatttgttcatgggacatttttcaaatccttctgccaagattttgtgcaataatcagtttgttttaatgcagttcatggagagagggttccagttctgcactggctgtgcaaccaccaacctttctgtaagtccaccaagggtctggaggcggagggcctcaatgcttggaaggccaggaggcccactgctcagggaacaggtgtgctcatggaagtaagtggctggcctccaggactag

SEQ ID NO: 58578 - DNA, 890 bp, Homo sapiens
tgtacatgcatggcaccagcatcctgagcacagcttccagggaggcctcagggagcttttactcatggcagaaggcaaaatgggaacaggcatgtcacatggcatggcgaatgaaggagcaagagtgagttggggcagaggtgccacaaacttaaacaaccagatctcctgagaactcactcactatcactcactatatcaaggacagcaccaagacatgagggatctgccccatgacccaaacacctcccaccaggccccacctccaacactggggattagatttcaacatgagatttgggcggggacaaatatccaaaccatatcacacaaaagaagccttttgacccttccactgcctttagtgctgctatagcagccatctgccgccatggggaaagagccaggaaggccaagaggatctcagccctgagcactaacactgtcctggtctctgtgcccaggccagcctccacttattccaaggatgactgtgaggaatgtggacccctgcttgtttacagtactgttggataactcttcttttgcttgtggccaaatgccatcctaataggtcaactgtataagtttattctcattaaaaaaaaataaaatttaaaatcatgttctccaaaaagttactgagtaaaagtgatgtcgcaatatcagtatgactcatggcattgatttttgttcgtttgttttttgtatttttctgagacagagtctcactctgtctcccaggctggagtcagtggcgcaatctcggctcactgcaacctcctcctcccgggttcaagcgattctcctacctcaacctcctgaatagctgggactacaggtgtgcgccaccatgtctggctaatttttttgtatttttagtagaaatg

SEQ ID NO: 58579 - DNA, 1434 bp, Homo sapiens
tcccccactaatgtaccaaccttcgcatcatttgtcctgtgaatacccaaaagaaaacagacattttagaatgattcttagttcaaaacataaacggaaataaagtgagagtaacaactttcagacacaagggctgctgcatcaactagcaaaatgaagaagtgctggggatgggaaaagatgaattgacaactgatgtgctcaaattacactaaaaatataaatgtagtctcttcagattacaggactacttgtatctactatccctcagccaggaggcactggaattagcaaaacctttaggaaatcaaaaagccaaagtatttcatcttcttacaatgatacgaaggtctccaggctctttcattccactctgggtctccatttaggtttctgcgaaactatgctgctcgtgggatcagtgaatgtcaggaagagaagggaccatcattattaccttcaacgccttacagacaaggaactgtacggcagtgcagggaaaaaaactttaccagggtcactgagttaatgtcttgtaatcctcattactctccagggcgtgggaaaagaggggagcccagatgcccttgcctccgagtcacagctctgactctacagatagcttcggtcttgtatcggggatatatgggacagagaccagcctgggggtggcaaggcagagattggggcggttgtccttgacaagagctgtggattctccaaggtgacccgagcctgggaccccttccaagaaatcagccagcgaaagtccagccccagaggccaagagcatggctctggccgcctacctgaaaaaaacccgtagatagcctcggagaccgccgtggccggtgatctgctgcagcccgcgtttcaggacctgcactaactccatcttgcctcgctggccccgcctcccgggtgcgccgagcaaaacccaccggatggaagctgccactcagccgcaggaagcccacgcccagaaggttctcacgcgaacgccagacgtggtggctctgcgcgtgcgcagagctaggtcttgcctacgcggtcatgttctggcttcccaagtaggcagaattggtttcccctggaagcaaaggtaccttaaaatttagttttcagaggttaaatctagaaggcgggcatatgctggaaagctcacctacacgaggctttctcacacggggattccccctttgggaatttcagtttcctcatctaaaaataattggctctggtgggcgcggtggctcactgttgtaatcccagcactttgggaggccgggtagggaggatcgtttgagcccaggagttcgagaccagcctcgccaacacagcgagaattctgtctctacaaaaaaaaaaaaaaaattaaaaattagctggatgtggtggcgcgtgcccgtagtcccagctactcggtaggctgag

SEQ ID NO: 58580 - DNA, 1638 bp, Homo sapiens
aaaacaaaaaaactagctgggtgtggtggctcgtgtctgtaatcccagctactcgggaggctgagacaggagaatcgcttgaacctggaggcggaggttgcagtgagccgagatcgcgccaccgcactccagcttggcgacagtgagactccctctccctctcaaaaaaaaaaaaaaaaaaagaaaaaaaaatcgagtatcaccaaccacacagcagaaatggttcaaaaaagctcaaaatcgaaggtccatttacaaattctagcggtactaaaccctaaaggccgtaattttaggtctttctgcttttgctttccggttacttttttaaaggctgacctacttactgaagattatgggacaacctggcaacattcgtactgcacaaaaatggtatctgcccgagttggaagaattatttcttaacaaaagagctatctatcggaagcttggacatgccccctgcagtgagaaccctggggccgttccatttcttctgaaaagatccaggcccacaggcagcgacgaccctggccagatttgccgtgagagaaaagtgaaagtggggggagtcattctgtccgtcccgtgaaagcacgggagttagtgacgggatgcaggccgggacttgcggccactagccgagggtcggcctctcccacgtctcactcgtgccggcgttagccgtgcgccctggaagccccggcgctgcgcgcggctctcccgggcggggaaagctgcagcgccgcggaagctttccctgcaggttaaaggtcagaggcgctgcggtaagcgcagctggaaagggggttgtgtgctccaagccgctcgccgtccggccccgcgtcccgccgcccctgtcgcccccgcctctcccggggccccgcgcatttggcgccgcagctccgcgctcccagccgaagtcgagcagccccaagcggcgctcccaaactgaacggctccgctggccgcaggacgccggccgggggatgcgctgggaccgcgtccgttggcggttggggtgaagggcaccccctggcccccgcccccgacgcggtcgctggtgtccccacccagcgtttcttaccggcgcttttgcgccctgctgactccggcgtcgggcgccgacgcgacagtcccgcggctgccactcgtggattggggggcgctccgggaagagaggttgaagaaagccgacgggatgtgggatcgagattcacggcggagagagctttctgtgtttgggtatttctggggggtcagagttcgtgacctctttctcggctcggcggcgcgctatcccgccagcgcctgcgcattagcaacggggagaagcggcgagaggaggtcgtgacgttcccagggtggggtggagggatcggagggccgagcagcggctctgtgagtccactgcccccttttggcttggaggcagagtgccccgccagagctacgcgttcccagccaggtaatttttgaagccacgtgcaaaggtttaagcatcgtttgccaaaggtgggcattaggggaggttttgagtcaacgttttagatttgagtaataaataaccctctgggtcttaggcatatctgtttctaatttctggaaaactgggctctggggtagagtccaatcata

SEQ ID NO: 58581 - DNA, 679 bp, Homo sapiens
ttacaggtgtgagccagtgcacctgggggcagctctgcctttagtaaagtaattagtagtcacacgacacacacaaaaattgcattttaataatatggaaaattcctaacacatttgagaaagagctctccaggtacaaagcaagaacactgttcacattaaaaataacagcaacaacacctcccccatccaaaagcaaagcaaaaaatcttatgtaaaataaatggatttttaaaatattgtaattacttgcagttggcattacaaaaccccaaattactcatctttagatttcagatcttacctcacttgcagcatatgtatatagtactttattttttatgacaaaccaaaagtgtttccagggttttttattgccctttgatctgtacaagtagccactcatagaagaatcctctgtgtttgctgatacctagataagaaaccccatacaaagtttaatggttttcagacaaattataacagcaaaattatttgcaaccaataggtgctgaaagcaataactgtaatgatagaatgtttcagaatgaaatatattttcaaagtgctactatacaaattgaactctgctattaacatgagcacaaaaaagaagacaaccatgttagaggcaattatagaattttacttggtttaactgtgcctgcacgtgtttgcg

SEQ ID NO: 58582 - DNA, 2288 bp, Homo sapiens
tactacgtcagccaactctgctaaatgcttagcaaatgtcaccatgtctcaccctcagagcttccccatggaatacacattggatcttacaccccttgcccccaactacaacatcatcacccaccttcaccatttacaggtaaggaaactgagaattagtaatgtttgataatttgctttatagacaacagactaagtgatgagctgttattaaacccaagtgtagttaaggactggacctctcaccaccaggtcattgctagcctctgctcatgttctctgcagaactacatgatgagaatacatgctcagggttccaagcaaacattcataaaacattaccatctctccctccctccccggctcctcaccagaagagtaacagaaagcagagaggcagatggtaaatttgagaattgctgttggattcttctggagcccggggagcatgtggaatgtgattcaactgtgtaaatcatgtcacatatgctgttctttcatttaatcattcctggctctctcctgtgtggggttctgccaagacaatgtttaccagctcttgataacacatttctcacagaccacacacatttgcccgcagcatccagtggagatattctagtctccttttgtaacatgattagcagaagaatcagcatcttcttcaaactgaaaaactgttaagtcaagtattattttctttatagaatgtgtatagtacaagaaagcaaatttgtgtcaagtaagtaccactttcccaatgactgggatgaattgccaagggttaaaaacctggccgggcgtggtggctcatgcccgtaatcccagcactttgggaggccgaggagggtggatcacctgacgtcaggagttcgagaccagcctggccaacatgtgaaaaccctgtctctactaaaaatacaaaaattagccaggcatggcggtgcgcacctgtagtcattgctactcaggaggctgaggcaggagaatcacctgaacctgggaggtggtggttgcagtgagctgagattgtgccactgcactccagcctgggcaacaagtgagactctgtctcaaaaaaaaaaaaaaaaaaaaaaaaagaccatgccacaccatttactacatggactaactgcaggatgcttctctgaggttcaaaggccacatcactttgatttgtgagtaacgctgtgagtaacattcactgggagcctactaagccaggacctaagccaagaactgggcacacaaaatatacctcacttgtaaggatgcacactgaattgaggtgaaacatgtattaacatatgatatgacaaatgtagataaataacatagaagtagtaaattaccttatgtaagtagcagggatggctctgcaaaggtgatgacaaagttaggacttaaagagttacaggagtttggcagggaactctctgtgtaccctcattcagtctgccagccgtggtcatctctaagctaatggtgcccaaatatatgtctctggcccctacttccctctgaaatccagatccttacagaaactgccccttgatggctgcatttggatgttgcatatgcacctcacattccatatgcacacctgaaactcaactcccaatttctcccctaaagctgttcctctcccagtgctccctgtcacagtgcatggcaccatctcccaattcatagtatatgctggagtctcctctgaagaactcctcttataccctgtgtccaatcagtcccctcctttaggccacctcccaaaccagattccatgcagcagccggatactctttaaaaaatgccaatctgatcacatcattcccttgtataagcctttcagcggtttcctgtggctcttaggctaaagaccaaatcccacaagatggttctgcaccatctaagtcacctgtccctccaggcttatcctgggtcattctcttcctcattcttgagctcgtgccacactgaccttccaattctctgaatatgtcatgccccttctcacctaaggacctttgtacacagtgctcctaatgaccaggaggctcttcctttttcctctttgcccctctgactcctacttatctttcctaagtcaatataaacagcagggtttgtaggaaagaggctgccctctctcccccattgcagtttaaggtcctttgctttacagcctcctagcccctggtactttttctgtgcaccatttaatcaccacaatacttaattgtgttaatatttgctaagtgcgtgtcctcctccatggaatgtcagctcag

SEQ ID NO: 58583 - DNA, 5546 bp, Homo sapiens
ggactcggtggctgatgcctgtaatcctagcactttgggaggccaaagggggtggatcacttgaagtcaggagttcaagaccagcatggccaacatggggaaaccccatctctactacacacacacacacacacacacacacacacacacacacacacacacacacgtcagacgtgctgctaaatatcttataatgcagccctgcaacaaaaaaaaaaattatctgaccccaaatatcaataggtctgaagttgagaaaccttggtttggataaagatagtctgtaaataagtaatatggtatatagtagttcttgtaatacagaaaaagaggtaatagaagaacctatatttaataaatctttaacaccaaggtaagtcatggaatttcaaggcaatacttccttctctgttgagaaatgctggatggcctcccattacctgttaaattaatacaaattcctttctggaatttaaagccccctgctacatggtccctatcaatttttctctctctcttgctactgcctaaaatgggccctttgttctgactaaatttgatctgtgcaaccccttaaacactccccatgtgtccccctggcttcacaccttttgtctctaatagtccctttttctccatcccttcctctgtctcgcttatacaaattctactcacactcttcaaggctcttcttaaatgccccttctcttacaaaatttccatttgaaagaaacgttttctgcctttgaataacacatgacacagcagtctcactttatgcttctatcattttctttttcattagactcaaagctccttgtgagcaagtcatctgacacatctttctctcacatagcacttagtcaggggctttgcacaaaggggacaataaatgcttactgaataaaaacagttcacttactcattcaagacagagtctcaccctgtcgtccaggctggagcacagtgctgcaatcattgctcactacagcctcaaattcctggactcaaccaatcatcctgcctctgcctcccaaatagctatgactactggtgtgtgcctccatgtctgcttttttttttttttttgcagaggcagggtctcgctttattgcccaggctggtctttaactcctggcctcaagcaatcctcctgccttagcctaccaaagtgctggaattacaggcagtgagccactgcacctggccaagaatatattattttttagataggattgtattttagttgaggtaaaaggcaataaatgctgaaaccaattctaatgccagtgggaactgaggaaatgaaaggaggaaaggtgtgttcagtgactgaatatatctttatcagacccaactgctagttagtactattatggaatagatacaacttcatctcatggatttatgacatcatgctcagaggaacaaaggaaaacaggggtattggtgccagatcttcaaacataacagatgacacaaacacgcgcccaattgctgaaacttcgtaagtctttgagacagtgatctaagagcctgtgtgagtctagacgtgcaccttataaatatccagcactggcaataagccatggtgagatgttatgtataaacatattaagcttccctgcgccatggcataggttctatcttgccagagaccatcgctagcaatttagatcttaatctgaatgaagagagcatcccccgcaaaatataaaggaaaaatgaagtgggcacacacaaaaaataaaaaattcccaaattaacaaaatacataagttatatgttacacttagccccatctggagatgaaaataaatattctcactctgaccccactcagaatgcattcaatatattacataatccgtgtctggtgagtgcaaacatttaacatttctatggctgacagttgacagggttggggagacaaacttaccctaccctccctattagatgttctcaaaccctaagctacctcattaatcaagtgattttccttaagctgttagatagttactatatcttgttgtgggaaggaatgcagatttacctaaatattggactcatggcgacttcctagtttgtcttaaatttctgttttttaatacagaagtatatccatgaaaacagagacatttctctaaaccaaaagggctccccagaagatgtccatattaggaaatcctgacctcagaatcactgtgctgagcctcataaacttctaagttgcattttctttgcttgtactcaaacatgaacttttatgaacacagttgaaatacactgagcagaaaacccaccgttaacacgttgcaacatcatgctattaatcaaggaagtaacggagttaggtttaccctccttgccaatttttaaaaatatctttatggtctacaaaatccaactctccaacttatccatccatccatccatccatcaacccatccatccatccattcatgtttttagggcatcttcttgcagtatatctttttgagaacttttaccttggcaaagagagcagggcctggatctccttaaacagttaagaatcacctggggccttaactgcagcataagaatgtgactgatcaccctgagtcagatgggaggaacaggaaaccagtagctgccccagtaactgttataacccaggtgaaacccaggaaaggagaccagacagacacgcctatattggtcatagtgaaccacctattacctatcacttaggacctggtattcggcagaagctttcctaataacaacgaggagagcagtcatttcagtttgccatgttagactggtagtattctatgacctttctgctcctgccaaaacaaattgagcattattcaaaacttcactaataaaactgcctcaaatgccactgaggttatttttatcaaaggaaaaaaaaagcagatgttggttcagcatgtaggtacactacaaaatgtactctctggccaccaggtggcatcactgattaataaaagttaattaactccatcaccatcacccaacatgagtagcaaaaaattaactggaacacaacatactatgtgcaacttctagggatatgcaagctgccttttttttttctttctttttttggagggtctcgctctgttgcctaggctggagtgtgcagtggtgtgaccaatgctcattgtagcttcaatctcccaggctcaagtggctgtcccacacctcagcctcccaagtagctaggacaacagacctgtactaccacgttgggctaagtttttgattttttgtagagacgatgtctcactatgttgcccaggctggtcttgaactcctgaactcaagtgattctctcaccctggcctcccaaagtgctgggattataggtgtgagccacggtgccagtacaagttaattttgttctcatataaaatgcccaaggccaccgggcgcagtggctcatgcctgtaattccagcactttgggaggccgaggtgggcggatcatgaggtcaagagttcgagaccagcctggccaacatggtgaaaccctgtctctactaagaatacaaaactagctgggcatgggggcgcatgcctgtaatcccagctactcaggaggctgaggcaggagactcgcttgaacctgggaggcagaggttgcagtgagctgagatcgtgccactgcactacagcctgggtgacagagcaagactctgtctcaagaacaacaacaataacaaattcccacggccaggcataatggctcatgcctgtaatcccagtactttgggaggctgaggtgtgcagatcacttgaggtcaggagtttgagactagcctggccaatatagtgaaaccccatctctactaaaaatataaaaattcaccaggcatggtagtgggcacctgcaatcccagctactcaggagactgaggcaggagaattgctaactcaggaggtggagtttgcagtgaaccgagattgtacctctacactctagtctggatgacagagcgagactctgtctcaaaaaaaaaaaaaagaaagagagagagagaaaggatgaggacccaatatatactatatcttgttggaaatctaagttttctgtataagggttcccagggagccttaccaccactcattgattacctaatcaatacataaccaacttagagcagaaactagtcggaagtcctgttaaccattaataaaaattagtcatctgtgggaatctgggactttttgcattcaacacccagtcagattcctggaccgtgcactgagaaatgtttggcagcaaagcacagaggaaatgagtgtataggagggataacattccaaagtcaagtgttttgaatttgaggacatgtcttgctttgtatttttcagatttcttctttcctccataaatatgtagtgggatcagcaacacatacagaattatgggatccagagaaaagtaagtctagtcaatatgactttgtaaagttttatgaagtttcagattttgcaagaaacaacctaaaattagcctgacttgtgaaacaaagtactgatcattttaaataccaaaaacaagcatcaagtgtcaacttacaaaacatactgacacttcaaggcagcttggcgaagtggtcaagagcccttgctctggaattagaagacagaaattcctgggccaggtgcgatggctcatgcctgtaatcccagcactatgggaggccgaggtgggaggatacagcctgggcacatagtgagacccatctctaagtctttagatgatgatgatgataataataataaagatagaaatgcttactctgcctggtccagccacatctagttgaggcatgggactttggccatgccccatagcatttttgtgtgttaatatcctcatgcataaaataactaggctgaaccagaatgaaaactgtaacgattctcattccaaaatatcatgaaacatattttgttgaataaaataaaaaatgaaaaatttgaaaaattaaataatgaggaaaacttaaactatgaacatctctgagaaaaacaattactaaactatttccttgtttttataaatgcttgatttgacttaaaaaccatcctaggggtatatcatacagtacttaggtgttctattagctctttagtgcatttaatttgttttggctatttacataagtaggatggcaatacaaccttatctccccatatagtcctgccttatacctgctgtccaggcataattataaatactgtcctcttttacttttgtaagttaatgggtttggatttataagtaacactgattagcactgtcggctggtgtggtggcttacacctgtaatctcagaactttgggaggccgaagtgggcagatcaccggaggtcaggagtttgagacccgccttgccaacatggcaaaaacctgtctctactaattagctgggggtagtggcacacgcctataatcccagctactcgggaggtggaggcaggaggatcgcttgaacccaggaggcagaggttgcagtgagccaagat

SEQ ID NO: 58584 - DNA, 507 bp, Homo sapiens
ttttaaaataagagtataatgggaatgtctgtaacacaatcacataaaggcttggtaaatgcttgagatgatgaaaaaaataaatgtactctgttgcactaaaaacaatgtccatgattaactaaagaaatagtcctttaaaaaaaaaaaggataaaaatttaacagggctactgcaatatagcacaactaataacataaaacagtaatataaatacaggaagggaaaggaaaggcaggcacaaacgcagaggaaggaaccctgggagtctccactgcccacagaatgagtgagtcaaccaggcggtgttatcacaggatgtgttggaaacagacataacactgctgggttaaagattaatccttcctttatacgatgtatcagtgagatccctgatagaatgtggaaaccaattttggtcagtgctccaagaagtatggaaagaaatgggaaaagattcacgcaaaacaaacaactagaccaaaacaatagaaaagagtgtctgct

SEQ ID NO: 58585 - DNA, 1034 bp, Homo sapiens
tatgtgaatggcacttctaatccttcctcttgtctggttcatagacttttggtgaggtggagtaaaaactggattgatggggagtcagtttgggggaagaaagttttgttaacgtgtattagtagcatcagattatttgtttgctgaaagtttctgcctggtttgaatattcaccttgctgaaatcaccattttaaaaacagccatataattctgtgttcatatgcatctgtgtgtggggcctccttcctcacagcggtaacaacactgttacaaaaggagaaaaaagtgcaatgatgcaagtaaacctgaacctttgtgcaacaactaagatcactttcgtcttctaaattttgctcactttctctataaggctttccaccccagcattagaagctccaggctggagctctggttttggaatttcccatttctgtggtgtgggcaaagtcgacaagtcttcacgggctttggttgcatcagtgagtgaagagactttactgcatgatttataatgattcctttagttctaaactttaatgatcctaagactatatttaacctaaaatcattaacagacatatgttaatttctcacttttttcaaaccacttgattacacaacaaaaaaaaatccttatttatttttttcttacccccagacttctaaaagactaagatttcagaaacttttgttatcaagcaaatcatacctggacttgtaaacgatttcattatctatccctgccttcctccccagtaagaagggcagtagagatggactgtgctttatctgcatgtttttagtggagctatggaaagaaaaattaagtagtggaaaagctaccttttttttttttttttttgagatggagtcttgctcttttgcccaggctggctcaatcttagctcactgcagcctctgtttcccatgttcaagcaattctcctgcctcagcctcctgagtagctgggactacaggcacgtgccacaacacccagctaatttttgtatttttagtagagacggggtttca

SEQ ID NO: 58586 - DNA, 2856 bp, Homo sapiens
taacaccactttggtaattattttgtaaaacagaaattgttccttaagaatgttcagaaacacaacgtctagaattgctgaaaatccacacaaagatagaggctttgtcatttggatgaaggggaaagaactatgggaggcagacagaaaataaagctttgtttaccctaatcaggtagaaacaaacaaaataattgtaattgggtgcagacaagcaaaaaaaaaaaaaaaaaaaaaacctcaacaatctcaactcctctgcttctcaggtaacagaggtaaaaccaccaggacatgacaatgtctacgcctctttaaaatgggtaaaaggtttaccagcagatacaaggttgaaagcgactcacttagtggccaaattgaacacgctgagaacactgcctttacctataataactgatctattaacttgggaatctacactattttcacatgcaaaggcgaagtcctcgcactgctggagagatgagcgaacgcccttcacacatcgcatttcacctggtgcagagcccccagcacagtcccccttggaagggagatcccgagaaatcccgggtttccaaacagcccctctgggcaggaaaagacgagaaagccggcagcgaatcccattagctccgcgcttgccgaggtgctcggcaaaggtacggggcacacaactcgcccaccccggcgaagaaagttgctcgcgagcccaagcctagcagcgctcgccacaaactttcccgcggcagcgcgagcgccgtcacttaccggctgcagaagtcatgattccccggtgcagctcgcttccccgctcggcccctcaatccatcttcccctttcagtccattgttcccacagttcgggtaggagagaaaagcccccgcagcgcccacattccgtcccgccgccccgcggcgcagcctgagcgccacacaaaggacgcggccgactctagcgaccctgcggcgctcccgggcgcgagccgccggggtcgggcgggcgagcactagcaccgccccgcagagcggcaggctgacagccaggcgcgggcacgagcagtgctctcttcggctccgctggcgcgtgcccttctcgggctccaaaaatcagcagtgctccgggcgccccctgctagtcgcggccgtaaaaggcagacaaaagccctagcctcctccaatcggagggctcgagcttcagctcgctcccgcctctctcgcttacacgctcactctcttctccaataagcgggctcgaaaagggggcgtgagcggcgaggcatattgggaattgtagttttctggacccacgggacgggcaggagctggagctccgtgccgcctgtactcccgccttcatttcccatcgtgctgaggcgggtggcatggcggagaaggatgacaccggagtttgacgaagaggtggtttttgaggtaagaggaaaatggcggtgggtgtggattgcctttgtttgagaaggacgagacggaaatcgaggaagcaaggcgttcccggggcgagggatcgggtgacgcgctccagctggcctcgaccaccgaaccccagcgatttcagggcctagagtccgtcgtcgcctgacaggtgtagccagaggcgccctggccgtggccggcctctatctcgggcccgcccagaattcccagacggtgcccggttgccaggctctgggctggagcggtgtctcttccttcctgggaatggatgtgcggcgggggggactgcgcccggctggggcggggccgaatcgtgccttttagatagtcacaacttagcctcctccttttccatccgcgatttttttgggtcagtatccagagtgcttcaggtcactgttcaccgtcaaggcgtggccctcggaatgaaggcagcaggtgcccgttttctaacacggtttaaagtctatttgtgggacctactgtgggtagttagggccagggcatctcagcatctagattcgattcttttgtcctttgctgttgcgctaggtgtagccagttcttctgactcggggctctagatgtgagtgcttttgtgtgggactattttaagacgttctctgccatcttgaatgaaaaaaatcgggcgagtgtttttgatgccatttttttccatcagacacaggtcaaaactcgcacccctgtacgtatgtgtattgcatgtatacgctttactttcatttatccaactagattttaagaaaatttaaaaatgaagtggcccatgccatacagcgagagagcgaggcacagacaggacagaatgctaaatgttgaaatatgtacaaactgtcattgaaggattaatttctgttcttgcggcctcccagaggctacacccagtacgcgatatccgaggtgaatctttaactatgaattggattagaaaaaccggcaggagaaaatgtattacagggaaagagaactgattatgccaagcttgggaagtgtgaaagtacctggtgtgcatttttagggggcggggtgtggagggtggctatgtaaagtggcttgatgtggctgcaatgaagaagcagtggaaaatgtggccattttaccgaagtgaagagtctagatatgaggcgttcattagggaagacaagggcctgagatgaaatgagagacgtaatggaataatggcttggacagacacttgtaagttaaaatcgaggcaatgtttatagattgaatgtggtagctgaaggagagagaaatattttctagagtaagggtaactgatgggtgtattttttttacccattatttttgatttctgaatataatagtaatatatgctcaaggaacattttattgtagaaaataagcccccaagttaaaa

SEQ ID NO: 58587 - DNA, 458 bp, Homo sapiens
gttgagcttagtgtccttttacagatgaaataagttaacttttcttgtatatccccagagagaagttaatggcagagaactgctaaagtaactagtgcctgacacagagtaggtgctcaataaatatttggctagtgataaaggagtaaatgatgattgtcccttttctatccagatgatctttaccctggaatgctgttagcactcagtcattgccatctgcaagagagaatagatagtgtgagggatcagaatcagaatttggccactagttagtgcagactacaaattgcttttctgaaagggtatatggctctgagatcagctcttctgataaagggaaggagagagtctcaagggtgcatcagggctagtgtgaagagctcggagggttcagacagacagaataagtgacataaggcccagcacggtagctcacacctgtaatcccagcactt

SEQ ID NO: 58588 - DNA, 1088 bp, Homo sapiens
agaggttgcagtgagccgagattgcaccactgcactccagcctgggtgacagagtgagactccatctcaaaaaaacaagaagttaatcaagtgggcaatttatttctctgtgttgttcccttacatattaaaactattcagctcatttctttggaatcactcccccatgccgccatcctcaatgtttaaattccttattactcatcaggttaatgtgagaatcctattgcaaaagcactgtgtaaactgaaaaggttttctttttatctggttgggggatccagtctggcctactttatctagttgactgcagtgagaggttaaatgtttaaaccctaccagttacaccattgttccaggaattgaattgaatggaattaaaagacttttccaaacaactcaaaccaagcaaacactccctgatttgttctctcaaacaaaatatattagcctgtggcgactaaatattgacctaatgactaaatgaaagcaaacagattctataatgctctgaagtactcaccactcaacctcagtgaaactcaatgaaacttcccaagaagcttccagagagcaactctttcagttaagtagggactggaaaaggtgcatgtctttaagtagagagagtagagacctcgaaaacactcccccctgagaatcctaaaagtctcatttatataaaaacaaacaggagacaactccccaccctatctacctgtgtgatatcctattttaaaaaatagaccaggggctcaacattgctaatggacccatttaaccccccatttctacacacacacgcacacacacacacacacacacacacacaccatcctcactacatttaccaccatcatcactagtcaaagtcgtaaagattgagctccatatgtgagtgtgacgcccattccctcaaaatactatcagcccttagtatctaaggttccacattcatggattcaacaaactgcagatggaaaatatttggaaaaaaaagaacaatcaataataagtaataatacaaataaaaatgcaatacaactatttacatgacatttacattgtgttaggtattataagtaatc

SEQ ID NO: 58589 - DNA, 1056 bp, Homo sapiens
cctacatgaacacggctcaatgcagcctcaaattcctgggctcaagtgatcctcccaccacagcctcccaagtaactgggaacacaggcgcatgccatcatgcctagctagtttttaaaaaactcactatgttgctcaggctggtctcaaacacccagcctcaagtgatcctcctgcctcagcctcccaaagtgctaggattgcaggtgtgagccactgcacctggccaaggaatctcctagtattgctcatctggtgtgtactcagctccaggcttctctttctctcaacatgttcagggttggaaggtaaaaaagcactggaattaggatctgaaaactgacttcagtgcccttctctgagctttggaaaaggtatccatcttctccaagcctcagtttcctcctctgggaattacacctagtcatagcgttcctgggaaaactagataacttgcaaaagtgctcactaaagtgatatatatcagcaaataacaagggtgaaacatgaatcaaactcaccagaaacagtgtcaaaagaacctaactttaacaatccctggaatatcaagtgaaatccattttttcttcgtgaaagtcatgattacttttccatcttgtctgtagtgtcacagaataagatgttcaattaaaatgccgtaaaattacatcatgcttgctcatctgtctttcgaaactgttgaatgactagagttgggagatgaaaagactttttgaaagtaaatgctttctcaacttttgaaatgcttccagattctgtcatgttcctttcatttcaacatctaagctgggaaagactctttgacaccaagggcaggtgtttacatgcagctcatccaggtactttgctaccctattaatctgtctctctctatatatttggatcttcagaatcaagcgttagtcttttgtttcttttagctttttgctggcctgtactctttgctggcaagctgctgacacattttgacaggtgacttggctcataaaaacagccagggaagggaaatggtgagaaggggcttcaccaggagca

SEQ ID NO: 58590 - DNA, 1489 bp, Homo sapiens
taagccaatgggccaggcagagctgtgggctcgaatgtgtgtaataaaaataggatgtgtacattgatctagcaattactgaagtcggagaaaaagagtaaacagggctggctccaaagtggacttaattaaagctgtttcaatgttttgtaataaattaaatggagtatgcagaatcgctaactatatttatgggctgagtggaaaacgtttctaaggccaaaatcagagccccaatcgtagctctctgagtgctagtacatccaaatagagtgattgaattgtgtggtctccaccagattgccgcttttccatgtttaccagccctatcagtcaacagtgttaaagcattaggtatgggggactgaactatttgtgtaggtaaaacatttaccagactttttgggaattatgaaaataggtaaattccaagggctggtagtagaatattacctgcaaaatgaataaccttgaaattacgaaacttttttttctactggggagcaaagtttgcttttaattgctcctaaactaactcatgggccttttgtaatgtctctccctttagaggttactgttttacttaaattggtttttgagaaaatcacgttaagggtaggagagagataacagttgccatgatcagaaagaggttttccaaattcttacgttttacttaaatcttagcagagagttataatctgggacgtcctttgtatacaagggacacacagaattttgtcctgggccgcctgcgaagctagagagctgagagggcgggccctggggcagcggccactttcagcttgtgctacttctttcgcttgtgccgccccctcccactgccaaggcgcggctgtccccggctgggtggactcgcgcgcgcgcctcctgccccaccccagcaggctaacactggcgcactgggcctggctccccgctgctactgcctcagcgcaggcctagttcccaggaggatccgccagctcagtgtttgggagcttccttgatgctgagcctttccttccctctactgctcgcttggccgcgcagctccagcctctaatgctttttcttatttctttatgtacctgattacctcgttaatgttgcattaccgggcaggctaaaagctctccttttaattccgcctgcttaagatagggactgatagctgtagcgtatccctggtttttttttttcttatctattggaggaggaggctcaggtaaagggagactttactccgtttcctctttgttatttcggccggccgggtgatactagggccgaaagaagaggaggtgataaggcaggtgacatttcctcctccttcccgtttttaggctcttctgtgggtaactgagccaggggtgctctaattaaagcccataacgttatagagattttactgggacctgttgcctttgcgcatgatgttgcttaagatttctccccacttgttccagagttctacatctttcgtttc

SEQ ID NO: 58591 - DNA, 2226 bp, Homo sapiens
caaagtgctgggattacaggcgtgagccacagcgcccggccggtttaccaacttttatattgccagcaatcaactagggaaaacaatttaaaatctaaatagggatagatttaaagagataaagatctgtacaagaataagaggaacagtttttattactattggataggtgctgcctgaagctttaagacagagaatgtacatttatgcagctgcagtcagagcctgtgtgaggtttactgtaaactcactggcaataaggctcttaacgacattttgatgcccatgaagcttggtgcctagtttaaaactaatgaaaacacctaaactctccaggtggacaaagccatattcaggagaaattgagaaggagttggtgcaggcagccaatcacaatccacttacgccacaaactaaatctcaaactgcggtttgaacatgaggctcaaaacataagaagtaaagaaatgggcaaaattcaattagtttctggtgaaacgtcctaaatccaaaagaaaggtgaccagaaatagagaaaacggagtgtgatcttttgcattaatgagagagaccgtgtccccgtgtgttaaaacctgtcattcttgtcctgaattggaaagtgagcggagtgtgacgggttcccatcttgaaccgtccggggttgagtagtacaataaactaacacggaactccagcttccaaaattctctccagtgcctacagagcctcgcggagagctgtgattgtgaatgtcaacgcagatttgattaaatctcttagatttaagagatatgtggagtcatgacaatagaaatgtgtacaagtgaacacatttcttagcccgtttccccactgcctgtgtgatttataaaaacgcaaatataaaatatttccgttccagcagagacgccgcttgctacggcgggttgcccgtctccacaggtatctccggctgactctagagctcaacttcccctttaaacttcaccctgcgcttgccgatttgcttcgggaatgcccgaggcaccggacgaagcagtcgggtctggccccagtcgactccagccaggcggggctccaagccgagactcctgcacgcccggcccgaagctagcccgacaccctcagctgagtcctccgccgtcccagcattccctgcgtccctaccatcgagagcagcttccggcgtggctggtgtaggcgggtggagaaggatcggggccctcgccgctctgtctcattccctcgcgctctctcgggcaacatggcgggtgtggaggaggtagcggcctccgggagccacctgaatggcgacctggatccagacgacagggaagaaggagctgcctctacggctgaggaagcagccaagaaaaaaagacgaaagaagaagaagagcaaagggccttctgcaggtaaagagagttttatgttttcccagtcccctccgggaacggctgaactgtttggctcaggcccgttgagggggccgggaccggggccccagagccccgactagactgattcttgggcctgacagggtggcaaagccgggctatagattcctagtctgagaagaggcgtcatctcctcctgtgggactagagggctggtgggggagaaaagagtgcctgaggttggcgtgtggtacctctggggtcgctgggcccgagcccctgtattaccagaactcagctcccacgcacatcgtggcacggtcttgagattgtgcgcagagcacagccctaccatctttcgcgcgatttggccgccgcctcaaaaatccgattctgatccgtattgccgcgtctttgctggtttgctggagcaagctaggacttattttctttgggggtgggcaaatgtaatggagagcacacctcctcccactatcccgtttcacgttggggttgttgcagcctgcacttttggggtgtgtgtacatgtgtgtttgcccgcgcgctcatgtcattaattgcagaatttgtggtggtgataacgaattttcacctgcctaatcccatagcatcgccaagctttagggcctttagacctgaattatgataccaattgcaggcagtgcagataggatattctgtggctcagaatggaacttctgaggtcttaacctctaaatccactggtaaggcaaggagaactgctgagagtttacagttggatattatgaactaggaacttacatattttgagaagtctgtgtttttg

SEQ ID NO: 58592 - DNA, 497 bp, Homo sapiens
ggatgtagtttccaatactgacccagatgctgctatagagaataatggacacaaaagatcctcccagacaacagaattgggggtgatcatgtgggtcaaccaaggaacttactctctgccaggacagggaatctttgcagcttctgctcattaggattttacagttgctgaggatgagtgacagctgtatgtttcccattcttcccttgtctgacctggagttttacttgtggttatcctgtctttgtcacagaagtggagagtggatgtttagtagatgagtcacttctccaaaaggaaccacatccaaactcgatggagaggtcttggactctgcgaggtaactgggtaggactttggattggtttccttgggaaggagatgaatgtgttcttatgtctcagaagggtatgcattgattcttgggtggccagaaaggtggtctatagaacctgctaattggcctctgatatccgttctctcaatctctctctctc

SEQ ID NO: 58593 - DNA, 1380 bp, Homo sapiens
cagttacaatagcattgatatactaagagattccaagttaggagtttatacagtaggtttatgagacaggtaatccaaaagtcaggtgctccctcttcgcttggaagaacagtgcattttgggacattttaaagcacattgtcaacttctttggccttttttttttttttttttttttttttttgagttggagtctttactctgtcgcccaggctggagcgcaatggcgcgatctcggctcactactacaacctctgcttcctggattcaagtgattctcctgcctcaacttcctgagtagctgggattacaggtgcgtgccaccatgcccagctaatttttatatttttagtagagatggggttctaccgtgttggtcaggctggcctcgaactcctgacctcgtgatccacccacctcggcctctcaaagtgctgggattacaaacgtgagccaccgcatctggccggctcctttaaccactacttataacaggctcacagcctcaaggttggcaggctttaccgccaggcgtaatgttgtgttaatgtgggtgaagtacatttgcaatgtgcaaatagttgactcacagctctaattttgttcttctgagtagctcttttaagcttccctgccctttttgtcttatgttgcttagatgactggagaaaaatattattatctgatggctcaatttaaagacccacgattaaaccaactgagctcagccttcacactcacacctacctttcaatatctggcactaatcttttaaataccttgtcagaggaatactgtttcctgggtgtgttcaaactagtcatgttgttatgtcccaaaaacagtgggatccttttcagacgaaaaacacatgaaggctcaaagccaagctgctgcgtaaaagctttccctttccttcctctgacccatcctctttggaataattagatgaatggtgcttttttctgtgatttatctgtgtttttaaaggcaaaactcccatgaagagatgggctattaagaattctcacagttggctgggcatagtggctcacgcctgtaatcccagctcttctggaggctgaggagggtggattgcttgagatcaggagttcaagaccagcctggccaacatggtgaaactcccgtctctactaaaaatccaaaatagccaggcttggtggcaggcgtctgtaatcccagctactcaggaggctgaggcaggaggatggcttgaacctgggaggtggaggttgcagtgagccaagattttgccgctgcactccagcctgggcaatggagcaagactgtctcaaacggacaaaccaaaaaaggattcccacagtgaacactttcaactatttgtttgaaaatttttat

SEQ ID NO: 58594 - DNA, 974 bp, Homo sapiens
gtatgtgattttgtgaattttttttgtttttttgagacagagtttcactcttgttggccaggctggagtgcaatggttcactgcaacctctgcctcccaggttcaagcgattctcctgcctcagcctccgagtagctgggattacaggcatgcaccagcatgcccagctaattttgtgtttttagtagagacggggtttcaccatgttggtcaggctggtgtcgaactcctgacctcaagtgatacacctgcctcagcctcctaaagtgctgggattacaggtgtgagccactgcaccaagctgattttgtgaatattgcaaatgtatttgtggaacaaaatggcttggagtccctcttaaatgaatgccctgttgttctcatcatagcaatccacctactgctgtaggcttgatgttatcactcctgccattcgggcaggtgtctggagggtggaagtagggacaaagaccttagaaaagtggtagggtgatgagagatagattgggaattaatagcaaatcaggaaagaagcaattaagtaaatgacgagaattgaggctggttagagtaggtctgagaagcagagtagatacttttctcattttaatgaatgctaatcagctggcctagtgaaaacctcctcctgatatgccaaacacaatggcttatgcaaacatttgataaagcattctcaggtgtgttagtcattaagccatgaccttgggaacagattgcatggctatattcctcagtcatttacagtacacacacaggtccataaatgcagctgtgtgaatataattaattactaacaattcttattttagaagtggtagtatcttgagagtaatccataggtagtggacaagaaataattaaaagctgttctgcattgagcctagccagaagctctaaaagctattgtgctatactgtcggaaaaaggggagtttaattaattaattaattcatt

SEQ ID NO: 58595 - DNA, 653 bp, Homo sapiens
aggtgagaggatcacttgagcctgggaggttgaggctgcagtgagctgtcatcacgccactggactccagcctgggtgacagagcaagaccctgtctcaaaaaacaaagcaagactgctcttcctccccactctatccccagatgttaagtagtcagcaaagactaatttcagtttcccttaagggtgacaatcaggaatagaagatactgctgcttttgggaaccgctcttattaactagggctgccttggcagctcccaggggtgctgtgtcttgacaaccttctcctgtttttgtgtttggtaactaccccaccccaacccctaccctctaccgcccacgcctcctcaaacctcctcaagcagcccaatgaccagacaccgcagcgtcgcctctagagggcgcttgagtctctaccaaatccctgagtggcctcaccagtttgggattccatttacattccaagaaattcctttttaaaggttacacaagagaggcaggcctgtggagccctaattggtgttcttcagttgccaagcccaggcctaggttctttctctctccttgaggtcaggaaatctttttttttttttttttgagtcagagtctcgctctttcgcccaggctggagtgcaatggcccgatctccgct

SEQ ID NO: 58596 - DNA, 3386 bp, Homo sapiens
aggctacagtaacaactgcaaggttaatagagccagcagatgatgaaggctgagatttggaaacagatctagttcccaaacctgtgctttttgcactatcatcttacctctcattctgtttgtggtttggggccttgctaactggtgacagccaagttagctggcaactaagagtgagtttcttaaaatgtaaatcagactatatcactttgctacagaaaaccttccaaagacttccagactgagtaaaatcccaattattttcagaagccatagggctcttcctgatcccctccatccctgccaccccatgcccctcatctctttcaactaccactttgctcgctctgctgcagcctggcgcaatattctaagaacttttccttaactgtctaagcttcctgcttaggcccttcccttgatattccctctgcctgaaatgctctttcccagataccacatgggtcactttcttccctctcccctaatttccttcagtctttgctcaaatgtattcttcttcttttcaaatacatataattttaaattttatttatttatttatttttgagacagggtctcactctgtagcccaggctggactgcagtggcacaatcttggctcactgcagcctccgcctcccagccccaaatgatcctcctgctgctctgtcttcagccttccaagtaactaggaccatggacgtacaccatcccacccagttattttttatttctattttttgtaaagacagagtcttgctgtgttgcccaggctggtctcaaacttctggcctcaaacgatcatcccaccttggcctcccacagtgctggaattacaggcatgagccactgccccctgcccttccttatctgtgttcatcgcactcatcactacctgacattattatgtacttatttatttatctattacccctgagtagagtgtaaactcggtgaggacagcagttttttccattcactgctgtatccctagcacctagaccagtgcctggcacacagtagctgcccagtagtacttgctgaatcactgaatgactctcaacctcatgagtgcggtgctgtgagtcaccgggttactacatcatgcccagactgggcaacctgggggcgctgaaatggaatcaccggtaaagatctgcagcttcctctgtgatgtgggtgtggtgggaagatttgcattctgaatccatcatttccttgctgccggactgtgagcaagtttctcaactctctgtagtcttcgttgtgtcatatgtaaaatggagataataattattagataattacataattatcagataattatgtagaatactgaaaaagttatccagttcaaacctcctttttatggtaaatcagaagttccccctcagctccataaacttcatttgctttcacaatcccagacatctgattaggcagccaagagctctgagaggcctttggccggaaactaaggatttatgagagccaatgttctctgtctctcctgtttgagcatgtagatgacatggaataacctctctgatgtattgaattcgtttctccagtgtcgtttatgctgccagatgatcacttcccagtttgataaaaatcacttcataatggggattagatggtaccaaaatgacagtggtctctgctggatctgacaaattctctctctctctttttttaaccccaaatctctagtatgccaaaagtttgcacaaaggcttattgttgttataattgtctaggacttaataaattagctattgtcctgagataacctcaaaactcctggctaggaggttaaaaacgatttttaagggagcataaatatggacacactggtaaaaaagtttttcatcccgtgtagcattttttttaggtttgagtggaaagtggtgtgtgaccacaggaatgtacattaacaaaagcagtaagctaattaaataacacacaaatgttgtattgtctgggtattaattcttcaaggtcatgtcttagtttataatggcaaagggaatttattaagggagaattatttgacaggaatctttttgttattataagttacatgcaggttaagataatcaacaatattttttctataagaaccataaacaagagaaatcctgcaacatatacttcttgcttattacattatggtgtttagcttacaggaacttgggaggagataagaaaaaagaagagaagaggagaggaggcaaacactcattgggcgttgtattcgtctgttttcatgctgctgataaagacatacccaagactgggtaatttataaaagaggtttaatggactcacagttccatgtggctggggaggcctcgcaatcatggcagaacgtgaatggcacgtcttacatggcagcaggcaagtaaagaataagaaccgagcaaaaggggtgtccccttataaaaccatcagatcttgtgagacttattcactaccatgagaacagtatgggggaaaccgcccccatgattcaattatctcccaccaggtccctcttacaacacgtgggaattatgggagctacaattcaagatgagatttgggttgggacacagccaaaccatatcagatgttaaactggaggttaatgttctagtcagttggctatagcgagagagactgagagttgccctagtttctgaggtttaatacctaacagagcaggaagcaaatgagcactgagccatgtgtgcacctttttcctgccatccttaaacaaacatagctgcagtccaagggtgcaaaggtgggtttggcactggagctgggtttcctggtgactttactctctgtcttggcatttggtctgtgtttatagtcaaagcaacagacatgaggtaatgaagcagagaagggaatcacagaataatgaccataacataaaggcactgtttactctgaaccttttgaaggatggaggaggatgtgagagtcagctgcattgcatctgccttggggtcatctgcggcctagacttgctctattctgtgtccatgatcacccagtattacaccacagctattggaggtcaagggggctgtgaaaagcatgtgatgtaatcacccttccagggattcctgttgagactagtgatgatagctgagtgccaggaactccttggtagtgggcataaaaaggtgcttaataaatagttgagtaacttgactcttacgcagcctatagtcatggtctccattcctttaaaaatataacccagggtatggtagggctacacctggggaactgagagactggggactagtgttactaatgcatccttgtttcatctggaggtgacagtagggataggattcatttaggaaaggcaaataacacactga

SEQ ID NO: 58597 - DNA, 1446 bp, Homo sapiens
ggctggagtgcagtgttgcaattatggccttgatctcccaggctcaaatgatcctcccacctcagcctcccaggtagctgggattacaggcatgcaccaccacacccagctaattttttgtgggttttgtagagatgaggtcctcctatgttgccgaggctggtcttaaactcttgggctcaagtgatccgcccaccttggcctcaccaagtactggcattacaggcgtgagtcaccgcacctggccaaaaccctctcttaatggaacatacatctcacattctggaaatatctattatcccagtgcatatttctttctttctcatgactaacattctgcttttttagttattcacatacataaactgactgataataaatctgggaatttgtcatttaaaaaaatgcacatttcaaacacaatcagtaatcctcaaacagtagagacatgtttacatttctttggttaaagtgtaggaacacagggactagggaatcattttttaaaaagtattttcagacaaatcattttctgagagacttaaaaaaagaaactgtcagtcatttgaggcatacccttttgcttctattccatttttatcataccaatctctcttgcaaaattgatgttattcataaatgttttccttccaaactgtgggaaataagatgtgagtttggccctttgataaagttaggctcagggactgcttatcattgaaacaatgagcacaaaagcgattcagtcctgggacttctcacaaaactcagcgggccaggcggtgctcactcttgttctcaggcattccaggggagtggcagagggacagccagcacgagacattttcaaggttgtttttcccaccctttagaattggtaaatctccgatcgtttagaaaaggatttgttttgcaagaacctaaagtgtccccaagaactatgtttacccataataggccttgctctctgtttaacagagccagatggacactgctatttggctcatggtcatatccccacagatttgacctcatttagaggacactattaaaagattatcctattattgagaatttccattgcatcaaatagcaaatattagtaagattcctctacagggaaaatgatgtaagaagagggtaagactgtgttgacctcaggcaaatcacatggataggtatgtggcaattatgaaactcagtgctgactaataaagcccagcggcacacagagtaaaggtccaggagcagagactttcccagtagctctcgaaggaagtgttgaggttccactgaagccatagatggaaatcttatttgactccgttgccttagtaccaagatggttattttgaaagaggctaaggaggagaaagtgcatgtagcaggatggcaggatgggatgtggggatgatgggatgatgggatgttgggatgatgggatga

SEQ ID NO: 58598 - DNA, 624 bp, Homo sapiens
gccatttttgcctgtttaagtcattaaaattattttattacctcctgtttatctcctcaattaatcttccttataaaatgcatatatatacatatatattattcatattatatatgttaaacacgttccctgactgggtgccacagaaaaccaccacagttggcaattaacttgatgttaaaacgaattgagtttcttgttgaacatgtgtgtgcctactggggatttccaaaatgcaaacttagactagaatgtactttccatttttttcattcaagagtctttatcaggagcaaccccaatgtgctgattaaggtttaaaaaattttcaagttttaaaccctgttaccctggtggagagatcctggctaccaaacagacttcaaaggcacctccaacttgccctaagccacagacaaatatttgctgttactctagtactaggcagcatagggccactttgtccttcacttgtaggagaccttgaggataagtattaatcacatcatgaaaggttttctcagtagagatgaatctcacatatcttttcccattaagtttcggtctgaagtatgaggattagttgcaagagttgaattaagaaagagaactgaaagctgagtt

SEQ ID NO: 58599 - DNA, 3306 bp, Homo sapiens
aggaaatcaacccttaaattctggctaattgaatgtttctgctgcttaagaagcagtacctctgaactgttgtcatagtaaggattggaggaggccaaatgacagcttaggctgcaacagagacatttcacacactgacaatggccaaccccacgaagccttgcaactaaagggcttccttaggcattattttttaaatgtcaaattaaagtgtgcattatgcctgggttctgtttgccacttttctcattagctggggcaacagttgcttgtggccagaagcacacaaacacacaatgtgctatgactcacctgtaaaaaatttcaaggaaaatcatatactgcctgtacaagtatttttgacttgaaacacttgccttgtgatgtttatttacaacctttcaatggcttgcatgtttttgccataatatggtttgagaaggaaaaggttttttttaaagctcatattttaagagtgcaagaattaaagtaaaatcttaggcctttaataggtccctgggaaaaatatccaataattttaaatgcccctaaactcctaagtccagaaaagatttgagccagataaagaatccatggggcaaaatacttggagtcactcaagggactattcaatgatactaaggatgctcctgtgacttggactggtttgggatgcagactggaaagcctggattttgctgggtgccagcggccctcagggaagagtggaagcccaagggaggagatgcgtgctacaatgttctgtagccaccagcgcatccctctagcccaggcgcccctttctgaagcagtcaagatccgcacgagagactggatgtctgcagactccctcacatctctccccctcacctacagggctgcgcttacgcctaactggaaaccaggtgacccgcaagagggagggagaggagcagaaggggctcccgaatacagaaaccacgagccaggagccggtggcctagggcagcccaagaaagccaggatgggagtgggagggagagggcatctgccgacgccgacgccggttgtccagttaccgagccagggagcagacccgcctccgacctcccgcagagtctctgccagggtaccaattccccaggggcggccagccagctcaatgcaagcccggggtgatcaccacctatcgtccaagccaggagtcccactgcgttccagtcactgctccggggagagggcgctcagccctgccccaggtgtccttacctggttctctagtacccagcaccaggtcagggacaccagcgatgggcttctaccagagaccggccccagcccacgcgcgcccagggtcgctgggccacccctcctcatcattccttaggccatgaagtgccgggggatggcgagctgggtcctttgttccctcaccaagtggaaaagcagttttttaacaagccaaaccaagaaagaaaccccggtcgcagtatccccggcagggcgcacccaggatagctggttatccaagcgcatgtgtatcccagttgtaaaaataaatcaatagtatttgaaactgcggagccccggggaaaggaggcggaacatggccactcatttcaccctcgggagcagcgctctgcgctcgcagccctggctcccctgcacccccgagtcccgagatgggttagagaagcagcgagggaaggggtgggggccccgccgcgtcaccacccacctgcggccaccaccgtgcagccccagagcagcagcagccgcgcgcagctccccatggccgggaggagccgggagcagccgggccgggcgggtgccggagggagccgagacctctgggctgcgggatgaagcgccgccgtcctcgggagggaacggggccctggtttcttcctcctcctggggcgccgggctcggtcagcggtcgccggcagctgggagccaggggccgggaccgcgcggggaggtggggtgaccctcgcgcaccggcctggcgggtcccgggcacctggggggcggcgggagccccgggaccatagccggcctggctgcgctgccccgcggagcggccctgcgggctcgtctgccgctagcccggggctcggcgcccgcagccgccgctgaactttgcgagacctttcacttcccggccgccgccgccgcctcctcctgggcgtcctcctccgcttttcccacctcttctggctgccccggctccgtcccgtccttctccacgggcagttccatgcgatgcatttttattgcaccgacgccgcggcgctccggtgccagccctcctcccctcgcacctccaccccttcctcccgcccgccccccgcgcttgacagcccgggcggcgcagcccgcgggatcggatcgccgctgccgctgccgcccggggggggggtcccccgcgccccgaccgacgcccccgacgcccggctgcccgctggtcccggtcgcctcagcctggcccccggctgccctggcgcccctcctggcccgcgccctgcatctccctagtgacccccctggtgccctgcagcacccacaggcctcccctgggaagcaatctcccaccttctcccggaacattcctaagagcagtagactccctctagatcaggtcagggcatgccaaggggcttaaaaaaccgcgaaacaggctagcgcctacttcccacatcccccagcgaaacaagccctccctcctcctccagccaccccctctcggggagtcccacgacccggggacggaacaccccaacccagccccgcgtcacccgcactgagagcgcgccaactgctaagcggcgttcgccgcttctctgctgccttttgcgggggtagggggatgtctcggctaaacaatcgctgcctacatgatccgaaggtgtgcccactttggtgtaagaggtattgcctaactcaaactcaaggtgctgaaagaaaagggtcacaggattagctagtcggcagtgtaagaacatcgttgtccagaggcagggcaagggcacgacaaagggaactcttcggtccttccaagcgttctccctttatagagtatgccgtgctgtgaaacagtgttaggaactaacttatggggagcaatttagtagcaaccacacgcagctaattgcagataggattgctcagggctggtgcttctggaaagagattaaatagcagccgagtctgagatttttgcaagttctgtgaaaatataattctacttacacatccagggaaactggcaaaagttaagtcgacagcaattttgtattgcagtgctcattttgttcctttgaatat

SEQ ID NO: 58600 - DNA, 1118 bp, Homo sapiens
ccctctcctccttctggctacctctggcaggtccttggaaattcagttctgacaatagctgctgtgacacctttccttcttaggctcctcttccaacagggttagtttcccctctgtcctctcatggcaccccctgtatcactttattattctcagttatacttttttttctcatatactgggtgaaagaaaattaaaagcaaaattgtatatatgctttcattattgtttttggtttctgttttgttttcaaacaggtctcactctattgcccaggctggaatgcagtggtgcaatctcagctcaccgcaaccttgacctctgggctcagatgatcctcctgcttcaagtcttccaagtggcagggtctataagtgcacaccaccatgcccagctaatttttttgtttgttcgtttagtgatggggttttgccatgttgcacaggccggtcttgaactcctgggctcaagcaatccacccgccttggcctcctaaagtgctgggattacaggcatgagtcacagtgcccagccactttcattataacaacagaaaacatacatatgaaaaaggtctggaaagaaatacatcaaaatattagagatgactgttcctctggcctctaaactttcagcaataccataggattgttataattccattttttgttctacaaaatataacaacttaaggcaggatatgataaagcagtgcctggcagtgcctcaagagtggcatataaagtaggctattagcacaggtgaaactttgtgggctgaggaagttaaaaaaaaccacatggaggatgtggactgaacctgggcactaacaattgtgtaggtgtggatgaatatggtgtggatgaatatgccagtggtggtcgcctaagtgctccagtgtgaataaacagagtgcctctgagagaatgagtggagtctattaggagaaggagattcatagggattcgtggaatggggaagaaaaagcagaggagggacaaacaaataaaggctttggcaagtcaagctgctttgtgttgggaggttctctgagtcataatttagaaatgacatataatagattaggaaaagaagacttggaaggtgagctaagggct

SEQ ID NO: 58601 - DNA, 6077 bp, Homo sapiens
aaaaatgctgcatccatctgtacaactatcactaaggtatggtgcctatttcacctcacccataccagcattgaatattatactttaaaagtataaattttccaatttagtatgtgaaaagtgatatttgtattagtatttcttttattagattatatgtaaaattgaatttttttctttgcttgctaatcagttttatttcaccctttttactaattatctaagatggaatgaatttccaatttcctaaggaagttagacctttctccatttctaatatatgcgtttaatgctacaaatttccctctaagcactgcttttgctgtgtcctgtgaattttgataagttgtacttttatttacatttaattcaaaatatttaaaattttctcctgagatttcttctttggctcatgagttatttagaaacacattgtttaatttgcagatatttggggattctccagctaacttttctgagatcatattttgtataatttctattcttttaaatttgttaaagtatgtttaatggcccagcatatggcctatcatggtgtatatttcttgtgaatttgaaaagaatgtgtaattcagctgttattgaagtatttgataaacgttcactaggtcaaattgactgatctgttcagatcatctatagctttactattttcacccttttcaaatgatagtcactgttagcaactagtaaacaacagaagagaaaagtaaataggaaactaattacacttttagtgtatattgtaggaaacagactgccatgcatgctttccatgaagtttttggtttgtatctattacctctttccacaatgaagaggatgtaagagaggaaaagcagggtaagagggtgagccagaaacacagaagaagttgttgaaaggacacaccaaacacatcaccagtctgagattttttccatattttatgtaatgctttcatgcctattgagaaaataaatgcttgttgatgaagattttaatctttattggcgttctttggaattcttgttttttaacacaaaagtgatagtataactcttttaaaagacatctatataatcttatgttttgaactggctctcttttcactgaaaaataccaaaaactcacagttatagagttggaagggtaactgtagtacagaaagtttggccaattacatagtgttacagttttaagagctgcttccaaagcaatcacactattcggaaaaactttttcataacaaatgtgttcttcctttaaaatgtaaacaatgagccaatcttagaagcaaacattgaccgcagagtcatatcaagtccgttgttataagtactttagttttaacagtgcagaaacgtgaaggataggtttactttttaactccaaccctgttcaaagatcacttattggcctctgaaggcacaggtggcatgcctgttatagtttaacaggtagcctctgggtgaggtatagtagttcagataactttggatgctttggatgctctcatgtgtggcagtatgcacttgctaaaacattctcctctctgggtctggaagcctagagtctatatccatatgaggcactgggcaggtattccagacttctgagtcatggatgaaaaatgccatcttgcaactgacacagcaattcctttgccaagaaatcatcatatccttagtttcttatgttgaggtaaatattcaagttcttggtaaataaggtagattttctatttgcaacctatatctgagtattcatccttttgataacaaaatttacagggaatattttttctatcagaggcaccgttaattatactaggctctcaaaagaattccagattcgcctcaaataccagcaactcaattctattccactactcagatctgttgggttgggttgaattggaattgtattacatttatagttaatttaaggagtatttacatctttagggaatttagtttacatttttatgaacatcatatattctccatgtatttaggtcctcttaaagacatttcaacaaagttgcctaattttctacataaaaatcttgccaatcatttattagatttattactatacatatttttgattatttttatatatgatatatttttaaaagtaatatttcttaatctttgctgtatggggatgtcattgatttttgtctattgatcttatatccagcaaccttactaaattcctaattctaataatttgtagtctcttatgcctaactccatgtttccatataaacaaccatattgtgtacatttagggaccatttatttcttctttccaatctttacaatttttatttgtttttcctttctaattacactggctagaatatgtagtacattttgaatagtcacaatattggaggactggtgatttcctttattatctttgtgaggcaaacaatatgctttaaaatgtttgttttttagctggcaactagatgttttgtaccgagagaattcaagctatgtaatctgcactattgctagagtcatttcttttcttaactcttttctcctatgtttaccttctctactagttgatttgccctttacacactctaagtccaagttttacatttgcttttctcatttctaatggtgtacttttgtgaaattgaatattgattgtagaatctcctaccaagaacttttttctcttttcaaattattatacttcttaatattcatggcttctagaaagaattaaatttaaaaataaaatttaccttcaaagacaatgagatgaccatggatctaccaaatgctttcatgaaatgttctttattttttcctacaatattctcagtacttccaaatgtgcaggttgctctgctgcacaatgttgggaatgccattcacatcatgtgagtagcaagccctgggattctgcagcacgcaatcttcaaggctgactgtggtagccccgcctctgcatttcacttttccgtctaattaggactgtggggtctctcaagcaattagtgataatctactaatgcctaactccagaaacaactctaaatgtgtttcaaaaaaatttctacttttggctgcaagcagaaaaaatatcatgtctgggagatatgttatgataatacagctttaataggcaacctcattccatgccaaatcagtgttgatacaatattcttttgtttagtattatgtaattaagtaaattgtcacttctgtttctataaacacaattaggacgaggtaaaaaaatgggaagagaggggaggaattcattttggagaaagaatcaacataaaagtaatataattacaactctcattagtagtaataataatacttgtgatgagatgataatggtaaggtagtaatgatcatcatgatcatcaccatcataatgatgctgatatgcccatgaatccaagttgttcggcttagttccaagtttaagctgcattatagtttagtttctgccataaaaatttcttcaaagcagagagggagaggatttcatagcatagcttctgctttctcactaacaaatgatatatgtcaaacttacagtgacacaagattgccaattatattataactttataaactctcatcccatgtacaagcaaggtcaaaaattaattttatccgattgaaaccagaagctttctttagaaaggcaggtctttagttaaatactaaaaagggcaaagactatagccagttcattttttagctgcatatctagagttttaagttacatatatataatatacattataggtaatatggagagactatagatagacagatagatagatagatagatagatagatagatagatagatagacacctatatatagtatatgtatttgtggaatatcttattcattcagtactggatagcacaggtctagacctcacagggggtaataccacaaggggaataatgtgtgcaaagtgcagagtaagtgcatgtaaatagcttgcactagcagaaaaaagcactgcaaggagccaaaagaagaatataaatcaatcgtgatcctggtagaataaagttgagatgctctggcatatttgcaagtaatgatactagtgaaagagctaaacagaaggcaaaaatagagaccacaggttataagaaaaagttatgcacagtcaagagttggaaagcaacttaacttaaaaaaaataaaaaccatctaccctggcagtgtataaggcatactaggcttgctgctaatacgaagtagccagggatatttgtctttctatcactggtgccaggcacagggtaagttctcaatatatatttgttcacaatggaggaagagtgatcggttagatagctatgtggcctacttaaaaataccacactttgccaacgtcacatgtggttcaagaaaatctgtttctgagttgtttttgtgggtgtggttcacagacaatattggtgacacatcaggaaagatggcaagcagaacgagaactagtgctacaaaaagtgatctcactgtaacagcatgggtgggcctggaagtcagttctcatgcaaccccattagttctagaaagttctcatatgactaagaaaaagctgacaggaatcaaacagatttcatcattaagcaaacagaaaacatcaagtaagtaagggaaaatgtcgaatgaggttaggaggaaacaattttagatacttttatagcctccggcctctttcattccctttctcaatcagctctcctcctatcccaacccatgaccctctcctacccttaccccaggaacactaacagagcagggatgtttctgtataatccattcaagaaattgcacaagatcacctaagaagaggctgctatagtctgaatgtttgtgttcctccaaaattcatgtgttgaaacctaacccccaaggtgatggtattaggaggtggaaggtgattgagtcacctcatgaatgggattagtgcccttagtactggagaaagcctgtttgccctgttcacacccttctgccatgggaggatttcttgagaaggtgtgatttttgaagcagagaggggaccctcaccagacatctaatctgctgctgccttgatggtggacttttcagcctccagaactatgaagaataaatttctgttgtttataaattacctagtgtaaggtattttgttatagcagcaggaacaggaacctctgcttctaagacagaggcagagccaggatttgaaaaattagatgccagagctcctggtcattattattgtactaaaccagatcatgcagtagtaacactactggcagaaagcaaaatgccttcaaagccattttcttaaaattctgtcatgaagcagcaattatccttcaactcatttttttttttttttttttttttgagacggagtcccactctgtcacccaggctggagagcagtggcatgatcttggctcactgcaacctctgcctcctgggttcaagcaattcttctgcctcagcctcctgaatagctgggactacaggcatatgccaccacgcccggctaatttttgtagtagagaaggggtttcaatgcattgaccaggctggtcttaaactccggaccttgtgatccgcctgcctcggcctcccaaagtgctgggattacaggcgtgagccactgcgctcagcctcaactcagtctttaaccaaaggttgcaactttctttaccagcaaaagccacctaaaaattttaaaatcacccaccagtaaaaaacaagaaaacaaccaagattctgaactctccaacaatgaagaatagaggagggagagggcagggtgaacatgttactcccactaagcctcattcataaaatgggagtaataataacacatatcttagaagattgtggtaggattaaatacattaattaaagcactcagaataatgcttgacacatcatacgcatttaataaaaattaactattatttatctttttcctaccaggtgcagtggtgctttttttcttttttgctaattagcctagagtaaattgcaatgtgtcttcagttcctgaagcc

SEQ ID NO: 58602 - DNA, 799 bp, Homo sapiens
gttacaaatagttctgtgtctgatattaatgaatgcccataatgcatttttcccaagttatttcttcaaagttaaaatggcacaacttacaatagaaattcttccccttgaaatcaatggttctcaactgtggatgacttcgcctcccaggggacatttggcaatgtccagagacatttttgattttcaggatggggtgggggtgggagaaggtggagatgctattggcgtctaaggagtagaggccaaggatgctgctaaacaccctacagtgcacaggacagaccctaccaccactccaacaagaagaattattcagtccaaaatgtcaatagttaaaaagttctggaggcagatggtggtgatggttgcacaataatgtcactaattaatgttactgaactgtatacttaaaatgattaaaatggtaagtttatattatgtatatttttaccacaataaaaaaatcaatagtgctgagattgtgagctttaaaccattgagagttcttgtgtaatgaaagtatttcagtactgctagggaaaccaaaatgtactctgtacctggtaaaatgccattcataaagcaaacaactttacttttttcttgtaaatcacattttgttttccttgactggcttccaaatttctttcaggcactagtcaatgatcctaaacaatagtttccttccctgaatgcatacataaatgaaaacaaaaactataattagggtcttttttctttggctgaagctagtttgacttaggtttctgttatatacaaccaaaactcttgacaa

SEQ ID NO: 58603 - DNA, 538 bp, Homo sapiens
tatatagccctgttagcggtggagaatccatatccatctgggtctgcagcaacctcaattcttgcctcctcagaagaaacaatttgactgaggggcagaaggagagaccaagacaagttttagagcaggcgtgaaagtttattcaaaagctttagagcaggaaggaaaggaaggaaagtacacttgaaagagggccaagcgggcgatttgaaagaccagcacggtttgaacttttgacttggggttttataccttggcaggcttccgaggtcttgcgttgcttctcctgctcatccaacgctgagatctgatccggaagctgctgatcaccagtttcagctgttttctatctggtacgagactgtctttccctagtgccagctgtgaccaattattactgtagagaaacagttaacaaccgcctgacctcacaggatggcctcccgacacacctggtgtgtgagtagtgggggagccctctccttccctgctcacacctgactatagcacaagatattgtttagattattattattct

SEQ ID NO: 58604 - DNA, 1415 bp, Homo sapiens
aagtaaatccccattagccaagttggggagaagtcacatccgttacacagcctctcccagaccgccctctaggaaggacaccacatttaaaaacaccggcctgcctccagtccttggctgcctcacagcgatgctcagagccggtttcccaaggtccgcgcgccgcctgcaaggcgcaaacccaagccgctgctggttgctaggagatactgggccagccatctcctccaatcagcacgcacctctttgcgtccaatcacagaggcaggaagggccgtggtgggaggtgaaaggtcatagtcctgtttggcggccatttctcttgaaactgcggctcgggacctgcggtacctgctgtagtcacgagggacgggcggcggcctggtcggcagagagtagcctgcaacattcggccgtggttacgatggtaaggagaaagagaacggcgggagaagcggggagaaagagaaggagggagaccagcctcgcggggcctgctggttccttcgcgcgtttcccattcatccgcgtgaggcgccgcgcaccctgtcgccagctcctttcactctgcttttaggtttctgaggcgcgtgctcctcccgatgcctttcttttcctaggagtgcccgtgccttcttctctttgtttgaatccgggcctggggtattcttagttggggctatagggtcggggtaaaagtcaaagagaatttgcacttcccacttaaccacactccagaattcactttcattccgtgaaagtaatgatacggccatgctctagattaactcacttgggtggggaagacagacattagtcaaaaaataacaagtatgtaattgcaaataataagtgctaagaacaatgcagacaggaggctgtgagggtgcgcgttagacattagaggcttagtcagagatggcctccctaggaggtggaatttaactcgaagcctaagtgtcatgaaatacgaccctttaaagagcaggaggaggagtgtaccgagcacagggaataggagcataagacctgcggccggaaagaaagcttggtcatttggagaaattgacagaaaggtatagccacttgcgcgaatagtggttaagagatggtatcggaggagcaggcgttgggcaggacctcttaggctgtattgggaggttttgattgtactccaaatcaatttaaaatgattcggttggaagccattggatcattttaagcagaaatatgacaatctgatgtgcactttaaaaaatcatagttactgtggtggataacaaattggagaatgaaaactggagacccattaggttattggagtaatcgccatatcaagatcactccgaatatgctcatgttagagggggttagtagccaagtttcttagttctcttctttgtttgactggtgag

SEQ ID NO: 58605 - DNA, 765 bp, Homo sapiens
aaacgaatttccagatgatctcaatgtgagataaaaagcaatgtttatcttcacatgcatatgaggatttagactggttctctcagacccaatgcccttccatttttttttcccacctcctctccgcctaccttggacaaatactaggaaaaggggctgtgaactgtgtccttggatggtgtggggagatcacagttagcaattttttgtttacctaaaagccaggagccactgggtccttggcctgcttagatgcacgctgccgcttctgactaggtcagagcacagcacaatgatgaggaaattactttcaccttgacctttaaggcactgctggcgtcaggctatttagtatggacgcttctgttgacatttctgactgccccttttgcgaagtgaaaaaaaacaaacaaacaaacaaaaaaaaaaactggaggtcaagaggaaggaaggatgggttaaggagtcagcatatacaagtcagataatgtgaaaagtattttataagagctgctatcgggatgttggttattaccaaggaaaaatgtgtcatccttatccatctataactactgaacagtaactaaggaaagaaattcactcatcctttctgcttttgcaaacctcctgtttgcaggagcttatcaggtaatgttgtctgtctggactgtgaatcagatgcacagttcacccacaaacataaatacctatgaaaaagaaatataatttcttttagactcacccagaacttgcaagctttaagta

SEQ ID NO: 58606 - DNA, 2463 bp, Homo sapiens
atatgaagctaaattatattcttatttatcgtggtcatctaaaggagtgtttgctttctgttccaggtttttttaatgagactaaattaacttttatattttgtgggtttgcaggcttagtctgcttttatagtatattatttgtgtccacatctatcacttttattgtaaagtctttactgggcagggaaagcgcctttcctatctttgtatgttccacaagacttaacacagagcttgtgataaacatgaataaacgaaatcaagtaattaaggactcaaaagcctgggcctggcagtgtttccatagcaattggtagcaggaagcgacgaggctgagaatcacagaccatcttccataaacttgattctgtctccaattttggtcgcaagttgcttgtaggcccaccagacacagctgaggggtgggagggggcatgcggaggggcggacactgagctgaaacctattttacctcagcgagtttggatccaggagcctttccaacctatcgttcgggaaggcgttgtgggaaaagtgggcggaggtgccaatcgatcctccagtctcggctctatcctcccccagcccggttcccggtcatctcagggaccgtctggtagctgatcccggaacgcagctggccaacggataagtgcggggcacccgccacccgcgcggacccaggagcacctcccctaccgcatccccctcctccccacccccaggttccctcggctcgcggccctccgcgtcccgggctcccgccccagaacctgtgggcagatgtttcctccacgcagtaccctcccggggctctgcctccaggctcgcgtcccagcaccctaggcagaggtttcccccactctgtcctctcccggggctctacctccaagctcccgtccctgcccctgggcacagctttcccctactctgccctctccaggagcgctatctccaggctcccaccccaaccccccgggcagaggtttcccccatggccccccttccggggctctaccccaggttccggtccctcactcccgaacactccgggtgccctcacccagccaacccttgacgcgcttccacataccacgtgatccacacagctcactttgatctctcggggtgaccaagcttaagtttccttatctgaaaagtagggacactagtctccatctcgtttactcgggatgggacaagacgaccaaaaaagagaggattcctcatcaggtttattactcgttgccattcttgcaatgattaccgcccccgttgctgtggttgggggaggcgagcaaagggcagcggctgcgagcgcccgcccccgccccaccctcccagccccggacagcgcaggctgcggcttttcgtcctccactgagtcctgccggtggcccgagcccggtggcctcccggcgaccctcggcgcgaggcgacatggcaagcggccacagcctcctgctggagaacgcgcagcaagtggtgctggtgtgcgcccgcggcgagcgcttcctggcgcgggatgcgctgcgcagcctggcggtgctggaaggcgccagcctggtggtgggcaagtaagtggccgggcgcgcagggtggggaccgccacgggcggagctggccgctcttcctctcactgtgcactctggagggaaacaacgccgtgaaagcgtccctgcacagagatacacgggcaagccagcctttggggtacctgttgctaacacgctctgctgcttggggttgtcattccgtccaaagagctcagagaggaacaccccattggaacgcatcagggtcctgcctctgctggtaaaatatcactgtccaaccatcagaaggggttgaggtcctccccagtgcttcttaaagggaggccagaagaccacctttgtcagggtggcctgtggttattttattcttacggcagatttctgattccacctgcgtcccccactccctatccctagaattttagaatcagcatcactggggctggagttctgagacctgaatttttcaaaagtacctttcacatcctcgtgatctcgtacactaaagctttagaaccacggagaacatttagacgataatggccctgagtgataataaatcaagatttgaccatcagaaaacaagatatttctcttactcatctgagcttcctgccagatatgaataaaagaacaaagtttgagggcgacctggggtagcaagggaagttggatgagaatttgaatccaaagcgtgccatgggaccacaattgcacacgatcaatgagtctcacaaactgaccacggcttatctgaggcagtttagggttgtgcaagagcccagcttttaagggactgtgggttggtttaattttatttatttatttatttatttatttatttatttatttatttatttttgagacgcatgagccactgcgcccagcctattttttgtttttt

SEQ ID NO: 58607 - DNA, 1173 bp, Homo sapiens
attgtgtgcagtaagtggtcttgaaaagttgtcaataaatattaaatacgcaatccctataataaagtaatcttttccaaagtctaagaatctttatgtataaacttagatttttcccattgcaactgagccaattcctcctatacctttaactgcctctatttgttgtgctgtgttgagaaatgttttaaattgcagttgccatatgtcactttcctccaacacttttctcttcctgccttagccaatggtcatgcatctggcctgtgtaaacatgagaatgtccatgcctgaggccttggccgctgccaccatcaatgcagcttatgcactgggaaagtctcacacacacggatcgttggaagttggcaaacagggagatctcattatcatcaattcatcccggtgagtgtgcttcaacttagctcttttatattatgcccactgaagtatgcagatgaggcctaaatcccttttccactaattattagtgtcagactctgtctggactcagacactatccagtcccctctatcttgatccctttccaaagagcaaatctactgacagaccctaaacaacagggtagaccaagttttcaagatctcttcatctgtctggtatttttcgtagatttccagatttctgctctgtttacctggactttggccgggttgtgccctctggcatgtgtttgtgtttttctgctcggcttctgattttcaacttgctcccaactctggcttctcactttggttctgattcattccctctctgatttctcatgccgactggctcccaaaagcttaaacttagttttcttgttcctggtgacttatcactcacccacccatagtctgttgccacctgggcctccagtgtaatattagtctgttatcacactgctaataaagacataccgagactgggtaatttataaaggaaagaggtttaatcgactcacagttctacatggctggggaggcctcacaatcatggcggaaagcaaaggaggagcaatgtcatgtcttaaatggcagcagtcaagagagcgtgtgcaggggaactcccattcataaaaacatcaaatcttgtgagatttattcactatcatgagaacagcatgggaaagacccactcccatgattcaattacctcccactgggtccctcc

SEQ ID NO: 58608 - DNA, 958 bp, Homo sapiens
tattgtcccaaaactccatttaaaatccatttctgtttctaatccttagatattcaaccgttggctgcaccctggtgcacttagtgtttattatatggcttcttagtggtgctgcaagttgttgctcaaatacctttttgctcattcccaaggaatggccagaaaacaatagaataaggcaatgtttctccatccccgactttgctttcctgtaacaattaaaaattaagaaacaagccaaggagccagcttgccttctgctccaggagcagcctgtgggctgcctcgatgtccggggccatgaagcgatcttttatccagggcctacagggagagcacatccgcccatcagccaaacatgaaaccctgccagggttcacagtgctgaactgatgtaattttcagagacctgtttgatcttaccttacaacagagcgcaccaggtcatagaccttctccagcggagtggttgttttcaggggacgtagaaactctatgccctggcaggctgcaaggagctcgatggccagcactgaaacaagaaattccaagagggtagcttatgaaagtctgacttcatgcttaaggaatgtggatttcccaaagttgacacccatcaccacccaactaacagatggtttgttctctgtctattggtagaatgaagttgctttggtatttagttgccattttaacctgttttctaaccccttgactatatctttaatgctgagaaggggagaattgagacatttacctgaataattaccagacctgcacacctacccaggaagctgcccattcatctgcactagcaaaatctgccatgtcccccattcacatcctctaacaaaggtttgttggccaagtttgggtcatgtgggtagggaaggaagtcagaaagaagagctgatcctcatcttgagccccagttctattaaataattgtatgcatttc

SEQ ID NO: 58609 - DNA, 1691 bp, Homo sapiens
ctgctttaaaactgcttcagatggtttcatgtggtcttagcatctttatgtaggaggagagcaaaaagcagaaaggtaggtgtcagggcagagaccaggggtttagatgaaagttcaagacagaattccacttccatccccattcccagctttattttcttcaaaatctgaactgatgctatgctgccggcctccagtctgggggtgggggtggattctttcgaaaggcaaaataacctcaaaatgattcagtcactgcaaagggattcagacctgcagccttgagtaccagtctagtctttgttacttactagctgctggagtctgggtaagttacctcctctctgatttctcctccatcagaggtggaggagaatcctacccatctcacagggttgtgtgaggacttaagatccccagaggcgtggcatgtgcctgcacagggccagcctcggcaagcctgacctctgctcatcattttccctgaggtgggggttcaatgctgcaaagactaagccaggccaaaccgcacccgttcgcggccctctcctgcagccactcacccacttccacgaactcgttgttctctagggccacctcgagccggtcctcgttgtccagcaggcccaggcccttgcaccggcgcacaaggaagtgcgcgtcatccacggaggtgaagccaccattgtcgggcttattcttgatatagcgcctcacggcctcccggcccagccagcccacagtgagctgcgcgtcctggcagggcactgccagccattccccacgtacgtgcaccgtgtatctgggcatggctccgctgcagcctgaggtcctcagctggtcacaggaggggagagctttatgcaggagtggctaccggggtgtggtcagctggaaggatgagaatagactttcaaaccactccccctccttcacctttactcattcatgcattggacaaatatttattgaggtacctgctgtccctttggtttttgtagccgagcaggggcaggagcaggggatgcagacgggtgagcctcctgtccactttccatccagacctgctgccagaaaggcctggggtctcccaccctgggaggtgctgttcttgtccctgatggcacctacctgctgctggccccctttcttcagggtccccaatttctctctcttccctcgtttctgtctgtgttctctgccattaagggcagcttataaacaccatgttcctgtctttatctgagattactcaactgtaaaacgtgttctgtgggccaactgtgacactgggagtgtggcaatcgtcactcatttgtttattccacaaacatgtattgagcaactacttcctgtcaccagtaaggttttctgaagctttctttccaccagggaagactgcaaaggccagagatcattttcacaactaaaggtcgtcatctgggcaaatgaaccactctgacttggagattaggggctcagacagccgtggatgagagtccagctctactacttattagccttgattaggtgagtattaccctgtatttccttatcagaaggcctaggggctaactgcctccttccagtatgtgcaggatttacctgtgatcaaatcctggctctgccatttgctaagtgtatgacttgtgggcaagtgatttgacttctctgggcctcagttgcctcat

SEQ ID NO: 58610 - DNA, 1386 bp, Homo sapiens
aacacccatccccttagtcatcacaaaaaacagccatctcttggaaggattgcttaagcctaggcagtcaatgctgcaatgagttatgattataccactgtactccagcctgggtgagagcaagaccctgtttaaaattaaaagaaactgtcatatctgttcacccaggcagaagacactgatagagaaagtcctgtgatcacatagtttgatggtattgcccttttattccatccagcccacagtgactttccaaaactttgacccctctgccaggaccttctcgacatccacctctaattctcagaaggagaccttacttcctacatctgtgagaaaactgaggactgcacatgtgaaccaccttaaccttctgccccacccccccccattcattccttgactcatttaacaaatattttttcaacacctgttatgtaacaagctctatgcgaggtgctggggatgaaataaataacaaacacgctctacattcatgaggcttactgtctggtgatggataaagctgtataaagatgactaataagaggtctaactatcttcatgctgcaaaacaacccaaactactgcatgctccagttgactgtcactgccgagaccagcttctgagtaatttcagcccaggcatcagactagtgagggaaggagcttccaggtgataccacctcccagccatgtaagtcacccccagcagtttgaggattctaaactcaggccctacgcattgtggagcagagtcttccttgttattctttctccagaaacgcactttccaacttcctttgcctgtctagatctttcttactccttaagcctgtttaggccttttcttctccaggaagcattccctaaattcttcagttgggttaagtggcccttctctgggatgccttagcatagctcttctttagtattatctaggaaattacttgtctgtgttcatccataattatgtatatatccgatctggcacaaagacatttagcatatgcttactagctgaactgaagaaatgtgaactgcaccgagctggcccctaggtaaaccagcaagcaggattaagtttgtctttagcgccctctaccttcttcacagcacccttccatgccacccttcaagcatcccttgtcacaattcactttcagtatcactaagtgataactaaaaacgacattaacttacagcttgtcttgtaagctcatagggcagaagccttaaagagcagtatttgggtaaatggatttgctaaagtctaatcttagaacatgatcttatgccagtgatttgagctgaactcccttctctgtattcttggcaaggaaggcaagggagagcagagcctggagaaagaatcacactgcagca

SEQ ID NO: 58611 - DNA, 1617 bp, Homo sapiens
ggaggcaaccgtgggatcagggatcgacaggacatgggatctgagacttgggtgagattgttgactgaggaaggtgcccagggggctgggaaaagtctggggcctgaagaagggggttctgggccgcaggccgaagcaatggggaggccatggagtaattagagccaggaactaaaattatgggggctactgcaaagatgacacctaagggctgggtgagttgagaggagtggacgaggcgctggatgtgcccagggacctcggagagaggatccaggcgaggggcggaggagacatacgtataagtgggggctgagggaagggatgcagaggcgtaagcggggttgagaaggggtgctgtgagagatctgggggctgaagtgcacaacatgagttggatggaggctacagaagagcagacggggacgtggggctaggcaggggccgcggcggggtgagccggagatccgggagcccgcaaggactagggtcgaggggcagggagcccgggagaggcgggcactgggcaggcgccccactgtaccaggctgcgcagattgtcctcctgagactggaccgtgagagcagcagtcccggtcagcgtccggcgagtaaagtcgacgctgcagcgcaggtgcaggtgcttggtccggcagacggaagccggagaggccaacgaacaggtatccactatctcgggcatggctctgggggatcacacagcacagcgacctacagcccaacgctcagctaccagactcgtcgatagagaacctgaggaggagggagagaggtaaagaagaggaggagggattcgcggtgcacgccgggaaaggaagtttcttaaagtcagacgagcgttgggggatgggtgaaggaactacaagttccatggtgccgcgcggcaagcgggcgcttggctacctgggagcgtgtgtgttagggatgttgagggggaccaagcgtgctcctggagctgaagaagaggaggggagtaggggcagttagaagggtggccgaagggaaatgatgagaatggagggggagataaaactgaacactaccattttggctctgttcaactttcgtggaagctgtggtggcaaacgtaagaaaatcaggttcattggtgtttgcatatagcgagggcggggcggagcaaaaacgtagaaaaggcctatcagaaggctttctttcgtgcggttcctcgttagtatagtggtgagtatccccgcctgtcacgcgggagaccggggttcgattccccgacggggaggcacagtaattgttttttgtttttagctgtaagtaattcaaggtttaaacagttgttttgtcagtttcagtgtttattatgtatatccccagaacctgcatctctcaaacggagaaagccaacattcccatcttagaaactaatgaatttctataaaagttatgcactggtcgcaatgggagtacagagctgggacatctagctcagctctggggcctttgtggcaggtgaaggaggattgaaggatgccttgcctttagggtggggcctcaaaattaaaactggaaaaattggaagaggctaggtttcgaaggaccttaaataggtggccttttaatcct

SEQ ID NO: 58612 - DNA, 2621 bp, Homo sapiens
gcaacctctgcctcccaggttcaagcgattctctcgcctcagcctgccaagtagctgggattatagggacccaccaccacacctggctgtttttgttgttgttgttttggtatttttagtacagacggggattcgccgtgttggccaggctggtctcgaactcctgaccttaggtgatccatccgccttggcctcccaaagtgctcagattacaggcgtgagccagcacgcccggccgagggctggcttttaaaacaccgaaaacccagacaggaacggtgtccatctccaaccccagacggaaactgtgcccgcacccacaagaaaagcagtcctttgcccagagcaaccaaaccctgaaccccactctcgattcccctctgccccccaactcttccatcccagcggatgggaaacagcgagtccagccgcctccccacctcgggacccccctcccgggccaactgcgcagggcacgaccccgtcgtggtgccccgcgcgctcgacccccaggggttgaggtgaggagggatccccggtgtcccgggaagcgcggcggcttctgcgggttgcgggcggacccccctccccgtggggaggggctgcggccgcgcggagtcgccgcgggtcggaggctcctccccggggtggccgcgcaggaagcggggcgggtgggggcggtgcggggcgcgcacggggccggggcggcgggggaggcgcgggcctgggcggccagccccggcgcacagccgcggccggggcgcgcggcgcggggcggaaaagcctgtttacacagactgcacaccgcctggggaataatgcagtaaaggaagtgagccggctcggcctgactgctccaacttcctgctctcacacacaccagaggggaaaaaaaaagaggagcgagagaaagaaaaaaagggggaaaaatcaggatctcattacaagagccacagaccgtctgcagacgcctgtcagcatggaaagtcgggggctttcgcccgggtcctcctagaaattccccccgaagaagactcccccacatctgggtaggtaacagggcttctgcctgttgctcggacacttaaaaagtttgtttgggggtgttttctttttttctttcttttcttgggcgcggtgggggtggggcggggggcgccgcggggtgggctgcgggccggggtgggggtggcggtgcgtccgcgcgggagggccggccgcggggagggggcgccgcggatgctcctgcgcccgcgtcgctgccaccgccgtcgcccgagctcgcgccgggcccggggctgcggggaccctgcgcccgcggctcccctccctggggctgcgctgcgaccccagaggaaggggcgccgggcgtgcaaccctgggagctcgcccagggccccgctgcaggcagcgcggggagcgggggacggcgagacttcgggtccctgggaagaaccgtggcaggagcaggctgagtgcctggaggctggaccaccgccgaccttccagctgggaccgcagtcaggctcccctcgagtgggcaaagtgcactggtgctcggatccagggaggaagacagggatggagagggcggtggaggacatgggtcgcgaaggtgtggggctgggggctgcgtccactctcgcttggcaggtgacccccgcccaggtcaccgccccaggcgcacgccccatcggacatttaaaagccggtggtctctattgggcatggttttggagaaggaccaggcaagaaatgatcttggggccccttccactccccatccctgtttaccttcgaactcaacgttggcctgtgacgctactgtaacttttggggaggcgggattaagattttggagtagttaaaaagcaaaaataaaaggtcttggttttgttatcttttctgaaccgaatcatcctagggacaagctgcagttaggcggcgggtggaggtggaagcaagaaatgttatttcagaaactgcaaaaggggctttttagaaagaaaaaaaaacgagtgtcgggagagtttctggcttgtctggaaacggcaagactaattgccatgcgcttccgctttgaaactggcagcagacagcatcttgaaaatgactcactagaggagctcacaaagaaactgtggtttgctccttcttaggtttatgtatttgtgccttttacagtttcctttgtagtgttcgaggggtcccccgccccttccccgccagccccctcccaccctccctcatttgaaagcccctggccggtctttaactacccccaccccagtcctccagcctgggggtggcggggaaaggggaggctgagttgtttttggagttggctgcggagagggttaaagggattctgctgctgcagggggaaaaagttccttgaattttccactggctgctgcaggaagagagagcccccttagtcattgctaagtaatgtctgcacacacaccaactaatctcattaggagtttccgctgctcggcacaggaggggttttgtgcagccactgtcagcctgggagcccggcgctggggaaggagacaagttatggctttatttacttaggggtgcagccgcccaacgagccttttcaggacatgtct

SEQ ID NO: 58613 - DNA, 2566 bp, Homo sapiens
tgatgatgaagatgatgaaagctctttaacacgcattcagtcaacaaataggacatttaaaagtcatcatctgtaattttggccacatacgtaacatagcattcatgaattttctctttctctttttggtcagtaacatgcaataatagagtgacatacggatggtgaccttgtgatggtgtaccctttatgtcctgaattaggccatccatctctgaaactctgcaagtatagcatcttcatgcacttggtaccaatgctgttgagaccagaatggcagtagtccagataggggagagcagtgatttgccagctccatttgagttttgaagttaacctaaacatttattaaagacctcctctttttcttatataaaaaattaaataagtcaaaagtgctaatatacagtacatgtaactctgaggtcatatattaaaatttatatttgtaataactttttggaacttgaatcttttcctgaaattggttttaaaggacttccaggcagtgtatgtaaattaaaatattcccttcttagctgtcagatattggattttgtgtgttctgtgggacccaattatatttatatatctatctgattcagaagaccagtatggtgctgtgaaatgttgcaaaacatgacctgatgacaacccaaaacacttcatagaaaactatccaagaatgtgacttcctggagtagagtcttttttcactgagggtgagttgctgcttactaatcgttagttttgttgccttccaattctaaggaatgactcagtcatctccatgtttcccagacctggacttcctcatgaaactttatttttttaattgtttatgttgccagggctggccttgcactcctgggctcaagtgatgctcccacctcagcctccgcagtagctggggttacaggtgtgaacctctgtaccagctgtctcattaaagtttaaaagaaatgggctgtctgtccattctggctttgttctggctgtagagcccagatgactgtcttctgaccctttcctaaggttctgtacataaatacgcagatgagaggggaaggggactccatttttgttagattttcttgtatgtttcaggcaaaagttttttatgtcctggttatctttaattcctctttgcctgtatagatcgacttataacacactttgagaccatgctagcagaatagtatcttctaaaggttggttgttttttttcctattgtaaaaaatattaatgtgaattgccttacaaagatacagaaaactgctataaaaaaatagacatctcccataattccactgtttaccttttgatgtgtaattgttcagttttttaaaaaaatgcatatgtgtgtctatgtatatccacacatgcacataccatttttaattgaaagcacactgtacttactgttttataacttttttcacttaacatgtaacacattttaataattagtaccgagaccgaaattatcacatagagcttctatttattgatctaataaatgtgttggctcaaccatggattgacataatttcttcatagacttgttcagtgttttttgtcctctgtggttcaagtaatgttctaagaatgctgccctcttgaaagactgagttcctatgtgctgtgaaattttggattttgatgagtttctctgtgatttaaggatgagtcatgatttgcagtagaatatcaagatgtagtaacaggaagtacagggcactacacatgaaaatagaatgttaaatgatgaagagaaaccaggttaaactgaaaatataccttgaaattatccaactatgaagggagaggaaggtgtgttttgtacattttaacaactcctattactgtttcattttctatcagtggagtttccaaactttgaagttggtgttttaaattgatttttagctcaagattgctgttgttcatagccactttgaattgaggtcattcagccttttgattgaaaccatggcagtgagaccatgaaaactctagttttgccacttatagagcagccccagtaaataaaattagctgtgtgtgtgtgtgtgtgtgtgtgtgtgtgtgtgaccttctgtgaaattctaaatgtcttcaaaaatggtagattactcagtcttttaaataactattctgtgcagaaattcaactccccatggttcctgcctgaaaccaaaataaaaattgcctttcatccattactggagatttacatatatgtcagcagttttaaagtaaactttgaactagtcatttcaataaattgtgatttggtttgaattcccactaggaataaagtcattgactactttattgctatgtattaatttacatttcctggaaagtactacttttttctaagaattaaataagattataacatggctttacttgtatatttttaaagaaatttagacaatgttatattagtgtattctaatttgaattagactgaaatgaatttactcacacactctaaaacaaggatctatttatgacacatagtgtcataaatatgcttaaagtttctatagctaagaa

SEQ ID NO: 58614 - DNA, 614 bp, Homo sapiens
tgggaggctgaggtgggaggatcatttgagcctgggagtttgagactgcagtgagctctgattgcaccactgcactccagcttgggcaatagagggagatcctgtctcttaaaaagaaaaaaaaaaggaaagaaacaaattcagtactgaaaaatcccagcaaacgatgtgtatcaggtagagcccaaggtcaggagtccaggtggctggtgtggcctgcctgcctgcactgcccctttctctcttgccaggcagagcatgggggctggccacatgacctttgagcagccccaggcatcaagctggagctggcagtaagggcaggagcagcctcctatcctgttgtatcatgtagactttggccaccagaagaaattgctccatgtctttccttctacagatatacctgtccacatgcacacacacacacaagtatacacatacacacctgtccacatgcacacagagatgtccacatgtgcacacccatgcccacacagatgtccacatgtccacacagatgtccacatgtgcacacccatgcccacatgcacacacagatgtccacatgcacacacacatatgcccacatgcacacaggcacacacacccac

SEQ ID NO: 58615 - DNA, 566 bp, Homo sapiens
gacagggtctggcatgtattagttgcttagtaaatgctagacgagtgaacaaatggataaaacactgatgtgtccactactcaagtgcacaccatttatgtcatgaaagttgatattaatgagtgataaactaaaaaataaaagtagtcactgctttttgtttattgtcccgtagtttcctagggctgccaggtcagatgaccacaaactgtaggtggcttaaaacaacagaaatgtgttgtctcacagttctggaggccagatgtccagagccagggtgtcagcagagctgtgctccctctgactcaggtggactctttcttggcctctccccagccccgggcttgccagcagtccctggcgtgccttggcttgcagcagcctcactcggatcgctgcccccatcatcacatgacgttctccccattctgtgtgtccagattttccttttttttttttttttttttttttttgagacagagtcttgctctgtcgcccaggctggagtgcaatggcatggtctcagctcactgcaaactctgcctcccagattcaagggagtctcc

SEQ ID NO: 58616 - DNA, 803 bp, Homo sapiens
ttggggtaatagttgaacagctgaagcatttttgtacagaagggcccctaatatgattactatagcaggttatagcagatatgaaagaattccaaggaaggagagagaagacgcctttctggaagaggtatgctttaaaattgagaaatgtttaggtaaggagagaggcaccgaagacattgtgctaaatgtaaacaaagaaccttgatttatataaataaagtgaactcggtttttcttggacagtttattattttcttcttgtctaaggatgtctgttccatgacttttgaaacagattttgttccaatgtggaatatacctagtaggaataggtatgtcttgaaacaaggtagagctaattaagttttcaattaagaatgtgtgctgtaatttttagttcaacaaatctaaccccagcaaatatttgcaatgctctgcgacaaggactgtagggacagagaatatgtgaatagtggatgagtaaacaaactgctgcagaaagtaaggggcagacgcgctttttccagctggccactggacaggctccaaggaagcagtggcgcctcagctgggaggaagggacaggatttcgatcgagtacatttagatgaatagagccgaatgacggggacgtgagagtctgttcaggaagggaccaggtgataggagataaggttggaaacgcagctgtgggccttgaatataggcttaggaatttctctctttatctgttaaatgtttacgctttttaagctggaggtaggaggatgagatctctgttttagagaacaatcactgat

SEQ ID NO: 58617 - DNA, 3557 bp, Homo sapiens
taaaagaaatctttcaacaaagactcaaaaaagaaacagcaaagtttggggaaagaattgtctgtctttaggtcaagcatttcctgataagtgactgaaggtctggctgccaggaatacactttgctgaccctaggaatggccaagtctcaaaacaaaatttgcctcttctgtatcttgaaagtgacctgttaggacctgatgtcaatttgacgaagaggtgatagaacatgaccaacgaggtgtctttggtggacatattcatgtaaaggaggcgagagccacagatttcagctaaacgctttttgccacttttgcaaaagaaaagctaattgttaacggccatgtgacattatagatcccagaaaaggaaagggtgggaggaagagagagaagttcaaggcagttcagggtcagaacaagctcagacatcctgtcattaacaaatgttccccaagctgaaagcaaaatactgcttacccgaaaaggagtgggtgaaaagtagggggagaacgagggaaaaaccacaggagagtcaatgtggcagtgtgggggtgacaggagggagggaatctggagctatccagctgagttggggagcaaaagcatcgggcatagcatcgggcacaaaaatgctgagaaaagcaactgcgacggagacagcactaggcaccctcctccccccattttcccctccccatcggtttgctgggtttcccaccttccctctacctccgctcttgaccaacactccggggtgtgacccgccagcaggaggctgccctgatctttgtctctacccgctcccacgcgcgggctcctcctcctcctccgcgctccccacccgcgcacagcgccagcgtctccaaggagctgcaggcgccgcgaccgccgcctcctcgcccacctcccgcggacccgcgccccttccttcccctcccgggcagcgtcgcctgcgcctccagctccacccccgccgaggggacctttgtgtctcgggggactttctgcctctttcccctcctccgcctcgcgaggagaccggcctcccccgcagaccaaagcggcagcgagcaccggaggcggcggcgtctatatctgtcggcgcctcctgggaagcagctcgcagacactcacaccccacccgagccccggaaatccccgggcgacccaaggtcctcgctggaccggagaggtgacaggcgcacgctagccccccgcgccgcgcctcctcgctcaacttcccgaccgggcctgagccacccgcgcccccagtagcccccgcccccgcctctgtcccacgcagcctcccggccccgcggccgacccgacaccaggggaaagcgcggcgcggacgccagccgccaactcaccagcaagagcggggaccgcgggtcccgaggcgaggcgaagagaggcgcggggggaagctgctccgcggacgcccgcggcgaccggatgcaagtccgggtctcagcggccggcagacgtgaggcgcttccgagcgcaggcctccgccgccacagccgccttccggctctcgccgcgggtccggagcctcgggaggggccgcgggtgtctcacgcgttgccaagtccctcggtcaacatggctcccgcgccgacgagccgcgcggacggcccactaatcccctcggagcagccgggcgcgagcgcggcgggcgccgacggcgggctgagactgtctggccgggcgctggctccttctccgcggctctgcggcggcccgcggggagctcaggagactgcgggcggccgcgttcgctccttgcgtgtgcgtcgctttcacactcggcggctgcggattgacgcctccgcctgttccccggaggagagcgagtgcaagagaaaaaacacttttattgaaacgatccaaccagcggcggcggagaaaagcgaccggccgcgggagcttaccccacccccgcctgagcggctcgccgggggcagcgcgacccctgccggcggcggcggaggcgggggcggggccggcggccgggggcggggcctgcagggcggggcgggtgtccccgggaaactgcccgctccgaaatgcgggcgtcgggggagcggcggagggggccaggggaccccaccggaatgagtgcctgtccgcagcgactgggggagaaattatgtgaataattcagcccctccaacatccccctgcccctcaacttcccgctaccaaaccaaaactcgtgcttcagttatacaagtaattactgtacaaggtgtccatgccacagttctccactgactttctagagagtccatgtcaaaggacccacactgaaagatgttgatggctgcaacttttctcctttgttgtgtgtgggtacgtgggtactagtgccgcagtctctcacacacacggcatctattcatttaaactacagtacagtgttttgtatatattatcatgtgcccggcaatatgctgagtcctctaaggacggagagtctagctgggatgaaagatgatcaataactatcataaaaatctgaacgttatgagcggagaaatacaaggtgctatgaaaacagaaaggactactgttgcacgggttaggttttgttttcttgggggaggcgggccgcgagaggttggcccagtttctgcaactgtttttactttctcctttcccagaggctaaaagctagttcaggaatgaacagcagagtggcagtgaagacaaactaaagtaatactgacccacttttttccactaataaggataaaagcataaagttaaaacaaacttaaacccctagagggagataatgagaggattgaaagaagagagtagggaccggatgtagacaacataaacaagaaaaaaaaacccacataaaagtcctgtgaagtgagataaattttttttcccatgttaacacccggaagtagaagctgctttgaagtttcaaatcacattatgtgctaagaacttcggggaattatctttttggatttagggatgaatcctttcccccttaaaaatgctgcatgctgacatctttctcttattttgtttggcaaagttaaatgcatctacagttatatccaacgatcgtacgtgtcaatcaggcttttcccatgcctctaaaattaccaggacccgtaaattagcaacaattatgctctacgcgtatttaacacttgtttaccaaccaagaatgcaaatatacataacaagctttccgttagaacaagtgcgctttgtttaaaagcactgttaatgaggctttttagatttgtccaagtcaaacttggaactttataatatagcaagatgtagcatcattttcagagttctttttaagttaaagagaaacactgatatttatacaaggcctatttatatgaaaggattttcatatacttgcctcatctaaattagtactttagtaaatatcaaaaaatcaccaaaaaagggagtctatgaaatggcattctgagtttcagcattaatacttataccttcatatcattagattaacattactccatgagaaataaaaagattattctgtctcat

SEQ ID NO: 58618 - DNA, 682 bp, Homo sapiens
ccaacatggataaagagtatagtctggatttgtgaccttaaatttttggctctaatattcgccagcgctctgctcagaacattctctgttcgcatttcatacagcggtgccagcgcacaaccaggcaacgccctcaggagcatcattgttttctggacctggttctttctcgctctgccctccaggggccgctgtgtttctcggaatgcgcgcgggatgcccggttgccacgagaccgtcgccaggcaaccgcgtgtacacatactccaggcgggccggggcgcgtcaatatggcggcgcagggctccccctcgagctctccgtcagacgactctaccacctcggggtctctgccagaactgccgccgacctccaccgcgacttcgaggtcgcccccagagtcgaaggggagctcccggagctcgctgcttcagtggacctgccccgaggactcattgcccctagccgtgttttatgggccgctggacgcgaaaaacccgctcctggcctcttgtgagaaggagatccaggagttgttaggctttatgaggaaaaagaaggctttagccaccacggaggaagagaagcacgaattccgccggcgttggtaagcgctggcggggcactggggagggcgccggccagaggagggacccctggaaagggctggaggatgcaggtg

SEQ ID NO: 58619 - DNA, 1066 bp, Homo sapiens
taattattattacagtatttagtctgatacccttcctattttacatgttttgatttttctcttagaaaaaaataaatgagtacataaaaattttaataaggcacagtaaccaaaaaagtgttgctttttaattttgtagttgagatttcccagaggtgagacattcctgaacagccaggcagctggctgtggatgggcaggagggtggccgggttaacagagggtgtggtaggcacacaacaggaaatgctgaatcatcgtgttcctaccttatacaaaggagcccagacaccacttcctgttgtttttcatatggctggccttgcccagtggtcaaccttcagggctcttggccttgcagctctgttgcttgcttcagtgccctgtttattaaactctttcaactctttcttaatgttttgctgtatgtaattataacagtcattccatacataccctgtttcttgctcagtattgtattccagaatgagtttgtgtccttcttttagttctacctgaatgtctagggcttggaatgctgtggaccggtggacttggtttgctgagaccacagcatggctgggttttccattaatgatcatgtgagtttcccccttaaactctggcctaggtccagattattctaagttatgtgaacgtcagacaatgggatcttaggccagccgtgggcagtgttcagtgttttctcaatcttcagtttctcaacttcatttttcccctctctgttttctggactttaatcctcttggtctgggagacaaatttaccaaatagaggatatgagtggtggaacttcataatgaagaactaagatctattttcttctgccaaaactagagaataaccatagttccacataaatggaccatgggtcttagaaacttgaaaatacagggcttggtaagctacagaaaagaaacctgggtgagattcaacttggaagctttattcatgtaagtggaataagagttttgacaagaattacaagatagccccctttccatccttacacttttcagtataagaagctggtaatacaaataaa

SEQ ID NO: 58620 - DNA, 1220 bp, Homo sapiens
gtttgctaatttgcagatctactgaaatttatttgtagcctgaaaatcaacactcttggcactctgttggctattcgtgaacacacgcagagcacagaaaaatttgagctgctcaatgcacgtattcccagctgagttgaacaaggagatgctctgactttttgttgccactctcatactgtaaacaagtgtccttttcacggtctatttagtaccatgctttttgaatttttgtcaatatttacaatgaccctccagcatagtgctgaagtgctgtggagcatttctaagttaagagggctgtggtgtcccttatggagaagctatgtgtgttagataagcttccttcagaagtgagtgctattggctgtgagttcaaggttagcaaattaacagtatatattaaatatactgttatatatccttagccataaacacacattaaacaaggaggctgtgtattgagcagttaatgaaaatgttgtgaccagaggctctcgggtacttttctccatgtctcccctaggagcaatggctcagtatccagtaatcagtgtttgcaagaactttatagaacataactactgtgaatagtaagcaccagctgtgcacacaagaaaaggtcactgtcatgcatgctgacgcttgctttcactttccttttcgttttctgttgcctttttcctttttgctgaactctcttctctggtaattagataccaagttcctttttggtcttccattcattgttacttttcagtacatgaaaaatatttgctaaagaagaaagagacagtatttgtattatttctgaactcacgtgatgtatggtatcctttccttagtcgatgttactgatggaagctgaggacaggctaaacttccttctgtccgaggtggaacagaagaccctgtctcagtgctccgctggcgagctggagattgtggtggaggcccggcttcagctggctgcagttgctctgcagaggcaccgggcggcatacaggtgcgtctctccatgcacaggggagggatacctttgaagagagttccttcaccctagtttattaaatagacttaaattttatgtaagttttagaaattcctatatccatagtatgcttgctttttattattcagggaagttttcatacatgatttcacttaaaattatagctctggctgggtgtggtggctcatgcctgtaatcccagcacttt

SEQ ID NO: 58621 - DNA, 1058 bp, Homo sapiens
attatgggtcttcgtgcatcttatacctttcattatcatagtttcactttccatttaagcatctaataacgtcagcttcctatagtgcattgtaagctccacaaggccaaggaccacgagaattcactgtacccctgtatccccaggctaaaccatcactgtacactcaagagtctagcacagtgcctggcacacagtaaacagcaagtgaatgacaagcagttggcagtggccggagctccgtcgctggggcgtggagagggccgccccggcccgcagttcccgccctgacactgggataacttcccccgcggctgcccagcgccgccctgaccagaccctctgtaccccgacttctgtccggccagaagccacagccgcacgcagcgcctcgccccgtgacgtcactcggggcgggacttccggccgccgaagtttaacagtccaggcgggagccggaagcccagcgcggagccggccgcggccccctgttgtgttgctgcggagaggtgaggttccggaggccctgaggtcagcgggcccccgcccgccgcgtccgcgcaccctcccgatcctaagacccgctccgtccccctcagagggcggggcggcggtccttgggctttgcgcgcccggagcggttgctgggcgggggcgcggcggcgcgctgggctgggaagtgtccggggaggcgcgggccggggtcgcgcacctcccggagccttgtggggtgtgctgcctccgaaaagtttgcctcgtctccacaagtctgtctccttttttgtcaacctcaagtacttttcttttggcaggtacttggatgcattttacaggttagcctcacttgagctgttgtcctgcaagtaaagtgtatttttggtgattgaaagttggagaactttcatttcagctgagtggtgtagttgaattggttcctgtagccgctgtccctaaacccaggccgacgttaccgccttgtgtcctgactgctagctttcgacgggaccgtctttgagggactcatgtaaagtctctcccttaatgctcagttcttagaa

SEQ ID NO: 58622 - DNA, 3018 bp, Homo sapiens
ccttccataaaagagactctgaaacatatgataattcagagatggaagtcagtgataccaggcctttttacctttttcttcacctttattccttatcaagaagaatgcaaaataaatcggttggttcaaggtaataaggtttgcccttatagttcattgtttcattccattaactttttttctctttcatctgtttaactggacattaaaaaatctttttttaatgataacaaacattctgagagtatgttttagcagggaatacataagcaatcttattggtagtccaaaattaggttacacaatgagggctcaataaatgttgatgacttaattgcttgcttaattaagctcgaagttcttatagtgacccccaaggctcacatggtctgcattcaccccatgtttctgacctcatctcttaccactctccccattgctgactttagggtatttcataaacacaccaagtgtacttctacttcagagcctttgaaattgtttccttgacctagaatacccttcctggatatttacatgtccactagctcactgactcaaatctctgctccaaaatctctgatcaatgagccttgccctgactgtgactataaaatcacaagtctcctcctcttccaaactcctaccaccttgctttttttccatagtacttttcgtcatctgatatactacatatttacctgtttctttatttgtttatagtcttacctcactagctctgggggagctggaagagaaatcttcctctttatttgctactttgtccccagagcctagaattatgtttgcacatagtagaaattcaaatatttgttaaaagaagtaatacatatatggtacttcctggcattattgtgtcaagataccaccattatatgtcatgacaacaaagaatcacttacatttctcaccgagttcaccatgcttcaaccattatcttcttgtgagacacatagttttgcttttctagttttccctcttataaataatgcagagatggatctttctttgcccatcaacttttatctctatttttccttagaataaattcttagtagtgaagttaccaatttagaaattaatgagcattttgtggctctttataactatcatcaaattgttttccaggaatgttgtaccaatctacactcctagcagaagtaaatgtcagaaaatttttgtttaccttcttttctttatcagtgttatgctgtttcgcacaaagttaacgagattcccttgctgtctccattccttttttttgttccctctgggagtgtctgtcaaaatgtgctgtttctatttactttttcaactttgatcttaaatttctggaatgaaagcaatcattttagaaatggaaagaaaccataaattatatatttcaatcccccattccacatatgaggagatggagttcacactgctgactactaacaaggccaggagtgagagacacaggactttggtgactcacgtcagcacctgcaaatatttgaaaaccatgagtcaccaaataggaatcaaagtacaccatgctaactcttaaataccagtgtctacctgttccttgttaaaattaaggtcaaaatgtccacaagagtatctctcgatgttgagagattagctctgtttgtggtgtgtatgaaataactttgaagttgcactacctgttctacttactatgttagcttgttccagaatcttttgtttatctaagactcttgcacaatctggctccttcatatttgtcttttttttttgtgaatttcataaaattataaggtaaccaagaaatgagcagcatttgttaaatttctttgaataaaagtaaaacaatcagatagttggtattcctactaaagagaaaggccttgggcttttacagagcgatcaacaaatcgtcatttggagactttgtggaaatggcgattcacaccagcatgtacatttgtataagcctttggagacatccacatctatcttcacagataagcacatatagtctctcatttatctgtagagaaatatacattaatgaagaacttagaattatatgttgcctttcctttgaaatcttcaagactagtcctatggttttcttccacattaaaaaagccttaataagatgtttttcagctatgatgttcttacattactcatgaatttaattgttagaggaatgccatagatcaaatggtagttaatatccatagtaaagaagaactgtttattcccagattttgaaggatgaatcagttgagagtttaaataggatactgtgttctgataaaaattagtagtatatgaaaatatgtcttaactggagactactctaaatgcaggatgtctgcaatttctatttatgaagaatacactgttatttacaaataggctttaatgtctctaaagaaaatgtaatagcctagataaaataaacagatgacttaagttgacaggagaaatccaaaaggaatgataatgaataaatttaacagatgcttactatggttgtatgtgtagatgtgtacatgtgagcatacccatttgtttcaggagcacaaatttctattaaattcaaggaccaagaggcaggaggctcgaaagaaaaccaggctttaagcaaatactgcacatgcttttgcaaatattattttcatctgaaatatatacctcttggttatggccccctcctatccagattatagaaaataatttcagtaaatatttttctcaatttcaccaaattcaagtttttaaagccaatgagaccccccaccatctgtcagcagttgtagcctctcaaatctagaaaacaactttgtcttaagatgtttatggctttcctgcctctcactccatttctgcactatcttcctctgtgagacaccttggaactaagaacacaataatccactaatagccgtttagataccctgtcttttacataaattttcttgattaattctctcaacaatctcactaggaagttattgc

SEQ ID NO: 58623 - DNA, 1089 bp, Homo sapiens
acagaacattttccattctgatcctccttggctagctgagcagggctcagtatctcctgaaccatggttgagaggcaaaaccccatttctcttgataggtataaaatagaaacccacacctctatctttgaggggatacaaatacctttcctattcctacataaacaaaccaaggggtttcccttaaggggtgaggacaagtcaactctaaagcttttctgttactttcctcaattttcagctactttgctaaataaatgtctccttcccttcacgtacaaaacttcttcagagacttgtcatcacgtgtgaccttggagaagttatttaacctcgccaaagaggaatggtaaaacctctctatagaggatgtttctcatacagttgttgtagagagtaaattaggtatgacttaaaatagtgcctgaaatatagtaaatgttatacaagtgtaagctaatactattatgattataaccatcatcattattatcttacttcctccttgctctcagttcactctaatttgccttataacccatgactcatctctgtaaatagctgctgctaaggtcaccaataacctccatgtagctaaatctaatgaactatttaaatcctcatttactgatttctccatagcaatctatgctgttgatcagtggctttaaatatatatattctcttttgtgtcattttggcctctatgacacaacaattttctgttttctcttatctctctagctacagcttcatttctttagcaggtttttccatttttgcccaaacatttcatctgaagttacttaagatttcaggtattttcctgggcctagatctcttcctcttctttctctgggaaatctcctccaggtccatggagtcaataacttcttccctgatctcttctgaattccaaatccatatatctaagttcttctagacactgccactagaatggttcaaaggtatatcacttgcaacaagttcaaaaccgattagttatcttctgccctaaacctgggcctcctacacgttttcttatcttagtggtttataccatttgggtaaagcagaagtctaggaaca

SEQ ID NO: 58624 - DNA, 1014 bp, Homo sapiens
gttatattttatcttgtgtgcaatagagagccacttaagattcagagacagagagaactgtgatcagctttggttctcgggaggatctctctagctgcagggtgggagaataagataagatgggggcagagagacgcgtcaggaggctgacacagtaatccgggagagaatttatcaggacccaaactacagtggtagtgatggagatggagactacagggggcagattagaaagctattaaggaggactattaagaaggagtttgcaaccaatcgaacataggcagggaaggaggagatagagttgagagtaatgtttaggcttccttgggttcctgcatggatggcattacattccatgagataacacatttcctatcggcagtgctaattaaaaatagctgggcacactcctggatcctggatattttaagtagaagggatccatagccttctgtagctgaaagctttcccctctatgcaagagattaggtactggggcctttttcttccacgggaggcttcagctaggtggcccttatgttggcccaccctcccctctggacttagctcttttataacacagatcagatggtgctataattgtctcttaactgttttccccaccagactgtgagtaccttttgagcagaaactgtgttttatgaatcattactcattactcaggcattcaagaactcaacaatgtgtgcaacattcctaatgtttactatgtgtcaggctctgctttattgtatgctaaggacctatgtgcctggcacataggagaccctcaaaaaatgttcgatgaattaaattcagcccaacatatgatttagttggctactactcaaagattttcactctaatgtgagaaaatatcaaaatgtaagcttttgcaacacattcaaatgtactcctcctttcagtacaagctaaactttcttctttactcagtgccaccactagactcttgtcataaaggtttaagtttttcacctgtcttgttttatt

SEQ ID NO: 58625 - DNA, 547 bp, Homo sapiens
taatttgtattcattggtttattcctttatttattcattcaacaaatacacatggggcttccactgcatccaaccaccatgcaatcatgtgagtccatgaggatatctttagccaccaggctgtgagctgaaatgacatgtgtcatttctgggccaaaggttttaattgctggtgcaagactctccagagctctcttactctgctgggtgacgaaaggttcacacatctcagatggttcagttaaaagatcagggggactattagcctgggttctgagcgtagccctcactaacccacagtggatgtgtagtctgggtgaaaaacaaatttttgttgtgttaagccatgggattttgagattgatttgttattgcagcataacctcgtttatcttggctagctaatggagtagttaatgcctaactggtaatcatgattataaaagtttccatgtattaagttcatagcaaaaatcctggaatatagccattattatctgcattgcagagatgaggaaactgaagctcagaaggttaagtacgttac

SEQ ID NO: 58626 - DNA, 1386 bp, Homo sapiens
cttcccttgaataaagaaaaagttcaaagtctcaatgactttttatgtttctactctaattttatgcaaaaagaaaataatgagccgttgtcatgatcagaggttttaggtggtcttagttaagcagctttcccaaagcgacttatccccttccatttacttcacatcgaagaggaatcttcaacacatctcaagcagtttattctggcagcactctaaccagaggatagcagatgcaggccagtatcatgggcctcatacagtcagggggcagatgactgacagacaagtagggtcttcatccagagaccattctcagagtttggggggatccttcttcctctcttatacctgtatgcaattcaggtcagttaccagatgtttctttcataaagggagattaagttattcttgtaagggtaaactttgttctaaggattgtgaaagttgcatctgtgccaaggtgaccttgtctctgggaaatccctgggccagggttggaaatccctaggccaggttgtatcatacttctaagtgacatatagtgttgaccctgtgagttgcttgaatgggccttatgactatcattgatcttatagtcatgatatatatcttacagtaaaccacagccattcatatataaattttaaatttattttactataggagtcatgaaattttatagcgaattagaaaaggtcatggaacctcaacattcagagccaaattctattctccaatcattggccaaagatcattcctagtctgtattatatataggatacactttcttcctctgtgaactcgaaatcctattaataaccatgccaattcctttccctctcccagtagctacagcttcaatagaaaaattccagacagttgtctgcacaagttcaaggtccaagagcctgggatgattcatgaagcattcaatcacagtttccacaacaggccattatctgtgttcctttcaatgagccacaggaataagaattgaggaatctcatttggaagaatggcattaaataacccttcaaaacattttgtatgcaatcaccattatcctaaattctagaaacatagaataagtaaaaaagatgcttttctcattatctctatagaggccatttgtgctgtatgatcatttcataagagtacacattgcaaatgcatttaactactgctatcgctcctccattttgtgacggcagctgaactctgctcatactgacatccttcaggtgcttacagcctctctagttgtttggacctgtccatacaatttattgtagagttttatctctgccctcgagttactgctaccagtgagaatagctgaaaattttggctcaaaaacatggcaacaacatcatccttgactct

SEQ ID NO: 58627 - DNA, 490 bp, Homo sapiens
ttcctatctcactgtcactcatttcaatgctatttcatcacaattcttggtaaattctgtagatcagcgtctggccaggtaataaatattctaggctttgctggcacaaaaataaggatgttatgagagttacacaacagcagaaaactgccgccccaccctactcatcccatttgcccagaatgccaccattgtcaatttcatcatctgccccagggacccagattccagaacactctttcctcctagagagctcagccatctcagcttgggcagctgaccaaaggacgtgaagtgactcactggatcactgattccagggatgagatttcatagcttcatgcccagcagttgacagaagaggaagttctgatgggcaggtgatgaccagcatgagtcttggggagtggtgaattatggccaccagccaggaggctggcactaagagtggaagtgggcatgggattgggagatgcactggcttgtctct

SEQ ID NO: 58628 - DNA, 1231 bp, Homo sapiens
acatggtaaagcttaaagttgcggaaatcattatcctcagtcaagctaaagcctaggtatccagacctctctttcacctaatttatttgcaattaatccaaagttctaggccaggcacagtgactcacacctgtaaacccagtcctttgggaggcggaagcatggaggatcacccgaggccaggaattcaaggctgcagtgagctaagattgcaccactgctctcccgcctgggtgacagagcaagaccctgtctctaaaagaaatttttaaaacaaataacaaagtactggtttatgctgtatttataaaacaacatatgtagtaagattttcttagttttagaacccagaaagctgtgccaaatgctttgagagttgacttatttcctattaggttttttaaatacttgcagtccagatactgcttttaattttttaaaaaacagtatccatacttacaggctctgattaagtttcaaagactaagcctgccatgcttgtcggtgtgtgattccttcctctaagattccagacattcccgtctccaggcatcactgtgtcgggggagcgctgtgtgaaaatggctgtgatctttgtgcggtttgtccggttatacctcactgggacaccagagggcgcaaggagggccagcacttgtttttctttaaatctcgaatcaaagtccatgcagagaacaacaaaagacccggaacacaggggccttgagacaaagggactcaggggaaaaggctgcacgccctgttttactgaagtggaatttgcttcttcaccctcctcacctcctcacctcctccccaccttaaggaactagaaataaacaacttaagctgcaaaataatgaaatctggctaacaaggaaaaccaaactagaatacattactcaacatgtcataggctaagaggactatcacaaatgtacatttgagctatttgctttgcctaatattaataactttaaagaaaattttattgtttgcttttctgagttcaatatatgcacatagtagaaaatttagaaaaggtggaatagcaaaaagaacagcgatcatcaacacactcttaacccagatataactacttttaatatcttcagctacttctttccagatgttttcttctttctttcttccttttttttttttttttttttgagacggagtctcactctgtccccatgctggagtataatggcgcgatctaggctcactg

SEQ ID NO: 58629 - DNA, 682 bp, Homo sapiens
gaccagcctggtcaacatggtgaaaccctatccctattaaaaatacaaaaattagccaggcatggtggcccgcacctgtagtcccagctaatcgggcagctgaggcatgaaaattgcttgaacttgggaggcgcaggttgcagtgagccaaggtcacaccactgcactccagcctgggtgacagagtgagacgggtctcaaaaaaaaaaaaaaaatccaaagaaaagaagtagaaactgttccatcccaccccaaacaggctgaataatttgtccttctgggtagcctgaggactgaatgccaaagggccagggggtgtgggtcaccaggaccctttgttcctcacactggggctagtgtttgcctcaaagctagacagatcagtaaagctattaaccgggataggtcagcaggtggtcagtagggcaggaaaaaagtcaggaaaacggaggtcactgatctcctgttgggttggggccaatgttggcaggcaggttccttaaaggacaggaagcttaggccagcccaggaacagataactctaaggaaagtgatggcaagatctgaggccctgaaaacctctgagggacacctaatcactaagcccacagattccttaatttacagcaacagataaaggtgatgttctcggccacaggaatttagttaaatcactggagct

SEQ ID NO: 58630 - DNA, 2453 bp, Homo sapiens
taagagaggatttgaaatattcccagcacaaagaaataataaatgttgcaggtgacggatatgctgaatgtcctgatttaatcattacacattgtatgcatgtattaaaatatcacatgcactccataaatatgtataattactatgtatcaattttcttaatgttaaaaaaatccaacaaccctgaagtgggtccccgtttccctaattataaaagccaaagtctttccaatgacctctaaggccctcaggcctcccagacagctgcatgactacatctcttacttccttcaactatgttcaaattatacctttggccaggcgcggtggctcatgcctgtaatcccagcactttgagagaccgaggtgggtagattacttgaggccaggagttcgatactagcctggccaacatggtgaaaccccatctctaccaaaaattagccgggtgtggtggcacagctactcaggaggctgtggcacagctactcaggaggctgtggcacaagatcgcttgaacccgggaggccaaggttgcagtgagccaagttctcaccactgccctccagcctgggtgacagagcaaaactccctctcatgaggcttaccttgacctatttaacttgctactctccaaacccccttactctgctatttttatttctgctcttataactgtctgacatacttatgtatgatgtttgtatccatttatcgtattcattgtttattatctgtatttcttctgtaggataaaagatctagaagaacaagatgtatttatgagaacctccccatgcatctaaaagaatgtctggcacgttgcaggttcaataagttaatgaataactacagtgtctgccaagtaattaaagattagcaaatattaatataggaacaagggtgacacatatgttgatactagttataaagtttttctctccatagcatgtacttatttgttaatatacatgtatatggaactgtgcaggtagggtgaaaactggtttttgcagtcagagcttgggtgattcctggcctttcaccacctcctatctgtgtgatcctgcagaagattcccaaataggaataaaaacacttgtcccattgacctaacaggttgttgagaaaataaaatgaatgtgaatcatttagcaagctgagatatgcagcatagttctttaggaagagcaggatttgaaactttgaataacactcattgtcatcatgccatttattcccgaagagagttccatgccctctgtactgccagtcagattttaacctttatttttgcccagtgctgacagggaggaacctctgagctccctcaccctgttcaggttaattgccctctcttttcctttccattttcggatgatggacagcaagtgctgcgttccctgctccctgatctcactgactcagactgcctcttactttcaccagggatgaaaaaggagcagtaacaacacgtgtgtgagcactggcatagctttacgagagcttcagtggaaaggatgtctcttctaaaggaagagatgaagctgcttttcccgagagtgcagaacacggggcaaacagttgattcaggagaactgggttcactgccccatagctctacgaactgagagacttggggaagtcccttcgattttactaggaaaaggacgtcatcatagctatcacagtgccctttggccctggcaaaagtttttggaggatcaaagtggaaggaggctcccacacactgagagtttgtattgaggctttcggtgtagttaagagtgaaacaggggccgggcgcggtggctcacgcctgtaatcccagcactttgggaggccgaggcgggtgaatcacctgaggtcaggagttctagatcagcctgaccaacatggtgaaactgtctctactagaaatacaaaattagctggctgtggtggcacatgcctgtaatccagctacttgggagactgaggcaggagaatcgcttgaactcgggaggcagacgttgcagtgagccaagattgtgccattgcactccaacctgggcaacaagagcaaaactgcgtctcaaaaaaagaaaagagagagagagtgaaaaagggctgagcgcggccgcttgaggccgaggcgggtggatcacttgaggtcaggagtttgagaccagcctgactaacatggtgaaacccccgactctactaaaaatacaaaagggagtggtggcgtgcgcctgtagttccagctactcgggaggctaaggcagaggaatcgcccgaacccagaaggcggaggttgcagtgagccgagagcgtgccactgcactcctgcctgggcgacagagcaagactccgtctcaaataataataataataatgagagcaaaaaagaaagaaaagccaaaacaagcctcagaaactgccatttgtttaatatctgcattaaaaaaatt

SEQ ID NO: 58631 - DNA, 1670 bp, Homo sapiens
ccagccactcgagaggctgaggcgggagaatcacttgagccttggaggtggaggttgtagtgagcccagatcgcaacactgcactccagcctaggggacagagcgagacttcctctcaaaaaaaaaagacttatgaattgtttgaagaggcacgagaccgtggcaaccctaactgtccccgacatctggcagccatatgctatccttgaacttgaacttcagagtgaaagtataaatttgtaaggggaaggctcagccgcaagtcacataccagtggtcagttaaaaaaaaaaaactcaggacggcaacctaaatcatttagaacgcgtcaagagcctcggaaaaactattttcacacacttctctagcactaacatgggaagcgcgtttccttcacatattccacaccttttattcttcccaccaacatcaagaatacaaagcgcccagagaggacaataagcctaagcagcggctccaagagaccggactttcgtacttcccgggggcaggcggaaggttacggagcgctggaaggatcttactgctccttgaagggctgtctgagaaaatacacagcctaacgactcctcgttagtatagtggttagtatccccgcctgtcacgcgggagaccggggttcaattccccgacggggaggtgtgtagctgcacttttttggcgacagttattattttctgtatcattcaatgacaggacactgctgttaaacataatatgctaaaccagctcccttaagtgcacaaccctgtcttcaaaatggtgacttttaaccttaatgcccaccatgaagtgaaagcctcccctgagagaaaatgccttacattgtttgcaggaagggaggaaagggaaaaagaaaacgctctgaaggcctctgcccttgcctccagccgccatcttgcgaaggcctgcgccggcttagtggcgccccgccagattacaactcgaggtcgcgaactcagcgcgcggaacctgttgggggaggggagagagggcggagtctcgcgactaacggggcgggggcagggcgggtaagaacggaaatcatttggtaaagaaaaggaagggccaatttcctttgatcctggagacccgactaaacgggaagccccgttctcccgcttccgctggttacgtcccagccttggttagaggactagcagtcaggaaagtttggacgctgaaggaatcggtctcctggtccgacagatactgggtggaggggcagagagtaaatggaagagaaagactggtacccctggaagaaacgccatttactggtgtcctaagaaactgcgcgagccacagcccagcaggacctcgtggcgcaacggtagcgcgtctgactccagatcagaaggctgcgtgttcgaatcacgtcggggtcaaactttttttttttcctcctgtattttaaactaccgactactagaagccgaggtgtattcctgccgccaattttcttgaatgttagaattaagttttcctctttcaggtattatgatactaatccttggtttgcaggaagatatgatttactctatatcgaagagcctcaaggctgatgtttttatcatttggccttttaaagtgagtttttttgtcacttaacatgcataatgtgtaaagaggtggactattactgctgt

SEQ ID NO: 58632 - DNA, 2046 bp, Homo sapiens
tgttattttaaattgaccattgagggggttcccaagggttctccttcgttttgttatcaaacgttaggtttaggattcttgcgggtggtgggatccaaagccagagacggtttcaacaaaaatgcaagcgcgaatttgtcttgcgtctgaacgcactgttcaaattaaacaatttagacatgccccaactatgacactaagaagtgaatggtatagtacacttttgtcacaaattcaagggtaatttaagtgcccgattgtagaggtctggcttcccctgggtttctggaacaaaagaagcgttcgcgaggagaggggtaactccccgccctccccctcccaaagtaaatcaaatcaaggaatatgagtgcctgcagacaagcctcgcttcttttcttccccttcagggctagcgtttggggaaggcaaggctgcggctactcttggagcttcagtgtcccgggaggaagaaaggcccagccaagggtcctcacactggcgtggaattcggcgcgttcgtaggcgatcgaccccagagacgaaagctgcttctcaagctgggggagggagaggaaacggcgcacaaaagcagtacgacctgtcccttatcggcgtctaaggggaagggtggagaaaacgaaaacagaagcgggccgggagcctcggctcccgccccagcgccttttaaactgcgtttctacctcctctcgctcagcgcggcggctaatggaacccgcgcgagccgtctcgccaatcaccgccgcgcttcctcccgtcgcccgccaatggcggcgcgcgttcttggggcgtgggcgaagcaggctgctcgcctcctgcctgtagtgtgtgggctggggttggtgcgagcttccagcttggccgcagttggttcgtagttcggctctggggtcttttgtgtccgggtctggcttggctttgtgtccgcgagtttttgttccgctccgcagcgctcttcccgggcaggagccgtgaggctcggaggcggcagcgcggtccccggccaggagcaagcgcgccggcgtgagcggcggcggcaaaggctgtggggagggggcttcgcagatccccgagatgccggagttcctggaagacccctcggtcctgacaaaagacaagttgaagagtgagttggtcgccaacaatgtgacgctgccggccggggagcagcgcaaagacgtgtacgtccagctctacctgcagcacctcacggctcgcaaccggccgccgctccccgccggcaccaacagcaaggggcccccggacttctccagtgacgaagagcgcgagcccaccccggtcctcggctctggggccgccgccgcgggccggagccgagcagccgtcggcagggtaaggacgcggggccggggctacaaaggcgggcgtttggcggttgccgcgcgcgctcgccgccgtttgcagcccctccctcccgggcgccccctcgggcctcccaggtgcggggctgtccctgcgccccctcgcgtcgccccttccccgcggggctgcaggcgccggagcggagaggccagaagttggggccgcggggttcgcgttctttgacgtgtgggtctgggaggtgtggagttgcgttggcggcggttgttttgcacgcagtcgacgccgcttccctggaccaccagccgcctgcagcgggcgtttagacggggacttccgtgccctttcgaaagctctggaggggtggccccaaaatgctataggttaagttcgagcgttttcccgctttattaactgaaatgactcgcagcagagtctcagagcgctccctggagggcaactgatgacactctaatttctaaccaaaatttgaaatgaggaaattcccgcctttttatacttttgcgtgtggagggctttttgaaccgtttatgttttctagtttgttttaatttttcccagcaacaggccatcttttggcggaacaggttcatgccgaattaaaaggagcattttaaactatatttttaggcgcctattataattttttagtttttatttatttat

SEQ ID NO: 58633 - DNA, 1810 bp, Homo sapiens
cacacccagctaatttttgttttgtttttgaaacggaatttcgctcttattacccaggctggagtgcaatggcatgatctcagcttactgcaacctccgcctcctgggttcaaacaatttgcctgcctcagcctcctgagcagctgggattacaggcgtgcatgccaccatgcccagttaatttttgtatttttactagagacgggtttcaccgtgttggccaggctggtctcaaacttctgacctcccaaagtgctggggttacaggcatgagccatcgcacctggcctaaaattgcttcttaaccatttagaaaatcttgaaaacaaggcatcttggaaaagggtcccctgaaaaacaattgttgtaaactaagctgttggcttctgcaggcttctaatacaatataaatactaaggtaaactgtaggacagataagtctattttaggctatgactctgtaacatggtgagtacaaagaatgtaactgctctctagtgacccttgaacttagaactggaaccatatctcaaataggtttctctaaggtaggcttggcagcattaaatcattcagaaaatatttatagaacattttggatacacatggctggcaccctaggggcaagagtccaccgatgagcaaaccagactcttgtagaacttaggatcttatgactaatgtaaaggaactaaatgctttctcagcctgagtaaatgggaccaattcaaccctgcagttcagaatgcctgaaatgaatagattcaataaggtgagttattcctgaagaaaggattaaggagtgcccaggttcctaaataacatcgccctataaaatgtaccagggcttcttggagaaatgactgatgctagggttagagcatgaaaagcacagataagcgagaaatatcttgcatcagaaagtaaggaaggccagaagccatggctcatacctgtaatcccagcactttgggaggctgaggcagtaggatcccttgagcccaggagtttgagaccagcctgggcaacatagcgagactcttgtttctataaaaatttttaaaaattaaaattaaaaataaatatataaatattttctaaaagaaagtaaagatatgctcaaaaagtaatgggacatgttaaaagtacacaggagccagctggcaggggctcccaaataggataatttgaacatcaaaacaaaagtaggctgggtgcggtgactcacacctgtagtccaaacagtttgggaggctgaggagagcagatcacttgaacccagaagttcaagactagcctgggcaacatggtgaaaccctgtctctacaaaaaatacaaaaataagctaggtgttgtggcatgcgcctgtagtcccagctatttgggaggctgtgatgagaggtttgcttgagcccataagtttgaggctgcagtgagctatgattccgccagtctgcagcactgcactccagcccaggtaagcccgtgtcaaaaaaaaaaaaaaaaaaaagccagcgaaacacctaactagtaatgtgttataatctagattccagagtccatatctatactgataacacatgaatgaatgaataaaaaggaaagctcattctttttgttttgttttgttttgagacagagtcttgctctgtcacccaggctggagtgcagtggtgtgatcttggcttgctgcaacctctacctcccaagttaaagtgatcctccccacctcagcctcctgagtagctgggactacaggtgtgtgccaccatgcctggataatttttgtatatttactagagatagggtt

SEQ ID NO: 58634 - DNA, 954 bp, Homo sapiens
gtttgaaattatttgaaaatttaaaaacaattataattagaggaggaagcacagggctgtattttatactgtagtttctgaatgaactctgaatgattacatccagatacttactacggccaccaggaaaaaacatgctagcctttggactaggtgtggctgtgatagacatgatcctgctaactactgctagaaaaaatggctttaactcaactaatccaaaaccaaaatcatattttatggatgactgttgcatttcactaccttataactaaaagttggatataatagttttgctcattgtttcctggtgaacctcattgttaccttctaagaatgtccaccaggaagctacacatagcttatgttatctagattcaaaatccattccaatgtatctattgagtgtggaggagactgttagtactatctgaaaatccatgtgctcctccatattttctcagtcctgtgtacctgggtggtgtcacaggattaattcttgccaaaagaacataaatggaagtgatgtgtcacttttactctgaggcagttgagtgcagatgtgccttcttgttccacctcttcccctttagctgaacctgtagaggtcatgtagaggtggcagaaccataaaatgaaagcagcttgaatccctgagtcaccgcttcagggagagttctctggaaaaccacctgatcagcaccaaaccttacaggagcaagaaatgttattgcattatttattgtgttatattgttaagattttaggttaattcgttcattcaagatagccatatcgacttaccattcctctttctcttccctcttattcctttttcttgtctttaaaaaacattattattactattattataattattttcttctcttcaggcagggcacggccagtgagacctgtaaggttggtaccaaggaggcacccagcagggttagg

SEQ ID NO: 58635 - DNA, 2879 bp, Homo sapiens
atcgccccactgcactccagcctgggcgacagagcaagactccatctcaaaagaaaaaaaaaaaaaatcaaaatgacagcagagcattaaatgaagtgtaaggccatgtgtgactgtaccagtgtgaacctatgaggccagtcccacccctatcttacatctagggaacaggtacacagagatgaagtaaattcccaaggttactttgtcaagagcttggaaaatataagagtcagaagtctaacaggttgaatccctattaaactctccccaactaaactacgcccctccctgttgagctgaatctaatgaaagcttcctaaatgtattaaccacacacacgcacaatctgctatcagtcactttcagtagttcatcgctgtaacatctcaggagttcaatgtttcaacgtgttctgtagattactgtgataacgcggcaagctgtcgtaagacttcttgctgcacatttctttttaaaatattctccaggagtctgatgaaaaatacagacatacctatgtttaatgtcaatggatggaacttattttaaaaagtactgtaatggcagaagttgtgacacaaagtactgcagtgatgttgtaactccaacacctaaatatattatcaagcattcgcgttttgttttgttttttaagtgactactagatactgtgattcacttaagtgaagcgaactgaagcccgtggtcaaggagagacacctgaaggtgaagggacaaagcgagcagggtaagagctcgagcccgacccctctcaaaaaatatagacccggaacgcgcgcctgcgcagaacgaatcctcccgcgcacaagccgggcggaagagctggggcgggcaggggcgggaataaggttgctaggagaacgcgatgacgctacgggctcggcgctcttctccaccaatgggcgacgcgtacttgcagtggcgcgctgtgtgcgtcacgccgacgacgcgcgaagggcacacatcttaggacccggaggacgtccggcctctgtgagccgcaacctttccaagggagtggttgtgtgatcgccatcttagggagtgagtgtggccgggccttctcctgtggcgggtgtggggagcggagcccagagctcctgtggggccgctgctttggcggtgggcccagccgggagcagcctctttcgaaggccgccgtgacctcttcaagggcgtggagacgggaaggaaaaggccccggttggggttccagggcgccggtaacgttaaccggcgccttgcctgtcctctaaccgtcgctccctcctcccctagaaagatgttctcgtccgtggcgcacctggcgcgggcgaaccccttcaacacgccacatctgcagctggtgcacgatggtctcggggacctccgcagcagctccccagggcccacgggccagccccgccgccctcgcaacctggcagccgccgccgtggaaggtgagatcagaccctgcccaatacagtcgtgtggtctacttgtgggccgcccagcctttgaggcctggacccggcttggaggacagggaaggacgagtccagcccgctgcaccgtaggacggcgcccagttgcttgccctggggtatcggccttttccaccataggcgggtgtcagatccttggccttccctcaagggcgtggaagcgctgaggccctgtgtcccttcgtgacctccgtgtgcccgagggaagagaggccgtgactagctctttctccgccgtgagctcgcttggtcagcaaactaagtactgggtaaactctcctcccgaaactactgaccacccacagttctactaactatattacctgtcctttgatttgcccttagttttcttaaaaatagtcctttcctaagttttatatttgtcgacgccaggtcagtcatttttgcacttaattgtatatgagataactagatgtcctgttttcgtgcgactggaggaggcagcttgcagccctacataggcaatagaaaggagataattggtgggcgtccctttggtgtgattatctcttgggattcttggtggttgggcccagctttaacttagttgtgtgtgttttaaatcctagtgaagtatgtacatacagagaaacctgaaaaccgaattgtaggagtcctaagaatgttatctaccttgtgcctgtaaaatcgaaagatttttttctttaaatcattcatgtgcttctgttgtctttagtatggatagagtccttatttacactatctgtcgttcagtttaaaagttaaagctaacattatttgtgtattaaatgtatttgactgcaggaatttgtgcgtatccgtttttatgttacaggagttcttaagtggggatagtattggttagtggctgggataaactttgaagttgtttgcaagccttttacatgtcgagtgatctttctgagtttcgtttgtactctgaagtgtgctcttaccagtggttaataatttgaagtttgactttaattgtaaaagccgttaatgtagaaaacttttaaaaaaattaatatggcagaatacgagctattaatagtatcagatacagaaccctcataatttttaaatgatctgaatttggcagtgaatttttttttaagccacttaattgtggccaaagctattcagctgtgataatagtatctcacagggaaacattttctttcattccagtggccttagtcatctctgaagaaatacttacttgatttttttttttccaatcaaacagagcagtatagctgtgactatggatctggcagattctttatcctttgtggacttggaggaattattagctgtggcacaacacatacagcattggttcctctagatctggttaaatgcaga

SEQ ID NO: 58636 - DNA, 2491 bp, Homo sapiens
cctcggtctccaaacataatgatctgttttaaggttgcaagtatttccattaggtatttatggggtgagtagggtggggcagatgtgtcccggaatggggcacagcggacaggaagtaacggtttataacaacgtgaacgcttctgacgtgtagcgggagcttcagaaagcgtggccgaatctgcagctcttaacaaatggctcgttcccaaaccttagcctcaactccttctgagcgataggggcatgctaccagcacggggggaaatgagatacaagaaacgcccgaaagggaaaaacaaggctgggctgtttccttcctttggggtcaagacagaggcacagaaggcccaggtctgggaggttggatcacctccggctggatgttgagccgggtgggagcccaaacagcagggggcccacaggaggccggcccaggcagcctcgcgtccacttaccaggccaggcccaggcacgtccccagcgacagcaggctcaggcacgttcgggggtctgcccagcccccgcctccgctgctccgggccacgggggtcttcccgccctcgctccgcttcccgggctccgcagcaggggctcccttgggccccgacttcttccggctcttcacctcagacatgtctggagaccctaggacgacaagcccagggcagcttcttcaccagggggagcaggacgtggccgccttggcgttcgtgggaaccctgggcggtgaccgcgccccctcacagacttggcaccgcccagagcccagccccttccctctccccggcatcctcgttgcttcactgagtctttcagctgccagctccatagttcccctaggagaggtgggcggcgacctcaacccacagcgccttccactgcgatattgctccaaatccgaggaaattcaaactcccgggcgcgcgcaggccgacgggacccgaggaggaggggcaggacgaaggggtcgcgcgcgccacgtcgggcgcgccgccgctgcccgagtccggcattggtgggaacgcggcgcgtccctgaggcttagccacgccccgtccgcggggtaggcgggcacttctacgcgcgcgggcatgagccgtggcaggagtgcgcggcggcagcggtggccgccccttggggcttggggtgtgtttatttgcataagcgggcgcgcgccgtccgggctgggtggatccggcgggatttgactgctccgctgtccagaggcggagaagaagaggtagcgagtggacgtgactgctctatcccgggcaaaagggatagaaccagaggtggggagtctgggcagtcggcgacccgcgaagacttgaggtgccgcagcggcatccggagtagcgccgggctccctccggggtgcagccgccgtcgggggaagggcgccacaggccgggaagacctcctccctttgtgtccagtagtggggtccaccggagggcggcccgtgggccgggcctcaccgcggcgctccgggactgtggggtcaggctgcgttgggtggacgcccacctcgccaaccttcggaggtccctgggggtcttcgtgcgccccggggctgcagagatccaggggaggcgcctgtgaggcccggacctgccccggggcgaagggtatgtggcgagacagagccctgcacccctaattcccggtggaaaactcctgttgccgtttccctccaccggcctggagtctcccagtcttgtcccggcagtgccgccctccccactaagacctaggcgcaaaggcttgggtaagttgacctcctcgcttttctccccgagccaggttctttggaggcttggtagctgatttcagggactgagaatttgaggacatggaatatttgataaccatcctgctcctgtaccaggaagagaaattctgtaatgaggaagtagtaaacttggggttttcgtggataaacgtgcgctgttttctgttttacgtccatgaagagttttggctttccattttgttgtgggttacaaaaggttttgagacttagttcagataagttgtgcagttttaaaacgtatttaagatttgcatattttagtttaacaggactaggtgaaattggaaattagtttcagaaaaccagagtgtcttatttgcttagctattggacatcacctaaaaaattcattcattcttgttttttcacatcgaatttcattactataaattaaggaacattttatgtttaagaggacaaaaacgttattaacattttaaaaaatgagagttttgattcgaatcaataactttttatcagttttgtgcccctgctgggcattttgtaagccttgacaagcataggcaaatgccctacgtccgtccctgtttttccaagtgctacatttggtgacttcaaaaacagtcattgaagcttgataattattgcccccttctgtgagctccaagttacttgtgctctgtttttgcacttcgggcattcacattcccactc

SEQ ID NO: 58637 - DNA, 716 bp, Homo sapiens
aagaaatataattcatttagacttctctcccaacttcaagtgaaaagattacaaattaaaaaccttaaattactatctattgcatatatattaaaatctaacattaaaaaatatggaaagatgtcaacacatttaatgaaaacaaaaaactttaacagaggtaagtattgtatatttatttgtctattactttgcttaagcagtctgcttgctaatataaggacattttccttacctataagagtaacgtatttccaaaataatgttttcatggccaaaaaaaagcataacgcttgcttcatcttctgaataaacaagtgtgtttaatttcctgagtaaacattagtcatagttgacactgaacagcgtccaaattcaaggaaggagttaagaaatttctaaaaccccaagagcaatatacctcacccagagaatctagtgaagagcttattataaaggactaaaagtcaatgtcataccaaaattttaaataacatcatgcatccctctacttaataaattatttcaaaatcaggtcacaattgacagacacactatcttgggcagacgggagagactagataagcagggaaaatttccttttctctactgaagcatgtccaccaactgtcatatctggaaaacagccaaaatgagcactttatttgcaaaaagaacaggagatttataatgtgagcaaaatgtgtgctatataa

SEQ ID NO: 58638 - DNA, 2012 bp, Homo sapiens
tgataacattaagaaatacatattcatgcagggcgtgggggctcacacctgtaatcccagcactctgggaggccgaggaccgcggatcacctgaggttgggagttcaagaccagcctggcctggtgaaacccagtctctactaaaaaaatactacatatatacacatatatatgtgtagtgtatacacatatatatgtagtacacatatatatgtatgtgtatatatgtgtatatatgtatatgtatatatgtacatatgtatatatatgtacacacacacacacacgctgctatactttgctacttttaagaaaagtgctatatcttattcagtattataagtgaggaaaatatttgctgaatcacagaagtagaattctgttcccaatatataacctgtggtataagacaatctggggaatcaagaattatgtttactatacaagtctataatcatacccgtgtcttcccaaaattagttaaaattaacttacaaatcgaacagaaagggatcctaaccaagggctttgagttcgctggtaacaacttggaacaagagcctacatttagcctgtgtcttgagacaaacacggagaagccaagagcagtaacaaactgccagccttactgagtcatgtttctgactaaaaccgcgttatgaaatggagagaatgacatgtcttgggtttaatcaccacagatgttaactccctgaattttagagttgcagaggaaaaagagcaaaaaccaaaaaaaaaaaatgttcagtaataatgatgtgggtctcataggactccagaaagaacctgccaaagctgcgaactctgcttatttacctaaaacaaatcctaactgtgcaaacaggcacaccctctgatgccacagagcgggaacgccaaggtgggaggaattcagaacaatcacaaggttaacgttccactgagaacacagcctccactgagcgtccacactgcgccagaagccctcggttaacggaaccgctctgctccaaggggaaggagcaccgaactcgagttagagcccagcacattaaccaggcacttgggtgacgccaggccacctccagcctccgctcagtaccgcacagagccgagccgggacgcccccagacgccgcgccgggagcgatcccagcccgccgcgctccgcactccgggctcctccgcgcgcccaccctgggagaagacgcgtcaggggccgattcgtgaggccagcccccggcgccgccggcgacaagagatccggggccgcgacctctgccccggccagagcggggaagtccgaaggtcgcctcccgcacagccgccaggcgccgccgcccccgaagccgcaggctgactccagtgcgggctggggtggaggccgactggcgccgacaccgaggcgctcactgacctggagaggtgcttcaagatttgtttcttgatgatcccggccatggtaccgaggctggagacgccgcggtctcgtcctgttgctcactgcctcctctcttcgtggccgtctcctctctgtcccggctagcccggccggcggagaggcgctgatcgctcacgaccgggagagacccaaggccccggccaaggccacagccgccgccgagaacccggagcatcacgctcaggccgccacggccgccgcgggcgccatcttggctgcagcatcacctaagagactcggtggagggcgggggcggggcggctccaggcggggccggcacgaggcggggcggggccaacgccggctctgggcgggctctgggcgggctctggctgggctctggctgggctctgggcgggggcgggaggtttgtggcattggcgccagggttcttagccctcgcgacacagggcccttgactctcaatacaccatccttcttggccttaatcctccctccttccctctgctggtgttcccgcctccatcgctgacccgtcgctgatttttacttccacgtcctacttcccttattcatttcctcagaatgtt

SEQ ID NO: 58639 - DNA, 612 bp, Homo sapiens
cggggaatgtgtcctctgctggttgcgttctctgtggagctcaggggaggggaagggtcaacccattaccagggtgctattgggagtggtaaaaaggccacatcctttccaagggacgcttcctggaaagcctccggagcttagcaggctctcatcctgtgaagccggctctggccactagggggcagggccatgaactcagattggaggaagcctgtggggcagctggcaatctagagggacagacagaacaggccaccaggtgcagacaggcgagggaggcaggagaacaaaatggaagacaactgggctggatggaagtcagtgaccttggatgctggcacctgccttacttgccactgctagatcaggcttccgagcctgttagccgtccaggccccatggtcacccataggtgccatggcagttcctgtggaattccccaggtgttaccaggcagcatacaggtaacaggcctggaaggtccccaataccccagctggacatgctcactttggggctccctgttcagtggcacaaactccatgacccagtgagggaaacaggaatacaccaggccaagcagtatatggctaaatacattccaaaata

SEQ ID NO: 58640 - DNA, 2248 bp, Homo sapiens
ggaaggagcagagggagataatgggtcaaagtgtctgaggaaggagactgggctgggtagccccagccacccgggcctaagcccaggtggaggggaggagataggaacgaggacgggatgtggagaagtggggaaaggcaggccgacgttggcagggtgcgaggaggccttggagaaaggagggtggatggggcaggcccccaggggaggcaaggagcgccgacagaagggcccaggcgcttgcagggcgcgagttcccacctcaagcaccgtggcggctcccgcgctgcgcacctggaagtgcgcaggctgctccgccgcctcgtcggcgcgctggtagctgaagcaggcttctgctatgtccaggtggccgaggggcagcgggtcgtgggggttcttgaagtagcagaggcagcagcggcgcccgtccaacacgaaccgacggctgcggtagccacgcagtcgcgctggttcccgcgcggtacccgccccgggctctgcagcctccccatcgccgtcgctgccctcctctgcccgggttccggccccggtatggctgcctgcgcgccaaccgtttgttccccggcccccgcgccttcgcgctgcggctgctgcgctccctgcccccgcggtgcccccttcccgccgccccgctcctctctcaggcgctcaaagtggcctggaatttgtagaacgcccccctccaagcccgttggcagttgtcctagcccgctggcccttgcccccgcccgctggccgttgcccccgcgacgccccggaagccaggtcctgcctcccgcacctgccaagtccccgccctgccggagtctcgctctgtcgcccaggctggagtgtagtggagccatctcggctcactgcaacctccgcctccccggttcaagcaattctcccgcctcagcctcccgagtacttgggattacaggcgcccgccacctcgcccggctactttttgtatttttaatagagacggggtttcgccgtgttggtcaggctggtctcaagctcctgacctcaagtgatctgcttgccttggtctcctaaagtgctgggattacaggcgtgagccaccgcgtccggcccaaaagccttttttggatgagaaagactcactcagcttcgtcctgaagagcaagtgggctggggaagaggagagtatgaatgtgagtccaagagcaagttttgcacttttttcttcaaagaatgtcaccgtctgaagaatgcgattggaagacacacacacacacacacacacacacacacacgcagccggttctctacaggattagaaaaaacttgcgcgaattaatctgcgtagttaaaaacaaatacgaaatgagcgagaaagcacatagtagtcaaatctcgccaccacataaacaggttaagtttggaagcacagcccctaacattcggtgctgcttagcatctccgacttccggcgtcctccgttgctaaggtgaccagaggcgcgtcctaacgctccgcccaacaaaccatagagtaccggaaaaagctcgagcagaggggtcggaaagggaaaacaactacggctgcggtgtggttggtggtgagatgacgaccttagtgctggataatggagcttacaacgccaaaatcggttacagccatgaaaatgtgtcgtaagtactttctttctccgagggacaagatatatacgcctagtggtttcatgtgctacgtttcatctccggacatcaatgaactgcagacacccccgcgcggccctgacttagccagagggattccctggttggagctgggtgggtgattgtgatgctttgaattgaaattgattttggttttagttttgggctgcgaggccccggaagtgggatatatgttttatttcgtaacaggaaatagccaaagaaaataggcttatagagatgcgttcctgacagaagggtccgtaaagttcatcagcctttggaaactatgggcacggtgtttgggtgtatgcggattttcctgggtacaagattataggtttcattagattctcaaagggttctatgaccctccaaaagtctaaaaatcacggtcttaggatctagaggctttgaagactttggcctactggccgacctagttggtaaggtcaattaaacagaagtactgttaatacaatggcattcataacatgtatagtcataaaatatatgtttgaataaataagcaaacctaaagacacgcctttcctttatca

SEQ ID NO: 58641 - DNA, 658 bp, Homo sapiens
gtggggtcctacagtgttgcctaggctgaccttgaactcctgggctcaaatgatcctcctgccttggctcctaggtgttgggattacaggcgtgagccacagctccttgggccttcgagagttgttgattactaccttcctgctggccatttcacccggcaaaagtgaaatttgattaataaatttcttagtaaatttatttagaaaaagaactatcagccaaaagatagcacatagggcaaatctggagataaacagtatcattatgtatattatggctaacccatttttgtttacttaaaaattagtttaaattgagttagaaattggttattttcctattgtgaaaattattgacatagctgacctagggccaaattctacttctgtttggtctggtatgattagattagaaaagggcaaaatccaatggcatttcaaagtgttgagaagcagtttatcatggatgtcaaaataatttctatttatcttttatcagctcagataaaattacttctgtggttaggtaaatgtgaagtttgcatttctggttaccagcttgatgaggactgttgggaagttaaaaatctttggtcagaaacataagcacatttgggcaaggagacatttatgataatattcattgcagtgtacttta

SEQ ID NO: 58642 - DNA, 578 bp, Homo sapiens
cccggcctgttatctttctgtatagatggggttttgctatgttgcccaggctggtctcaaactcctaggctctagtgatccacatgcctcagtctcccaaagtgctgggattacaagtatgagccactgtacccagccaacaaaacggttttaagtctgctttcttctcttttgtgggtgtggggagtcagcatttcttcaaactttgcacattataggtacttagtaaattatttactaagtgaatgatttgcttttctgcttgacacaagtagcttagtaataaatgtgcccaggcaaaatgccagagataccttgaagagctcagagtggtactccagtggaaaccagaccagttgttctgcccgcacttttaataatgatttggcttgcaaaactgatttggcaagagttttcaggaccactgttttattatcatactgtaaacagaaagattaacattagcataaatggtttttagaggaaaaaaatagcaaaaaaaaatggcaaaacttattgcaaaatttttcacctgtttttgcaacttgtaggcattgggctctgatgccattgccata

SEQ ID NO: 58643 - DNA, 1907 bp, Homo sapiens
gggtactcgacggggtaggtggaaaatacagcggtacagcctgttttccatagacagtctacctctctaaccttcattaaacaagtaggctagattaaagaaataactcctctagctcaaggaatttgccctctagtacattaaccccttgttgctgtaagtgtagcctagggaccagcagcattggtgccatctggacatgtattagaaacgcagattatcagaccctactcctcaatcagaatttgcactttcacaagatcctagggattcgtatgtatattaaagtttgagaaaaaacgctttcctgcacgctccaagggcacttcaccacagtaacccctaaaaagcctcagtcctgggtcccccagtccagtgcctggtagggcaggaagggggcggggctaggaaatgggcggggccctggaccaatgaggagcagagtcccagccgcctgctcccttcagctgccccctccaccttcactgcacatttggctaggatatacagggctacctgtcctccttttccggcagaagccatctctacggttcctggaacttggcccgttcagccctgggcccggaagctcgttctgactgacaagtctacggaacctcggagtcaaaagaaccgccataagctcgcgcgctggctcctcccctggcaccatagccccgccccacctgacacccggggcggagagaagtactggctccgcctcttccgaaccggcaggaagtgacgtcatgcccccggccggcaggtcttttagtctttttccccctcccttactcttcgtccccggtccctcccctccccacccctttccttctagctccgacgtttgcggccgcgggggcggcggaggatatggagtaaagccagagtcagtggccaggcacgaaggcagagcaggaacagccaggaggcgtttattaggggggcggggggaaagagccccagcaccgcccctcctggaagaaggaagaggtaagtgaccggccgccggcaccgaccgacctccctcaccggcggctctctcgcctgggctcccggagccggcgaggagggaatggaggactcgcgcccgggttaggcctcccagggccgctcaggctggtgggtgttgcctggtgacgggcctgccggcggccggccgggcgatcggcggtcggcgcccgcgcaaagcggggctggacgagcagcgagctccggggagcggatccgagagggccgagtcctcgaaagaggccttgaggcgacgggagacccgggatcgaagtcagctgccggagggagagccccccatgccggctcgagagctcgggtttcggtggtggagaacgtagtacctttcggggacattggacactactctaggaccgggtgagagagttcacctcagttctgaggtccggaatccggtagcctgggtcaccagccagggccctgccgcccgccgtccttctctgacagtagctttagttctggaatggaaggttattgtgtgtgaggtgggtggggcaggggttttgttaagagaaaaaaccccacggttactcctgcagtcttgtttttctaaacgggagaatacggatggaggagggtttagaccgataaagcttgcaaaaacttattggactttgagcacatacctgtgatccgtaattaaggaggccatattatcaaatccaccctctaaggcactcgaggaggctccagacaagctgcttaaaagcgctatgcctgtagtgacttcattggaaggtgtcaactattttttagtacgtcaaactcaggaattatttgtgatgacactttctaaaaacattggatactatgagtgagttttctaagtagcctatctccgttctgaaaaataaatagtttagcaaaaatgctcc

SEQ ID NO: 58644 - DNA, 748 bp, Homo sapiens
tttttgtgcatgttatgtgtctttcatgactattgggttttgttctggtaggctgtttagtaatttatgattactttggtcatttgataattgattttagagtggatttagattagcttttactctaagggtggcttaccccactattaaggcatggttcttacaggtttctgctgattgtcttagtggtcagtgaagactcactactctggctgatgagatatcaaatgatttgcagccttgtgtgaactttgaaactattcaactgatagctctctagtttggttcttgccagacctggtggagtgtcacactatgcataagcatgtgtgggaccagggaacagagcatgaaggggaccagtttgcattttcttcagcatagcttcattcactttgaaattgtatctcagaactttcatctacctccgcattcttgaatgccagtttgtccctccagcttctcaattcagctagatagctacttggaattctgctctatgctctgtagtttggaatgtgcctctggggcaatcctggttctcttgttctctttcttactggggtcaaaggctcttgctgcctgttcaatgtctgaaaaaatgtgtttaatacattttgttcagttttctagttgttaaaagcaagagggcagattcactctttgttcctccctcatgggcagaagttatttattcatttatttacttagagtaatatttttaaatgtatgaaataaaatgtataga

SEQ ID NO: 58645 - DNA, 1320 bp, Homo sapiens
ctaagttcaacaactatttagcacctgtaacgagcacctctaatgttctaggcagtagggctagaaaataagtaaacaaaataggtcgctgctctgatggagcttatattctgggggaaggcacaaaaaataaggctgttaatgagtaaaaccaggacacagtatgtcagtgctaagtgctgagaacaaacataaaaccaggtaaggggggtggggaacatgagggatgatgtgttaggtcaagtgtccagggataatgtgatctttgagtagagaactgaaggctgtgaggaagcaagtcaagtgcattttgggggaaagggttccaggcaaaggaaaaaacaagggcaaaggccctgaagggggaacatgatgggtatatttaaagaacactaagtcccttaaagtactcaggttctggacatgtttcaaaggaagagggaacattttctgagaggcagaagactggggaggagcaggacaatactgggggaaggaactgggaattttgacttgtttgattttagagctttccttgcctattgatatctcagtggcagtatcaggtaggcagtggaaatacagtctaggattcgggccagaagtcagagctagagttgtacattggtgagtcactatcacatcacatagttggtctgtaaagccaggagaccagatgagatcatcaagattccagtgcagagaagaacatgactgagccctggggacactccaacatagagagatcaggaagacgagaaggagcaagtagaagagatagaaaaagggagatagagggtaggggtgatggaaccccgagagagtggtgtcctgtggccaagtgaagcaagtgtggtgtggaggagtgcatggtccatgtgtcaaagcttctgtgagatcaaggaagatgaggactgaggatgggccattggatttagcaacatggagatcattggtgccttgacaggggcagttttaatatagtggtgatgacaaaaatcctgaacagtatgtgtttaatcaagggtgaacattttattgtcttcctcttacttatgaacagacagccaaggattgccagatagtttggggaagtttccaatatgaaagacagagaccaacaaaaacaggaagaaaggtacttggaagaaaccaggtatcacagggaatagaacaaacctgaacttcaaagagaagatactgcatgcttgaaacaaaaatagaattctagtttcaaaaaaggaagatacattcagaggagaagagattgggctagagagaatcttgagtctaggaggtcagttaggagtctattacaac

SEQ ID NO: 58646 - DNA, 1995 bp, Homo sapiens
aggatatgagttctatgaaagctagggctttgtctgttttgtttattttttctatgtgcagggactaaaataggcctataataattgttctcaacattaactacactttggaaccactcagagggtgcacccaggctgcactccagaaaactggtggtgccaagtgatctcaaagtgcagctaaggttaagaaccactggccttgcctgaaaaactttatagaagagatagaaataggactaagtcttagagagaatgtaagatttcaacaggtggaggaaaggcggccttcctgtcagggtgggcataggagaaacaaagaggataggaaacggaagttgcacaatgaacaatgccaagacaagccctgtaaacttgatttagtgagcagttgctacctcgattattcttcctgaattttccaagcaagctctgatttgaaatattttatttcattttccacttaaaccaacaaaacatcttttaacatttcagcatccaaacttcatttctttttcttttctttctttctttctttttttttttttttttttttttgataggatcttgctctgctgcttaggctggagtgcagtggcataatcatggctcctgcagcctccacctcacagggctcaagcagtccttccagctcagcctcccaagtagctgggactatggtcacacaccaccacgactgactaaatttttgtagagatggggtctgtcttcattgcctgggttcaagtgattctcccacctcagcttcccaaactgctgggattataggcatgagccactggacctgacccccaaactccattttaaatgcctggaggaagccacactagattttgttaaattgatcaatgttagtgtttacccagaacaatttaattcaaaagagtaaggccacccttttcttatagccgtgacactactgagccatcatcaggggttgtgacttgcttctttcttccaaatgtctctcagatctacctgtgactttctatccccattaccatgagccatttccactttactggataaatgtaccagcctggctgaggtttccagctctttcctcttcctgtctccaatctccaatctgttctaacagatcaattataagacaccactctcgtcgcttctatgccctccttaagaacctagagaggcttcctccaggcatttcccatattagggaatatattttctgaagaaaaatacaggaattatcacctgatgcatgcagtttatttggtagaaaaaactttgaaaacttggatttatgtgtaggaggtatgggagcaaaaaggggagtacctagtggtgagaaatttggggacaactactctaaacagctgcctaagaggatcttgattagagcagttggttaattactgagaaattccaggaaaaaaaaaactgcattctaaataaacgtttatcagcacataacatttgactagtctgttcaaaggttcctgttgcaactcattctggcagcacttgtgtaaaaccaaggtagagcagtaagtgacaaaggttttatttatctcctgttattatctgttgacttttaaagggctcagtaatgaacagctgcagattagctaacccatgggaaagggtgaagcaatgtcttgtgaggcccaaggttcccgtcagcccctttggagccctccaagccagtcaaggtcatgggcttatactgagagagaacacctcaacggacccttttattgtagagctatgtgaatgaggctcaaagagtggaaggaatgtattcaaagccacaccattagataagaatctggccaacgtaaaatgaaactactaatttgagagagttcacattaattgtgctctgatcaaactagacactttctgtatattatatcctctcttcagtactgcagtcttgtgatataggtattatttttcccattttatattcaagagacctgagactcacagaggccaaatattaat

SEQ ID NO: 58647 - DNA, 1176 bp, Homo sapiens
gtcctaaatatgggtgtttaggttgttcaatatttttcagttaaaacaatgatgcagtaaataactatatatatatatatattatatatatacacacacacatatatatacatatatatagagagacacacacacatgttggagatacatgttggaaatgtatcttcagtgggatcgctggttcaaaaggtaagtgcaaatgtagttttgtaatgcactgccaaatttccttccaggattgttttaccagtgtgcattcccaccaacaatgcataagggtgcctgtttccccatagtcttgccaacagaaagtgcggtcatactctttcatttttgtcatctgagaaatggtacctcttcaaactctgacttctgtcccctcgatttggcaagattgccaagtgagttctgtttggataacccttcatgcactggggtctggaaactgcctccaggaagtaagatggggcaatcgcaaagcttacctcatttgtttcacttttctcagggatgatagccctaagtcctattacccaatgtctaaaagccatcatttcacgtattttatctagttttctggttgcttaaggaaagagcataaagcctttccctgttactcagtcatggttagaagtggaagctggttcaacattcatctaagatttccagacagagagaggaaagaatcaaagattagcaaagcaatagaaaaacattctagagctaaatagagatatattcttagattgaaaggacccagaaaattccaagcagaatgaatgcaacaaaaatccacctggttaaaattctgaactctataatgaaaaaagaaaacaaaatagagaatgtctacagaggaaaagaaaagagaaagggaagctttctctacaaatggaagagaagttgagtagtaacagacttcttgttggtggagcactaaaatacagtgagccaaattctcaaaagcctgagggaatttgatttggaacctaaaattctgtaaccaggcaaattagaatatgactggtagtaggatttttttttttttttttttttttttgagacggagtcttgctctgtcgcccaggctggagtgcagtggccgaatcttggctcactgcaagctccgcctcccgggttcacgccattcttctgcctcaacctcctgagtagctg

SEQ ID NO: 58648 - DNA, 635 bp, Homo sapiens
aaaaggctcccagcttctagttcagtcccggggaagtgatagagctattcaaagaagttgtagtgagagagagggaagatgacagtttggttttagttgatgtgtacagaaatacgggtgcccaggagcccacaaaacggccagaggagaaatgctttcaaaggcaagctgcagggctccttggttttgtcacattcctcattctggggctttgcggttttgtcttgggaatctcgaggctctcccaaggttcctttctatgtttatatcatttagcagggaaggattgttaatgactaatctgtgtccatgaggcacagagccaaggaagagatgctgctgctagcccagaaggccgcctgtgatcatgcacagtacactggaactctctcctcctcctcacctcattgtctccccgacttatcctaatgcgaaattggattctgagcatttgtagcaaaatcgctgggatctggagaggaagactcagtccagaatcctcccagggccttgaaagtccatctctgacccaaaacaatccaagtaagtacctaattcctttgggagtgggttgtgtatctcacagcaacagagaaaaaatagtcacttaaaagtttctctttgacatctgtaat

SEQ ID NO: 58649 - DNA, 2712 bp, Homo sapiens
gtcttctttcttgacttcagttgtaaactcttctattgctttccattttgaatattaatatgacaggaaatatcagatggaaatatttttaaaagatagaaatgtgagtatgacgaagaactttagtaataaaattgtccaaggactaaatttatagataagatacctctttgtctccttattgacagagtgaatggggcaactgtggagcctgacttacttcttttaattgggtttttattcagaagggaggggcaggagggaatgacaagtgactcaccttgaattcttcctctaagaaactcacacctgagctttgagctataaagaaatctgatgctgtttctggtgctgtcttagaatcacttcaggagtattgacaagaggggtaggaacccttagaaataatattagtgataaataagaaggcaggaagaaacttttggaggtgatggataggtttatggtatagattgtggtgatgatttaatgagtgtatgcctatccccagactcatcaaagtgtatacatggaatatgtaaagcttttatatgtcagtcacacctcagtaaagtggtttacctatctatctatctatctatctatctatctatctaaatttttttttctgttcctaaaaaaaggaagggagaagagaggaaaagatgttcagggagctaccattttgtttctagctgtgattttataaaatgatagacacttttatctttgtgttacgttcctacccccagtcctccaaattatggatctgtgccatttgtaccgtggacttttctgttttctgaggatgttgcaacaaatactgatgcaactcctggttaactgataaagtactggccagggacaaagctctcttgtcctgagacccttcctcaagatttgcagcaatttcccaccacgtacctctgccctctcctcacagctggagagggaaagtcatggaatccttgtccttcctcttgtttccacctcttcaagattgggccaattgcaatggaatatccattggttgtgaggcctttgtactctgcaaggaaaagaaaagaaatgtgtgtatgtatgagtgtgtgatggagctaacttttctacaatgtctactaacatgtcctagcctttacttcattcgcctgtttccttctcacaaaaaccctgtatgggagtttttctttactttttattattatttttttgagacaaagtctcgctctgtctcccaggctggagtgcagtggcgctatatcggctcactgcagcctccacctcccgggttcaagcgattctcctgcctcagcctcctgagtagctggtactacaggcgtgcaccaccatgccactattttttgtatttttagtagagacggggtttcactatgttggccagactggtctcgaactcttgacctcaggtgatccgcccgcctcggcttcccagagtgctaggattacaggcgtgagccactgcgcccagccaggagtttttcttatactcattttacagatgagaaaactgagactcaaaaaatacaagtgacccgtccacaggcagatagttaggaagtagcgggacctgaacttgagggcgggtctttctgactccaaagcctcttcctggctactctgatattggctattggcggaggctgggaaaacttgaaatggggaatgatcggggagcggcgaggggggaccagccgttaagcattccagcctgacaggggtgatttgttaaacccaggaactagttagacgtttcctgaaacctcctgcatagggcattttcgagagattgcaccatcagtagggaaactggaaagtttggagcactatttgttttaacccagagaccagtctaagatagctgggtgaatatttccgttatcagcgttttaattaaagaccacaatgaactctccatgctgctgtgattagggacatcttagagaggagctcagaactgctgtggctcacagtctctggattatgaatgccatgagaatgcatatcatgatgtgatagattttcaaaggctcacattgtcattaggtgggtgcataaaggacagaaaaggttctttacttcatagaaagagatttcccttccctttgctctcagtctcatttttatcttagtctctagcaacacagattataaaggggaataaaagaaaataggaacaagctagatacagtgatgagtgcctgtgatcccagcagctcgggcggctgaggtggaaggattgcttgagctcaggagttcaaggctgcagtgagctatgataatgccactatactctagcctgggtaacatagagagacaccacctcaaaattttttttaaaaaataagaaataggaacaattttcctcccaggtatttttttattgtcacagtagtttctaccagtgaagatgtagctaaaaggcatcaccatacgagtgtccttagtcaccaagctgtatgaggaggcaaaaatcattattacatacaaatattcatccttctgtcttttctctcccttctctcaccctgctctggaatcccctaacccctttgctcttcacagtgaattattttctccctcagtttgcccatttccaattttggccataaaagaacatctactattcctactctctctgctttgtaaattggtgataagatgacactaatataatgcaacttgattgcaaag

SEQ ID NO: 58650 - DNA, 2553 bp, Homo sapiens
gtgcatctcgctacattatgcctgggctccaccctggatcaactgagtccccttctaaagccctcatttctaaaaaacaaccaatagacttaagcttgatgtacaaaagttatgctgaaggataaaatatagaattattcctattcaataagcaacccaaggtacaacatgagtccaaagctgagcaatcataacatcaatgtagtgatgatgggtagccacctgttgtgctaagcattttataaatactattttagttaataatcacgtataattctttgaggttgtatagttatcaaccccattttacaaccaaggaaataaaggcagaaaatggttcaggaatttgtccattgtccacagagctaataagtgccaagacagcctggatgtattagtttgctgggtctgctgtaacaaagtaacatagactgggtagcttaaaccacagaaattatcccatagttctggaggctggaagtccaaaatcaaggtgtcagcagggttagctcttcctgaaggctgtgggtggaggatgtgctccagggctctctccttggcccacagatggccatctccgtctcctctctgtgtgttcacatcaacttccctctctgtgtttctgtctctgtaaccaaatttccagtttttataaggatacaagtcatattggatcttcattttaatttgattttctctgtaatgaccctatcaacaattaaggtcacattctgaggtactggggtttaaggcttcaacatatatacatcctcatcttacaatggttcaacctactatgtttagactttacaatggtgtgaaatagacacttttagcatagttttcaataaattgcatgagatattcagttctttattacaaaaaaggctttgtgctagatgattttgtcttacatggtggtaggcatgtcttacatggtggtagggaagacagaatgagagccaagcaaaaggggaaaccccttataaaaccatcagatcttgtgagacttactcactaccacgagaacagtgtgggggaaaccaaccccatgattcaattatctcctacaggatccgtcccacaacacgtggggattatgggagctacaattcaagatgagatttgggttgggacacagccaaaccatatcaagcattatgctttaaattcttccattttaaatcataccattccattttaaatcataccattctgccaccttttgatggggacaaatgtcaggacccggagcatggcacttgacctccaagtccagttttagagccagtgaacagaaacccaccctctaaaagttcttaaactggaaaagtactcccccaaaatgtttatctaagagactggtttccagcttactaggcaatttggcattaagaactttcctcataaacatttacaaatattctgctccgtaatgaagttaatcagtaaaccacacaacctctgtcctctctcactccttacctagtctcattttcagtggctgtgaataagctaagaatggtaatgcagtttcaggggttagaaaatccaattcaaattagtcctcactgcagctgtacgccgtcaggatttttcatggaaatgatgagtatgaagcccgcgaaaggtaggacactgttcacaggtgctttcaggtcgagctcttgcaactggactgaggaaatctggggactttggttggagatgacagtaacagatgtctgtcaaagatagtggctcagtcagacccagaagactggaatgagagtttgggttggggtgatttttatagggttctaaacagacgaatatcttatggggatgaaatccaaggatgtttcccctaatattcttcatagactcttatgtcaaattatcactattcttccaaaccaaacattagacaattctaatattaatatcaatggacacttgaaaaaacattttaacagacattatttaatgcagtgctcctaaaatggcaagtctcagttcccaggggatcacaaaatttatttagtgtctcgtgaccagcattaaaaactggattagaatataatagaatagaaatattagtgtccctcaaggagtaaagacaagtggtatttcatgaaattttgtttcagttacatgtgtataagtatgtacgagggatatgagataaaatgtatctaaaaccgtaggttgtggtaaaaaaaaaaatgaaaagagtttgggaaacacgaattaatgaagtagtttcacagcaggtttctcccaatagtccatgaaaaatcagataagcacagagttgagctttaggcccaggctcttggttttctctgaattaaaacatcgattataattaaaacacagtataatgtaaatcatattttaatattttttaaaacagaaattcatcttttaaatttccagcaagaaaaaactcgagtcatttttataataatgataattgtgaacatgtttttggtcatagacttggtagcataccattttgtttaaatgcgatgtttaaaagtgaccgacactgtatttagaaatggaaatgag

SEQ ID NO: 58651 - DNA, 600 bp, Homo sapiens
aacagaagcttaaagaagttccatgtctttcccaggttcatatacctaacaagttgtgggtgaaatgaatccagatttgtctgctcagagggcactcttaggtagtatctcataccatctcaagttcagcgtggaagataagcctgtaaacaaaagaaatgattgtatgtgcttccaataagtgccataatagaagtgtgtacagaggtaggagaggtgaattccacctgggggaactggggcagacctcccagagtaggtgaccagaagtaggtgatcagctgacaaggcagggagaggcactgacatcacaaaggcctgatgccaggaacagcaaacaactttgcagtaaagccctgccatttagtgaagaaaccatggattaagaaataaaggaaggcaaaaaaaaaaagtgacttttctaggcactgcaattcaacagacattcattaaacatttactatggtcagcattgtgccaggaatgaaaaactggatataaactggaccctttcttaggagcatcagaaactcactgtgagattatgggggagtgccattgtttttatgcaaacctgatttcccatttgggggtacagtg

SEQ ID NO: 58652 - DNA, 1459 bp, Homo sapiens
ctacttatcctgtattaccagcaaggctctgttcctcagtgaatttcctttccattcattttcaaatgacttttctgatatgagcattgttgaatatgcacaagaaagaggcagaggtatgtgtatggatagatttgcataagtataaatacagtatatgtacccatatttaaatgatataatgataatattgtgttgctattcagagtgaaagctaattaattcagctattgagatgataatgatttctttttcagttaataccagagtcaaaaaaccctgcagaatggttctacgcactgttcctttgactcatcttggaagaaagacctttattctgttaactattaagctgtctatcagtatctatgacagttttaaaggaaatcattcctgggaggggtagaagattattagtaggaaggctgactcatgtaggctcaagtggacattgaggtcatgatttggtaccaggaaagaaaaagtcctctttttgcttttagtctcttaaaatgcatgctttggtatttgcactctcaatatcaacactgatctgcagcacaaagtctttttttagactttatttggttggatttgacatttagaaaaatgttaagatctttcctactgaaatttacaccagctgaaaaattcacaagcaagtccatgactttcttaaccttgacatctctaacttttccttcagcctctgttttcatatttcatgagttaccaaaacctgatgttctctctgtttcctcctttctcttctgtcccactttagttcaggcattggtagcctctcagttgtattatggcaatagtctcctctctctagtctccaatacgcgttccacctttaccttgctccgaggagcttcccaacatacaggttaggtcatactgtcccctgtcaaagcctttaatggcttccctctttcaacatggtaaagactcaactcctttgcttggcattcaaggacacttaatcacattctgttcctgttacaactgcttacccatctcccactaattctctccatactctacccaaccgccaccaagatggagtatctaccctttcttggaattttcataacaccctgtgtttgctcatttttccgaatgtctttcctccctcatggtccatgtttctaaaaccttacttattcttcaaagcccagatcaaattctatttccttcatggacccctccctgattctggctactcttaattaatcaggttcactcccagtctatacaatgccttttcttcggggcgcttgacttctagcagttgggaaatcctcatattatacttatcttgctagaacaatttttaagtgccttctgctggaaaattgtcataagaaatatgcagctctacatgggtgcagtgtaattgctgcctctcctccttaaatgtggcacaatctttacaagcatatggtgtggacct

SEQ ID NO: 58653 - DNA, 891 bp, Homo sapiens
ctgaaattaagatggactaatgtgttgattcagttctcctgaataatgataataatagctactattataattatctactctgacatttattgaggatttactatgaacctggaattgtgctaagcactctctatatatctcatataacactactgttatatggagtacacattatattacacgtgacaacatttcacagatgagaaaatgaagtcttaaaaaatttaagtaatgtcccaagaccaagtcgtggagtttggtttcaaactcagagctagcttatgacctcttaaccactaggtttgctggaagccaggactggtattctccaggctcacattctccaatcctctgcactttaagttgtatctagttgggtcatgggtatttagttcattctgtaacagctggataaagggcaatcttccacatgatgtaatccccaaattgctcaacaaagacattgttgttaatagagtccactggggtcaattaaaaaatcaaagtcaaaggggagcagagggtggtattttgaccagagaggaaaacggcaaggatttaatttgggaagactgttttttaaaaaatatttaaacatttattgtgctcaaaatttaaatccaaaaaaattaaataaatcgtataattctctttataggctgggtgcggtggctcatgtctgtaatcccagcactttgagaggctgaggcgggtggatcacctgaggtcgggagttcgagaccagcctgaccaacatggagaaaccccgtatctactaaaaatataaaattagctgggcatggtggtgcatgcctgtaatcccagctactcgggagactgaggcaaaagaattgcttgaacctgggaggcggagtttgcggtgagcctaga

SEQ ID NO: 58654 - DNA, 554 bp, Homo sapiens
gcccgccgcctgctatcgcagcaggtgctggatgccagtgcttcccacgtggactagacccagagtgtttcacctcgacccctgcccacgacctgcaacccttcttggaaagcaggaaacaagagggtgggtctccttgttgtcggaatactcctgggcaagctcctggatctgattgaggaaaggggtgctaccacctgcagattcctggcatcactaccaataggacccagaacaaatccccagccttcagcggataactgccaccaggtggcgccagcagcagtggacctggacagtttggactcctgcaaccctggctgttaaatcctcagtcacgtaactagcctggcactaaatgacctcacatttacacgattgaattttttggactttactttctgcgttatgggtgggggagttaaattttagattgttatgaggctgtaccttaattttttcttttctcgtcaatgttgtatttagaaaaatttgaaatctagagaagtgttacaagaatagtacagtgttataatgaacacccatataccttt

SEQ ID NO: 58655 - DNA, 1230 bp, Homo sapiens
ctttactgtgaaattatggatgaaaggatctttgcacgatgcaggtacgtagtgagggacagtaatgttagttgataacgattacaggtatgttttattttataatgaaaatacatttgtcttctaaacctttaccgaagggagtgaaaagaacacctcacccaaacgcccgcccttatgtgcgcagccccgcctcctgtaggccccaccccaccaaagggtgcgcctgcgccgttcttttttccgtccacgtgacccactcaggctcctccttgtctccaacatggcggcgcccaggggctcaagccgcacgtgagaaagtctgggcatctgggaatcggagagtatagcctgtgagccgctttcccctccttactgtcggttgcatcccttcgacactcccgaggccgtcgcgggccactggccctctgcagccatgaagacaaagcccgtttcccacaagaccgagaacacctaccgggtgagcgcgggagcttaggcagggagccgcgggtctccgctgcctcagtcgtgagacaggctctgagcgagactccaggggcctcagacttctgggccgagtgtgtcactttcctggaggctccggcgaaagagggagacactggatgtagtaaacatgggttggaggaggaaagaagtgtggacagcaagtttcacccatgttttatggggtctggccagtcctgggaatttcctgtagtccagaattaaattcactattccaggagattgcttaggaccaattctcccctgctcttttatctttaaagaccgaattgggcgagtcggctggcggtgagtgattcccagctaagggcaaatatacagcgctttctctgtttgccccttgatagattgtttccaggtcttccttaggatacaatcataggtctgtatatgtttaaaaacacttttattgcagcgactttgctaggtccccatgcttatgggagggtatgaaacctaatagatctagcgagactaattgccagcatccacctaggctcaccagtctggcaatggaaattttatttgaaatgacatagctgagagaaattatgcaaacatagaagtattcattatctttgaacagtgatgcagtaaatttgtttacggccgtatgtttttcagtttatttttccacttatcctttgtgattagagatgcctacatgcagcattcaaatagatattaaagatctgataaatt

SEQ ID NO: 58656 - DNA, 2476 bp, Homo sapiens
ccacttttaaaaataataaagctctatccaatgcatcacaaaatattcccagaaagcttcctgtacaccaagtattgtgtaggataaaaagcacagtccttttcccatccagagccattagagaagattaaaaacaagttacattaatacaaaaaaaaatagttaacatcagaagtgatgccacactgttatttggcaaagacatggcataactaagagctgcgagttgaaaaatgaacaacaccatgggctagagaaccttgggaaagttcaacagaataggtgtgacttgacaaagtcctttctaccatttacaggtagaagagaggcggaacaaaactgaaggcggttatggaagacaggacagcgcctgtgatgcttgggagcaagaagtatgctccccagaaaactgtggagggatttaaccaagccaaagaatctgcaccttcatttggagggtgagaaacgagttaaagaatgtgcaccctcacttgggttctagcggggcgagggtgttacctgatgcttgtgagaatgcagttccctcaatcagcgggccaagaaccaagaataaagtttcatttgccgactagaaatacccgtattattacatgaaacgctacagcagattagcagacaaatgccaaactggccataaaacaacataagcaacacctgctctcaggtttttcaaactgacgccgtcccagcgcccctggtaaagagaatgattaagcttccactctggggccgcagctcatctttcaccaagaaacctcggcgaacctgcgactgacgcgttgccagcctccgcaagaacaactctgcccagcaagtggagctggggatgagggaaaacttcatgataagggtaaagaactcgaacccaggctctgcggacgtccccaagctgtccgggtccctggaccccgcaggaatcaaggggaaccgagagaggacggaggagaacgcgagaggccggatccacccctacagatgaagatccaaagtgagtcaagtcctccgcgacccgccccctgaggagctggctactctagggtatcctggccggcccctctcctcctctgcaccccagccctcggccgcggctccctcgagcgcgcccaggtgcccttctcgaacccctcacccatgatgaaccccctgtcctccctcgccgatcttcagtgattccttggccttcggctgcagctccgaggcggtttcctcgcaagcccagtcagccagcaacttccacgtcggactccaggcgggggcgggagcgagggtcagctgcgactgcgcgccgggaacggtggcctgagcatccgcgtcgtcgctttcgactcacggtccccgctcactggatgtagataccgtggaggccagaagagacgaataattcaaaaacctgaagtctctcctgcttgtgtttttctggacagaaagagcttctgaaatagagaaattggaatttttgttttaaattctgacaccaaaaagtggcgaatctgacaactgaaaatgcgagtcgggcctcgatgagtcgtcccggtcgaacgctggcgcaggctgcggcgttgcagaggacgcgtgtcccggagcgccctgcggggccagcccaactctccctaggtgctttctcccagaaagaaacaagactacgtaataataataggaatggtaccgcgctgccaatgcggagcagccttgcacctgaggccagtaaccagaggtttttgtcttcgctgtggcctgcaggacgaggacctcgccggctttttttctcgctgaccgagcagctgagaccgcctttcaggggtcggcagtgtggactggctggtcccgatcgtggggaccagggacttattccctcgagggtcgactgttggaagtaatgtaggttttgatagtgaagtgtgtggagaggaagaaggaagcacacctataggatgtggagaagggatttcccctagagaaatttttaaaggttgagcatgtatgttttgaaacttcccaaagatccattgaaaagtgaaccttccggccgggcgcggtggctcacgcctgtaatcccagcactttgggaggccgaggcgggcggatcacgaggtcaggagatcgagaccatcgtggctaacacggtgaaaccccgtctctactaaaaatacagaaaattcaccaggcgtggtggcgggcgcctgtagtcccagctactcaggaggctgaggcaggagaatcacttgaactcaggaggcagaagttgcagtgagtcgagatcgtgccactgcactccagcctgggcgacagagcgacactccgtctcaaaaaaaaaaagagaaaagtaaaccttccatccctaataccctgtatctcggtgatccccagtagtcactactgttaatactctcttaggttttcttccaaatcttattaatacctttgcatattatgtttttatttatggtagagattt

SEQ ID NO: 58657 - DNA, 749 bp, Homo sapiens
ggcatatatttgagctctgtgttgtaagaaggaataccctagggcaaatgcgtgctagaggggcttaatacttggcagaatccttctttttcagtagcctgcttttatgactgctccgactgcacctgttaggaagataaataaaggactggccaattctttcctctgaagcgccctaaatatatcactttaaaaagactttggaaaaacaagttgtatccttacttctcacccagtaaatctaaagaaattccctcttgttcccaggcctttcaaacagtgaagtcaggagtaagggagactgtggactggtcaaaggtggaagttagactcactagctggtctaaggaatccaggagggtggaaaacatgaagaacttacaatcctttatgctctcaatgactcactttattttggccatgagacacagccttgaaacttttttttttttttaggctctgtatacacacacaattcatagagtttcctttttaacagcaatttcaaagtatccccgaatcaaacatgaatgttgaagtcaactacccagactgaagttgcttttaaaaaatgcttggacacaaaaacaaataaataagtggtctctttaaaaacttgaataaatacaaaatgacatttttgcaatacttttgtaaacaaatacattcttcttttcaattttgtatggttgtgagaggagattgctgtgtaattattgctattgtttttacagtccaaggaagcattt

SEQ ID NO: 58658 - DNA, 848 bp, Homo sapiens
ctccttcaatctgagtaaatcttcccctgcaaaacacaccccatttgattctttaaaacatggtaagagtagtgaggaaggcaagtcctcagatcttagcaattttcccccagccccatgttaacaatgagaagctatttgttgctatgtaataaggaccatattttaatcctcttcctgtgtgaaatgacatcctgagatgaaacttgcataattagaaggacaaaagaatgaattgactaggggaggaaaaaaaaccctgtagattcagggaaattccaaaggttgaataatgagtcattgaatatttacatgatcaaggtacaattagacttcatctattcagaacattagagtacagtacagtctttggcaacattcgaccatagtaaataaatatggattaaattgattgaatcattctgaatagctggattctctgcacagctaaaggttaattttgttatataacctcagagccttattttttccaccagtttgaatagaaacattcttaaaatgtaatatattactccttgctttaaaaaataaagtacagtggatataatttgtcttaaattatagatatcagttattagtagcatgtgacaccctgagggcccaaattatttgctcttttgaaaaatggactcatattgatttgtattttgaatttctttccaatttttcttagctttcctactttatccctcctagaagtgtgctgtcttctttagtactcttgtcagtcagcatatgaaactgttcccctcactcccctttgtcctttattatagacgccattccaggtaattaatctggctgagtagagtttagcaccacctaag

SEQ ID NO: 58659 - DNA, 906 bp, Homo sapiens
gttcttgatgtgtcatatttcattatctaatttctatgatattcttgtgtcctatacattagtaaaatacttttttctttctttcagtagattggattactttccttcagctaacttgaacttatgctctcataatgaacgcataacgttagtatactcactttgtccttgaccttcagtggctcccatggagagtaacatgaatactaatcctggccacgtgggcgcagtttgaaggttatttgcttatggaatgcagacagtgcaaactcctagaactccttccatgggatggtttcaaggaggtttgggcatcctggctgaaattattgtaatattattctctacaaggccaatgggcatacacctctgtttccaaatttggaaaggtgtttgggccaggctgcaaggctcaaccaacagagcagatgatgtaatcccagagggcaagctgtcaaagtttaaacaaagcctgtgcctgacccttaatttgaaaagtcaccatattatacttgtatgcttaaatgagaaaatgtctttccttaaagtcaaccaaccaacaaaaactcttttatttatggagaacacagcgtgatgaaagagcaaggctagatgactagggcattttgaaattagtagcatttttctgacgtttgcagaagataagcaaaaccatgaccacatgcagttgcatgcccaggtacaaaaactgccgtgtgtgtgtgtgtgtgtgtgtgtgtgtgtgtgtgtgtgtctgtatatatattatataatggcaaatacatgtatatatatatgtatttgccttacatacctaggaagcaaatcaatttgggatagaaagtgacatccctaaataaagaaggtaagtgaatggaagtttataataaatatacagtcctcttc

SEQ ID NO: 58660 - DNA, 2866 bp, Homo sapiens
tacggtctgtcacaactgaattctgctgcccttgtagcatgaaggcagccaaacaataggtaaggaataaacatggctttattcgtggcactgaactttgaatttcatataatttcacaacacaaaattgtattcttttgattttttccaatcatttaaaaatgtcaaaaccatacttagctggagggctgtaggaaaacaggtggtgggctgggtctggcacacaggcagcagttcgtggacccctgtgccaagtgtttgacgaagcccgtgaggcaaactgcacttgccgatagaggttgcgccacacaagtgtcttggaagcaatttctggcttgtcctaggccttagaaagtgcgtgcagatcagagccatgaagtgaagagcaaagcaagtgacaggcctgtctcaggttgtgcaacagaacgtgtttatgacagatgtcccctgtccaagtgagtgcactgtgagataaggggccggtgacctaccaatgcgtgtggcaagccagcctgttcccccttgcagggggaggacactcctgccctttattccagggaagagtatgtgtaaaaatattcacccttgttggtatcaaatgcgctgaagaaaataggtatcggggtttcagccattcggtctccttgttagtgtttctaagccctgattttcagtttcaaaaccttggtctctgaatccgcagtgatgggtctctagagcgaatacatggcagggccgccttcctccgtacagaaagggagaattgtgcttgtgtgttttaccaagcaggacagatggggccgtcacccccgtgacccgagccctgcaaaactgtgttctcacacgaaaacccccaggctctgcgggcagcgtggtcctgcagtggctaacactgggcgaccggagtcgtgttccgacccctaggagaggaaccggctcggtcgtggtgcagcccgcgaggagacgacctcagggcgtaatccgacgccgtgggttaagacatcagacctcaggcgcagtgcagccggcccctggggagtcaaggaccttgatcgccgataacaagttgccgttggcgggcgccgagggtgacccgcgagcgcggcacccgcctccccgcccctagcaggaccccctccgccccgcccccagccggacccctccccgaggccccgccccacccgcgagccgcagccgcggccccacagcttctggggctggggccccggcagccgggcaggccggcctgacctcgacctccgccgtgcgggcccgaccggtgagtccagcccggcagtcgcaggacccggccgccagcctctccctccacctctccctgcccccagcgccaggcgcgggctgcgctcggtggcggcggcggggccctcaggcggccatggcggcaggcgccggggccgggtccgcgccgcgctggctgagggcgctgagcgagccgctgagcgcggcgcagctgcggcgactggaggagcaccgctacagcgcggcgggcgtctcgctgctcgagccgccgctgcagctctactggacctggctgctccagtggatcccgctctggatggcccccaactccatcaccctgctggggctcgccgtcaacgtggtcaccacgctcgtgctcatctcctactgtcccacggccaccgaagaggtagggctggccgatcgcccgagccgggccccagatgcgctgcgggcgggtcgctggaggcgccgggggaagggcggacccacgcgcggctgagcctctcccgggccccggaggggcggactggccactgccccgggcggtgtccgccctgggccgcctggagactgtcacgccactatcccaatcccgtgaccatcccaagcctcccctgggcagcggaggggctgttaaggtcactgccccaggtcctatgtccgcgcagatcctccccacggccgcggacgggccggagggcgcctgcccagccgctatcccatgcggcgccaacctgtgagacggacccgcggtcgggtgctttgcacactggggactgaacacccccatctccgtcctgcctggcacagggacttgtgccaagcccgagacgccctttgaatactttcgtaaccgttcgtttctggaaggttgagctagtgatcttgaaatgaccggtagcactgatcaaagatgagttaagaggtaacttcctctttgcttcatcgactttttcaagaaaaacaaactggaatgttatcaaggcaataatttttttgtcatcacaacctagggattaaaaaaaccccaacattttattagcaataattacatttgacctttgtacaaaataaggagtaaatataggctttggatagctgttcatcagaagcaccctttgggctgagtgtggagggatagggggcagagtggagttcactcccatctatagtttatactacgtgggataaatattacattgcacattctgtgacattactttctattctctgctccaaatagtgaagtccctttataatcatttgagtgtaggccttgtggaggactcatggaggttgaggttggattaacagaaatacagtggaaatatttcatgccctccatgcatgcatccattttgttgttgtttttgagacaggggtttactctgtcacccaggctggagtgccgtgccgtggctcgatctcggctcactgcaacctccgccttcagggttcaagcgattcttctgcctcagccttccaagtagctgggattacaggcgcgtgccaccacggccgactcacttttgtgtttttagtagatacaaggtttcaccatgttggccaggctcatgcatcctttaaaaacaaaaatttgatc

SEQ ID NO: 58661 - DNA, 1019 bp, Homo sapiens
tcagtctagggttaatttatgcctgctggtaaggcagtacacttctgagaactttacccaatgccccaagtattaatgaggctttctgctttgcctggtgggaacatgaatgtcccagccatgtatgagctttgagaattgtctgaccttcaacattgcagtgcttctctccctggcctttgttagtttcatctcattcaggcacagatgagttctcagccgaagacggaaagatacccttccgtaagacgtccacaacttatgctcctctctctgtgcagctctgtcctctcaggcactctgcctcacaaatcctaattgccttgaccttcctgaactttgtgtttctcttaaacacagcatgattgctggactctgttctggtcatgggacctgcactgtggcctggaaactgactctgggaagttagctggagcagtcgcagggctcatctcatttgtttcccttctgtgagggatcacaagcctgcactgcctgtaatgtttgaaaactgttttttgttttttgtttttttaaaaatatattttattgcctttctagttatataaggtgggagagcaaatctagtccctgatactccattgtgaatggaagcagaggttggcagttggcccctaaggtcttttttcacagcaaaaatttaactgagtaatttcaaatctgtggcataatgcatagtattatattaaaagagccatggatgtaagaatcaagatcaggatcctaatccttactcagttgtttaactttgtgtttcttacattgtggacttctgtgaccctctacctagatgacttaaagcagttaatttgatttctcaatttaattcgcatctgtagaatgagggttagaaatgttctttataacacacggggtgctacaaagtgtgaagccttaggttgagctattttcagaaagcttattatcacttaacaatctttattttatttacattttttataggcaccatactggacataccttttatgtgcactggg

SEQ ID NO: 58662 - DNA, 437 bp, Homo sapiens
taggtggtcaagtgatccacccacctccgcctcccaaagtactgggattacaggtgtgagccaccatgtctggcctgatatttgactacagtagtatgtgcactcattttctgatttgctaagtgacttccacgctagacaacccccctcctcttaggcactcaccttctggcctttggagtgactgtaaaaatcatctggccagacatccttcccaaacatgacatcatcatttaggtaaataaacttctgggacagcccttcgatgcgatgaatgtgactttcaatagcaggtgaactaaaggtaggcaagtggctcaaatttcgaaaaacatccttttaacaacaacaaacaaaaaaagagagtgaatgagagctgtttgggtttggtttagtttttgaaaggaaggaagggaaggcaatgaagagctagagaa

SEQ ID NO: 58663 - DNA, 1660 bp, Homo sapiens
tcacacttacaaatctggagctttctcacccttatggtaagacattttttcccagcctctagaaccaagaactactaaaaaagtacatgctcagaattcatgccatataatttagccattaaacaaacacttgcactgcattctctggcagtacctggcactgtgcttgggccagggttacagtatttacagacagcaccttctcttacggagcttacaatccagcatgggtaaagacttcaagcaaatgtatactgtggcatttctaaaaactactctgttaaattttaaaaccttttgtaacctcctaccaaaaaaaaaaaaaaaaaagaaaaagaaaaaaactaaaactaaggaacagatttcaaaccacttaaaaatacagctttcctccccgttgctaaaagtggctttcttgggccaggtgcggtagctcatgcctgtaaccccagcactttagaaagccaagaagggaggatcacttgagcccaggacttccagaccaacctgggcaacatagggagacctccgtctctatttttaaaaaacggtgggcgagggagcaatatctaaaatcacatacatgcctttttccagttctgacttgctcatagtctctgcacacgtttatgataaagaatactgtatttggccgggagcggtggctcacgcctgtaatcccagcactcggggacgccgagacagggcgatcgcctgagctcaggagttcgagaccagcctgggcaacatggcaaaaccccgtctctaataatgaaaaaatacatactgtatcggggcatcgcggggcacggcgagggcagtgcagggtcgaggcgcccggtccaggctgcggcgccgctactcacctctccgaactggaaggcggagacgatggtgacaacgacgcccaagaagcacacgtagagcccatacctgtgggacaggcaggtataggtctgtctctgcaggagcttgaacagcatcaccccttcaccgccacgccacgccccgaggagcctgagccgccgccgccgccgccgccgcctcagcgagccgccattcaggggccccggtcgggccgccgcgcgcaggtcacagcctccgggcgccgctcattgcagctccggcgacggacgcccgctcggctccgcgccgcggccgccgcttccgggagccgggagcccacgccctcggcgcggcggaggcggacctgcggccggcgaggcggccggcgccgcccgggtctggccgggcgagaggcggctgcggcggcggcggggtctccagcgccacctggaggacggaggggcatagggaaggtgcgcgccctccccacctgcgcttgcgcagcgggccctgagggctgggctgggaggggcggagctgagctgggatccacttacccggttgggcaggcgaccaagagaaaactgccccctgcgtcgagactgtgccatagacggtactataatgccatgaatatttttgtgcataaaaccttctctgcacttagcattctctgcagagtgctaaaaggagatgctgtatgtggctcctttcctccaacccccaactatattgtttgaaagaggaaacctttgggttaaatctgccaaaaccgaatttcgttcattcatttagtcgttaaatatgtaatttg

SEQ ID NO: 58664 - DNA, 2382 bp, Homo sapiens
catcttaggccaaggctccgagtctgggctactccagaacctggaggggagttttttttgttttttttttgtttgtttgttttttgagacaaggtcttgctctgtcacccaggccgagtgaagtggtgtgataaaggctcactgcagcctcgacccccaaggctcaagtgatcatcccaactcagtctcccgagtaactggaaccggctttttttctttttcattttttttttttttttttgtagaagaggggtttcgctatgttacccaggctgatctctagttcttgggttcaagcgatcctcccaactcggcctcccaaagtggtggcattccaggggtgatggcttttggatgcctcccaaagtgatggctattcacggcgcccggcctgggaaatcttatttccaggaaatattctccagttgcgctctcctggaaagcagcacaatgggcctcccggctccgtgggcgcgcagtcccacccgcctgccccgcaccccacccgcgtactctccaccccacccgttcccaccctgtctgggttttcgggtgttcaccattgaggtgggagccacatctgcgccccgtgacctggcgaacctcattgaacacttctgcccgacccccgcagcagcagcgcgaccggatggcatgggtgtcaccacgcggtggccactctcactgctgcgaagcgccggcggcgggacctcggagggggcgccctcggggtgcgaggcccggcactccggaaatcccccgggagggaggggttgggagaaataaatccttttctccagagttgcgcaagagccagcgcggtagggccagagtgggaaggccagagcgggcgtccccgccagtgaccccacgccgcccgtccgcgcccaacccggcctccgccgagtgtccaaaccaaaagcgaaaggaacccgaccccgcgtcccctccggcggctccgtagtcgcgtccgcttggagctcgccgggcgcctccgaccctgccgggccgctttgtgacttcactcgtttcgcaacaagcccgggcagcccgcgccccacccactctggcccggcagcctcgccgcccgcagcctcgctccgctcctcgcgcttcccctccctccggggctgggcctgccccggccgtcgcggagcctcccctcccaccgtccgtgagtgtacgcgcccggccgccgcctccaggcagcccggagcaacccggcgcccggccccgctgggcgcagcactccgtcggcggcggcggcggcgcgatgctgtgcttcctgaggggaatggctttcgtccccttcctcttggtgacctggtcgtcagccgccttcattatctcctacgtggtcgccgtgctctccgggcacgtcaaccccttcctcccgtatatcaggtgagtggcagggtgggcgtcagggccccaggagcaggcacagggaccacagggagcgctgccgacggggagggaaggcgtccggacccagcttggggcgtcgtgtggtcaggcagaggtgggagcaggaggagaggtgctcccgatagcctgggatgtttagggaggcagcgggtgcggcgctgagcacttctgcctgtacccggagcatggaacagggtggcagcaaggagaggttcaggatagatggtagagctttcattctgggtatgggacagaatctcagcaggacgttcttaggcgatattgaaacaagatgggttctgatagatgacatatattatacaagaggtagatccaggtatatgctaaacagccactattttcacttctgcatcccaacatcccttgaagtggatgtttgggcttattattcccgcaagcgagcggtggtgtaaagttgatgaaatatcatcaacgtgacactgatgtcacactagttaatggtaggagcagaattcacacccggccatgcagaaagcaacactgtgctgcccccaggtctctgggagtctggcttaaattctctggagctgcaccagacacctctgggcactgtgaccccaaagtcctcaacttgtcaacaacttgtgacatcttttgtgttattttacccattcacttttcctgtgctttggcctctaccttcctgaggggcacttcagtgccagggacagtggtctgatcctcctatgtgggttccagctcagtgcctttctcatagtggcaggattctttaaacgttagaaccatccatccttatctaagtagtgtgacccctctggacaggcattggttggtgaacggatgataaggttggtgacacccaaggtttgttactgctatgatagaaaatgtagggcgtcttcttccctgcagccattctgtctggtgagcaatgttctgtgtttttttgtt

SEQ ID NO: 58665 - DNA, 1133 bp, Homo sapiens
ggtgatgagaggtcacggtacatgaataaagactgtaattcttgttttactccatttgtcagtctcagcagtgaaaggtgatttccaggcgactctataaaccagtatcaccggacctacctcctcacaaactgtagaaaagcggttgaggaactgtacagtgtgcaccacaaattggtttagaaaagccaccgttcttttctgttgaatagctggcacctgtgttacgtaaaaacaaacatggttcatacaggaggaacgtacacagtgcaaatcttttcatatttggacataatcacgaggcactttgctgtgtgatatgaatttcttgaaggactgggaatagtcattaacttgtttcctaagctgtgggtggggtgtccgaagatgacagaggtgcacaaaagtttgagaacaggctctagactcactggtacgaattttggcaggcaaaaagcaccacacataaacacacacaaaatcttgggggctgaataagaggtagggctagctatcgcaaccggcgtgtgtcgccggcggcagagagacaagcgagatgggaagcgacagttgggagatgcacaccgtctccttaatcagctcaggagggaccccatttcaaggtggactgtggggctctccctcctgaggccccacaggcctgtcacaagggcccgaggccgtgacagggtggggactcggaaggtgggtgtctccccggaaagctgcgtcttccccatcctcctcccggctcgtcgggagtctagcaccgtcttttacaaaccttggtcaggtctatgcctgaccccatgagaggaagcccgtcctcatccatctcctcagcgggcggtggaccccgagttcacccacaaacccctcccagatggggcccgcccaacccggtaatcacgtctcaactttccccccaagtgcccgcctccggggcccttcccgccggaagaaagcttctccgctcactaatcactcggcggcttccggagagcccgcctcctcgctcggcattctgggattggtagttttagtccagattgtgacgtcaatttcggggtggcgcgcggtggtgcaaggatgcagttagagcactgaaatcttagaaaggaggcaacaaaaca

SEQ ID NO: 58666 - DNA, 1433 bp, Homo sapiens
gtggagcttaatacctaggtgatgggtgtgcaaaccaccatagcacacgttttacctttgtaataaacctgcacgtcccgcacacgtatcccggaacttaaaaattaaaataataatattcttaaaactaggcagaagaccttaacctgtcagggactagtgtgcattctggaagtagcattcccacatgagaattatgggttttagagtttttggttttttaaaaaattcgacacaagggttgtcctgaaaacagctggactcagtaacaaacatatcaagcaccttaagagtatgtactgagaatgagtcccacctcgagacgcttataaactagtaactttaggaatggacatcagggactggagacttttgaagggtgaccagcaagtgttatggacacggagacagagaggtatagaagtgcaagagattcgaggtcacgaaattgttccgtccctacacctactgctcattaaagcagtggccggggcctcaccgtacacgttggacaggacttgcccctgtaaaactacaacggcagagaagaagggagggaacaagataagtctctgcaatgagcgccgacacctctccccgggccaggcgagttcctcaagaccccgctcccacctcccggggcccgaagtgggaaggaagaactcctgggaatagagtggcaaggctgggcggccggcagaaaagcatcccggcctctcgggctcccagctcgatacgcaccgcagagcgccaggaaccgaccagaggcaggctggtcttccttgggggctgccgcgacgcgctgtggctctgcttccgggtcggagggcgagcgcagcgattggctcccggggcctcccgcgaggtttgaactgtattcagcggcgacagcggcgactgcggcggccgcgggagggcatcccgttggggatccttccgcacactgaagagtacgtcttcgggtctacccctaatcacgtaagtctcgcgtctgccctacctgccctgtcgcatttttaagtggtgattcaggctgtggcttttgagggtgttttgcactgtaatacctcggtcgtagcaaagtgccgtgggaccgaagtattatggtgcagtgacttgacgctcgagcctggttgggcctgggggctgtaggcggagttcacagtatctagcgatggagctggtaggtcctgagggttcgtctgcagcttggaagacaggcccgtagaggcctgcttaacttccattagttaggcaggaaacctgggttctagtcccactatgtacacggactccaattcctcaactttctcctactcctgattagttacagcctcccaaggaacctttgggacttgcactcgaacactgataatgatgttgagtgcaatttttaaattgagcacctactaaatgcctggcactaggtgggt

SEQ ID NO: 58667 - DNA, 781 bp, Homo sapiens
ggtgaacagcataaatatcctgatgtcattttagttaaaacttctggagtttctaggctttagaagcaagaatttgaattaaaccactgtgttgctgagcagatattagaagctaacctaatggtggctctagaagtgagtatatagtaatggagtaatcagagcactactgtttggggtattttgccatggcttcaaaatgttgaccttggcaagtctctgaaatacaagtcttattttttcctaaatacaattcagccagtgaattacatcatctttaaaatttaacatttttgtcatgtagaaggaatgagaaaaggaggtcaaaggtgactttcctaatatcatttgaagcattttttttgttcttataattggcactaagacagtcccagattttattaaccatttgaatcttttccaaaactcttttctattagagattaattcccaggaaaagcatataatgttaattacgttttcattttggctacatttcatccagttcacagctgaaaaagaaagtccacatatatgtgaaagaattcctagggtctactcagacttctgattacagaagtatggcagactaggcccccagattgattcttccattgaaaataattaataatgttggatagcatatttcaaaaattcttcttaaatgcgttggtaagtaggcaaatgtaatgaaaatataggtcaaaaataggtgaaggaggaaagccagcgaggcaagtgaagaagggaagccagcttttagcccaggaactggccagca

SEQ ID NO: 58668 - DNA, 449 bp, Homo sapiens
tattaccaaatattgaggtgataaatatttaccaaaaaatctgacagttgtatagggccaacttggtttattatatcaatttgcaatatcggtaagtacctactaagtttggggcactataacatgataaaatccttgtctacagagagcttttaggtggatttaaaaatgcagtgttaccatttctatttataaagtgtgaaaacaaagtggatgccagatcacacacaagccagcagagaatgtctcccagtcttgtttacagtactgggattgtggtcaaggtgaatacacacagtcctttactctcttatcagagagtgaaggtttaaagagaaaccaacaaaagtgtccaggtactttttttttttcttcagacagggtctcagctaggctggagtatagtggcacgatcacagctgactgcagccttgatctcctgggctcaa

SEQ ID NO: 58669 - DNA, 803 bp, Homo sapiens
ccaatagtacatggcagaagtgttgctgtggcagtttcttaagatacaggtctggaaactggcacttgatctggtaaggtccgaactatataccaagaaactggctatttccacttcctatctctgggatatttgctgttagaacctagtctctattctgtgaggaagcctaggccacctcatggagaggaaccaataggcagcatcaacttaccattcatgaaagtaagccatcttggaggtgggtcatccaaccccagttaggccacatggagcagagataagctgtcctgctgagacctgccaaaatggcaaattcttaaataattattgctgtttaagtcatgaaattttggggtagcttaatatacagcaatagaaacctggacacctagtaatctgtttgtgagaagagactatcagatgcttctcagtactatttttcctgttagttggtgactcattcctttgtagacagtctatagatttcttttgtgtttactccctcttggggacttcccacttgtgcctgcctcctgtttagcaggaatctgtagcagacaaatcccaagctgaagcagggattaggggtgagcttctgtgagcagtggaagtttgcacaacctaacaaagaggtaatttctgcaggggtgcttttggcaagagagatgcccatatgttggattgcataattcttttttcttcccagttgggggtcatcaggtcatctgactgctaattcttcaggtatggacttttcttccagctctgtgaatctgttctaaagggtagagtctgagatg

SEQ ID NO: 58670 - DNA, 1996 bp, Homo sapiens
taacatttagtaatgtgcttgaggtcacagaggaacaaactgatagacaaagggctaaaataataacagttcccattacttgaacatttgtcatgtgctggggattgtagtatgtatgtaaattgcatatattttcttgtttcctatacttctctcagggataagtactactgtcttgactgttttatctttaaggaatctgaaacttaggataaacaacttgcctaatttcttatgatggagatgtaatagtggttggaatttggacctattccttctgattctggagctcaccagttaaccactctgctaaactgcctccccaagaggtaaaaaatatctagtgctttcaagtccaaatcactttccaatagcaatagttgataatatcatgagctgcccatgcttccagatgggggtagatgctagtttggagggaaaggctgtgccatgggacagaagactcaatgaggagggtgagtattaccacaagctgggacccatttgtaatggtatttatagaagtctaggagcacagtattcaattagcaaaagcaaactccctaggtattataaccccctttttttcctccccacttatctttatgagattttgcctgagagatagaatctaaaaggataaaaataggctctttaaacttcagggaggaagcagtgatgttttcaatagactatgtttccatctccacccactccaaacaagttaagtattgtatgacatgaagtctaggaaaagcctggcactctataaaaaatactgggaaaattctgtccagcatggaatatcagcagcttattgtacagcataaagtactaactcagcattgacctgctcccaaaaagggcaaaatgagaagaaaagagcagtggatgattggaaagagggctcagatatcagccctttacctgttgaaagggatgtgctatagcaattttgctggcttggcctggggacatgtgaaatggtggaggatgatttagatgtctcagtatcaactttgatatctctttacttcagggaatcacaagttcaaattccaggagagttggatcagcctttcctctctggcagccaggcaaagcgagggtcatgcgatctactcagcactttgggatgtgacttcaaaaccaaagaacaaggtgcacattttgagaaacgtgtactccttgtttatgtggctgcttctttaacagagtgagggatatgtacttactggacacagttttggttagcccagcatcacgtttttttctggaaacctcaccccactttttatgtggttgtaggaattcccccaccccctgccagtacaacggctcttctttggctctagtggattggaacagggcaggcccctcccaagagccagtgaccaagtatggtggggacattgaggcagacctatttctgagaaacacagaaatttgttgggcaactgtattgcccaactttggctcaaaaactccatgatgactttgctgaactttccttagaccatagacccaccaaaaatgtttccaaccaatctactctctctctctccttcccttggggttaggcttgccttgcaatctgatggctttgcctatcctcccctatttctgttcacacattaattccccctaataaaacccctgctcatttaacaccttctcatcttctgtttcttggaggacctcatcttatgcatctggtttaaatcctagctctcccacacagtagtcgtgtgacctttgataatcactacattgtgctgtcctcaatttcctcttctgtaaaatgaaagtgtggggtaagagcacctacatcacagtggtgttataattggatgtaataaccctcagtcatttacctggcatgcggtatagttgtatgcaggagagtctactgtttagaaaaaccttgaacctaattgttagcaccatcagtctgttctggcttgtgtgctgtaagagccctctctgggtctacatt

SEQ ID NO: 58671 - DNA, 1184 bp, Homo sapiens
actttattccaagattatcttgacttagcaactttcttactcttttaaagactaccacctgactctatttcaaatatttctgcctgtgatgtaaaaaatctctatcaaaatggtttaaaagcctggggaacaaagaaaaaaaaatgccaagggtagtttcccttgctgacaagaggtgtttatgttgcctttaatagtcatgaaggatgttgtaaaatacttcaggatcagggctccccagactgttgattttatgggcagcttgtttgcttagctgtttgtttgtgttacatttttaaatttaaaaaatgtttaagcttattatctttcgcagagggagttgattttggaattgctgaaaggttcaaatgtggtattttaaaaagtgaaacaccagattctagcaattttgctgctatgtgctaaagattcagcacattagtacctaaaaactggatttgattattctttttctcttaagcctccaaaatgccattgtttcatctgacatacaatttatgctagagttacttaaactggtgtatgcagtaactcctattgcagtgttcttgggagatgtgaggcctagggtttttaccttttggtgtcatttcaatgcaatagtgatgagttcacagggttaggaggaaagggtgttgccctctttcactcattccttgtgtgtgtgacaaatctgggcagaacattcaaatgctgtgttctgaattttcctcctcactgaattgagagaaattttggaagtttggaaggctctcttgaacttttaggatgaacaaaataacactatgagaagttaaattgatttgcctctgtttgaggttgatgggggccttcagcatataaaagtaaacatgcagaatgccagccagtgctattccaaggcagagaatggctcaagaacattttatgcatgcatacagttttaaaaaaatcagaattgtggcattgtgccaaaagcacctctaccttcatcctagtgttcttttgaagaagaaaacatattattatttataaagagacaaatcagagcattcaatagtgacctaggtaaaacaatactgacaaaataacagtaattatactatgcatttattgattcattcatatttttcattccttctagtcttccagtgcctcacaagctagtcaagcatgccacatac

SEQ ID NO: 58672 - DNA, 1219 bp, Homo sapiens
atcatcagagatcagaagtcttctgtcactggctgaattgtgtccaaattcatgtgttgaagccctaactcccagtacgtcaaaatatgactgtatttggagacagagtctttacagagataattaagttaaaatgaggtcagtggggtgggcccaaatccaacctggctggtgttgtttcacacagaggatgtttagacacagagatatgtatggagggaagatgaagtgaagacacagggggagaagaaggaggccacctacaagccgaggggaggagcccatgacagagccttctctaaggcccttgcaagggctgatactttgattttggactttcaactcccagaactatgaaaaaatcaatttctgtggtttaaactacctagcctatgatactttgttatggcagccctagcaaacttatacatcttttatatctgattccaaagtgcaaaaaagatgaagagtgcagtgacctcttctcaaaagttacctcacagacctcacagggttttaggcaataccggatgccctttggcctaaaccctggacttgactaagaaatgcagcctccaatgacattgcgggaaaagggaatctgggaacttctatgacacaattcagtcttgctgagcatttggggctaatatttaactctgaacatatattgacataggcaattcttccataacagattcatacaaaatttaaaaatgcatatagaagccttaatttttatttaaattcttttatttaattgtgttttagaggcagagaatagtgtgtctttttttgcctcttttataatttttatttttttttttcatttttgccactgtctttctttgcgctttctagggcattacatttttcttttccgttttctccatgtttcttagcgagattctctaaaaggttacttctatttccatcacatcatcatctagctccagcaggcctacttttcttcatttcctctattgtattttctgcttttcattcttgctgtctgctcctctctcatcatccttgcctctgtctgtttaatcctcctgtccttcattttccttttttgcctctgcattcagcatttctacttccaatctccctcctctgctctttcttctttcctctgatctgcagacttgcttctgtcccctccttctgttcccctcctggatgtgtctttggccaacctttccttctctgagacttc

SEQ ID NO: 58673 - DNA, 1500 bp, Homo sapiens
gaagctcttcccttctgaagcttgccattaaccatggctactaccaaccctccagagtaactcatgaggtctagggaatgagagggttttctcttcctactccctagaaggaagtacatgccccatggggaaggaaagattcatctttctgctattcctagatttccctgaaagataacagcaatacagaggaacaagataaacattaacatctgatggccacctgcatgtgccaatgtttgtcttagctgagtctgaaggccattgccacctttgcgaataagccagggcatgacactctccatgaagctcccaagaatatttaggccagcctatttaagaatggaaaagggccttatttcctcaattttgaaaattgttcatagattgagccagtagagttatccaatgtggatgtaagattcgccatgaaggggtcaattgagtcagaggcaaatgtttgctgcagatccaggctgttggatagagccccaaatatttgggaatgcagggatgagagggaagaagaaggctttcctatttgctgtttacctatcagtctggggacaaattggtgatttcaggctcatgcctctatatcacaatgcgttagtgtccaccattaatgtggtgcttggcagagaggttcagggctgaacacacaagggccagagctgcttttccacatcagctctctcaagcctggagaatcttggctggaagtgtgggggaagggaaagggaagaagggaggacatggccccagccacccaccgtgccattcctgggttttgattaaagaggaaaatattggctctgacattctcgatttgcaagatccaaatgtattttgactttttagaagaactaagggttcaggtttcacaagaatgatcctgcctagaacttctgactcaaacttaaagctgtttggcttctcaatagttgaatgcacagcaagtgcagttaacaaagtgacattgctatggctgcaagttgcacaacagcataatgtcagccttctgatgagagctgggctgttgagcaatgccacttggaagagagaggtcacacacagaaacagttctaagaatgttatatctttataaatattcaatatatttctttatgagttagaacccagactttccaaacctctgattcatgtttttccagaaatctcaggtcaggcagtacattttcagttgacaagttaagttcattttgaaatatctcacagcgaaaccagaatagggcatttcaagtgggggaggagttccacacagaggtctccactcattgcatctaccctctcttccagtctctacctgcacccctttccttaatgcttagtttgcagtagctgaaatcaaaagcctccatgaggcaagttgggcagactcaggcaaaattccccatcctgtcatcctagcagggaagagaccagcattctagtatgtccagtagaggactgaggcaccctgcaatctctcctcccagg

SEQ ID NO: 58674 - DNA, 1521 bp, Homo sapiens
cccacagactgtctaacttaagggaagcctgaaatgatgcttattgtatgtgtgtcattgatcttctcaaaattcatcctcaaatatctgttccatactaggaggtaagaatcagcagaaaagaaggaatctttggagagccaaaaccatctctacaccaaattgagagactggaattataaggtgaatgcaattaactggcagtcgcatccatgttgagaacacagtcatccctttaatagagaacatttgctgtgcttgacaaactcacagtgaaatggttggatccataggaagcaacatgctgaaaatggtttcaatatgatcctgttttttcactcaatagccattgattgagggtgtccagccaaaaacaatgagaaaatgagccaacaatagtcttaccctttgaccatattagataaagtcgcagctgaaatttgttatatgtttcaggaataacaaagcatccatatggaacatatatttggcagtgtggcagctgatgaaaccaggaaaattagacaaattatcaattgctcgctcccaaattaccccaaaaagaaattagatccattttcagtagctttgccttcaaatttcttcattccgtgagtcaccactaccttctgccaaactaaatatgtctatgaacggctggaaactttaatggaaagaaacataaaactcaaactacgtaggaaaatttaagcttcttcatggaagatcttcgtggaagactagcaagttaggaatgtgtgaagacagacaacacatcgataattccttttgtttggggtcacttctgagttagagagcaatgcaacatgctggcttgacttcaaattaaaatcagctttttcctttatttcttttgtaagcctccaatccctcaaactactagggtttattaaggtacacagtcctacagtcaggtcgatcagatttgggataaagagacttcatgatgttatccgatggatggtagaaattagtaaatgaagatttcatgaatggctaagagcttaattttctagaaactattctgaggtgttacaccagaagaatatgacatagcagttcactttgagtgtatggactgtggttatgagcactaccctcatatgagtttattgaggttaagtttaaagggtccagctgtgcaaagagctctggaccaagcatgaggtgactgaaatgtagccttggctttccgaccagtagctccagcttttccgaccaacttttgtgacctcatgcacatcatgttttttctggaccttggtcctttcatctgggaagtgagagcactggatcagattgctctatatggttctttctagctctctaatttttcaattctgcattggcaaatagaaaccacttgtagtgttctctaagggctggtgctccagctgtgattcataccttagccagggatgtaccagttgttgcataccttcccttgcccaacactactccttttaaataactcacatagaagtagagaggaactgagtg

SEQ ID NO: 58675 - DNA, 706 bp, Homo sapiens
ggaatttgcctattcaaatagtagaaggcacttctgattctttgtcactagtgatttaaaaactatttgttgccaaatccactgtaagtactgatcgccaataccctcacaagcctctttcttcccatctcccttactgatctccagactggtatacacaggccaccctctaccctgccagtcatacacacacataccccacctgcctagagagaggctgacatttgggaaggatgagagagacttcaagtgtgtgagtcatcacaggagctattcaaagcatagtgggtaactgaggtaagctgtctacactggagtgatatgaacctttaagaatgactcatgctcagtttcctggaactctctaaaactccaaagaattataaggaacaagcatctggctttaaatctttctctgtcctataatatacagtgagatagatgcatgggagctagattctttaagtgatcagttcccacaggaatcattgacttttgcttgtgtgtattatttatacgccttgacttggctgtctactttttactggctgttgactttctaatcacctaagagctatttaagagataagtgattctgtacttgtcagagacccttttccagatggtgatatcattgatgggtcccggagaagaactatgccaaaagagagcaacaacaaaaaaatcaaggtcaagtggcatagag

SEQ ID NO: 58676 - DNA, 3869 bp, Homo sapiens
aagggaagaatcagaaagacatgagaaaaaaagaaaaaaaaatcagaaaacactttctcaaaaatcattcacaaacccaaattttaaaagttcttttttttttaatcttagataaatggaatattaattgattccagatgtctgggccacaatgaaaatgccctgtaaaatttgagggcaacagtcataagaaaatactcactgtaggtgtaatcatttttgtttgttccaggtcttttacagcaggtcagggtgggtattatgaggccgatgtgaatagaaaactgaagtcttaaaaacatgtgctgctttgtgggtggggtttgtgaaagcatctagttacatttggacacccaggcaggtatgctattatgagcctgggtaaactgccttttgtccattgaaacaatgaacaaattgcacagctgggatttaagtcaatcttttccccccagtcaagccacctatttccattgtatgcctattgtagcagcccagatagtgacccaagctccagtccactcccttactcccttcccccgactcactcacttggaaataccttgagagtcagagtacaatcagctggtgagctctgcctctgggcaggacacctttacccactgaattacatgtgaaagaccacgcagctccctcaaaccacttcctgcttcaagtacagaaaaaagtaacaacttattaagagctccacttctgaagtgttcagcatacacagcatgaaaagtgcatttggaaacaattttcttaacttgtaattaatgcagagataacgctccacagcctcttttatgatcccctaagtaaggagacaaaaactccagctgctagatcacatagtatgtatgcacagtgacgtcatttctttgaaagcaaggtggcctgcatgtgttggcatctcaggaacagcagaatcaggtgcctgacaagggtgtatctttaactcctggagccacttacttgactagggaaagtcgtagtggtgaagtgtttgaaagcagcaactgaatgctgcactaagtggcagagacgtcttatgaattgagccctcaggcaattgaatcggtggagccagtgacagcagcttaaaagcgcttgcaaattgaaaaaaaaacacaagtcttgaaggatataattttgctgagaatggaaactagaactacggccagcaatcggaaacgagaagtcggtgcactgacagcagcagccagatttacctaaagggacttcacgacactgaatataaaatcagagttttataacacagaaccccaagtccaaactttgcccatgaaagtcctcttctaaacagaaaagttgggcaagcagctcttagaaagtttctgctttccatatacagtatgtatttgtttaaattatacaaatatgcaaggtcagcaagagttgtcaaggagttcttttttggaagaacaaattacactttactctaactttaacactctctctgggcataagtgcagagttccgggaccttagctccaaagatcatatttaaaagctttaatatcatctaaaatacaacccttcatatatagcatgccttgtaaataaagtcctgatgagttacacacacagagacacatacacacagagacacatacacacatgcaaaagaacatggtcttaaaaataaaacatctgcacctgcaaaagaaaaaaaaaatccccaagttcatatccatgctctatagcccttagccatagagaggatttaaaggaatcttctgtaatgacaccacggaagccctgcagaagtggaggatttagcataagtaccttgcaatagtttctactcatacagatatctgtgcaaatgcatccatctccccgagctatttttcagattccacagaattgcatattcagcaatttataaataactctcggttccgaaacaatgaaaattttaaagtgaagaacagttctaggcagaagcaaacagtacacaatttaaatagaattccccaatgacttcaaagagtaagaaatatttaccttcaagaaatcacaaaagcagcacttaaataattgggttggaagactgctgatttttcccattgcttctgaagtacaaagtctgaaaatgaattggttagcaggaataatgaagcaaaaagaaatccagagagatgggagatgttgagagcaatgtcacatttcaattttgaggactttattccattgcgcaggctctatctgctctgaatttagcagtgacagtgagatttagcaaacagaagagggatttagagaaaatcctcacatttatctacaaaacacagacactgtagacaggaaacagctgggggaacatttgccttctctctctctccctcttctggcaaagttattgagtaaggacttttttgggcatggtgacaaataacatcatacctttgcattttaaaactagagcacagaagcatttttttcccttaaaagaatgtgtgttagtgacagggttcgcagacattaaaatacttatgctgccatagaaaataaggatctgttttctgattaactttctgctgggcatgaagacacaaacgtctgctaatacaccttaccagtattaaaggaatatgggggatgggagagcaattttagattctagagcaaatgcattatttaaaacaaaaaaagaaagaaaggacgataagaccctctccagcaaactctacaattttaaccctgaagtgactggggtaaagtagattggaagacagcactcgggtgaccccttgtcccagttgccaagtgagaggtgtgatctcatttcctagaacctatggaggggcaggcagcattggattggtccctttagggcactgtctcatactttttctcctgcgatgaggcaaagactatgccgagctgtaaaacccaactgaaatagaacatttttctttattcttctactaggctgcctgtcactgtcccctccccaccccaccactctgggagaagggtacctggggggcaaacaattttcctgttgtttgaattttccatataactcaaacctgtgtgtgtgtgtgtgtgtgtgtgtgtgtgtgtgtgtgtgtatgacagagggagtctgtgtgccagagtgtgttttctttctctgatttttgtgtattctaaataacaccagctggctagcaataccctctcgagggttatgatgtcattcaaatccctcaactgggtgactggccggcaacatggtccaagccagctgttttgctatttataatgtacacttgcctttgccattgagaattcagttctgatcttttgtcgatacagtttgtacctatttccctttggttttgtgaagcagtagataagaaagtgaattataaaataaggttgcaaaagcccagagcagacatacctctttccctagagagctctccaggcctggtttcccaggagtggtggaaataacctggaccttgaattttttctttttttttttttccacatgactctcaggggactgacacatcaactgaaaacacagttctgcttgaaatcctactctggctctttgtgttatcctggggccagaaatttgtttgtagaagtgggtgccctaacaaaaaacaaacaaacctgctttgtttggaagggggttgggtttgtttgagtcttctgtgtggttaatacattgtagcaatgtttacctttcagaaatcaaagttagaaatctggaattatgttgtgtcaatggtgcactatgttcagcaacattttgtgagctctactatgtgcccaactacaacatccctaggaaaacaaagaggaataagatatggtcaagtcccttcaggggctttcagctg

SEQ ID NO: 58677 - DNA, 1309 bp, Homo sapiens
tccccccaactttttttttcttctcaagccatgttcccagtctttcctgtgttaactggagaggcgttcatccaaaaggtaatttcatatccatgtacaatagggcatatttacaatttatttcatgaatgtctttgcttactcccaaggaaagctcagaatggacatttggaggtaagggaattttggaatcaaataaagggtgaggcttaaggttctagggcaaccaccaggcaaagaacttgggggaaactattggatgtttcttttggatcatggtttgtgaggagggttggtcatgggttgctcaaactaatgttggaggtcaagaacttgtcaattcagaatataaaactcagaggaaagacagggcctcaaaaactcaacatgctgccgagcaaggggcctaatgtcagctccaaaacatctgctcagaaagattcctgtgattccccaggaagatttgctcaaaggagctgctctaactccttaaagaagtgtttcgcccacgactagggaaaacagaaatagggaggagaaatcctctcactaaagaaatcaatgctttcttttcaacatcaaacttggatcttatttcttctaaaatgtcaaaagggcaaatactggaaacagaaacgaaactgttgtggttgtgtgagcaaagtaattcttcgttatggcagaggagaagtcacggcatggggtaaggatgggttggtggagtgagagaacttgaggactcgtcacgcttgccccacgttgcataaaatgtggggaaaagagacaccaacgccaaacttcaggggcaggacccacataaatgctttcttggggaataaaaaaatgtgcgcgccctctagtggacttctgagaaactgccactgcactcttgaccgtggatgcgttctggcaggagtgggttttttttttgaaagctctggatttaaatacattttaagctacacttatctttagttttattaagtcttttgaaataagtaagatagatgttcaactcactgtagtttaaaaaggggaagattgataagggggaaagaaagatcataaacttcatcagggcatggatggattcctcatggccatattcccagcacttaactccgggtgcatgagctcaaaacattttgttgaatgaatgcaagtctggaaaacaaatgatgataaaggtaaaatataaaaattgcacaaactctttaagagtaaaataaccaacctcctcattttataagaaaaataagaccaggaagaggggctgttggaggatagaaaaatgacttctcgagaagca

SEQ ID NO: 58678 - DNA, 1126 bp, Homo sapiens
aacaaacatctaagactgaacatggtggctgatacctataatcccagcactttgggaggttgaagtgggagaattgcttgaggctgagagtttgagtctagcctgggaaacatggcgaggtcctcatctttacaaaaaaaaatttttaaaaacttagctgagcctagtgttactcgtctatagtcccagctacttgggagactgaggtgggatgatagcttgagctcaggagttcaaggctgcagtgagttatgattgtacctacactctggctcagatgacagaggaagacacagtctcaaaaacaaacaaactccaaatatataatgaattacttttttatcagatattcttatgtctgcctactttcttaacagatattcctagtggtgaattcttagggtagacattatatacatttttgggttttaataaaaactgtccaaaagtgttgtcttccaaaagtgttctcaatttacacttcccctaacaggatagaattggggctactccttgtagctttgccaacaattaattatgaccaaggattacattggccaagtgcttcgggcaggggcaaagtctaaagtggcagccaaactgctattgctctttgatcttgccatgtttatataatatgtctagaaatagagcaggaaagcaaacggtgacattgatcatttggggttagagttatccagtaagtattgaaacacctaaatatatatcagggattcttaacctagtgtctatgaaccttactccagacttttatcccacttaatataagagtctgctccaagctgaacaggcctatttaaaccagaggccatgactaggccaccaggaaacttgagaataaatgaaaggtttatgggaaaaggaggagtgaaggaaaactgcccatagcgagtgcacttgtcatatggatcaacttatttcatccttaacatatggtgcagacatgtttatacccattttatcaatggagaaactgataactttgagagtctgggacttccctcatggtcatgcagctaattaaaaacagacctgggagccgaaccgtgattgttctgaccctaaaccagtgctgtttccattataacaccagcacgtgtttgcc

SEQ ID NO: 58679 - DNA, 1425 bp, Homo sapiens
ggaactcaattttcagcagcagcagcagcaggggcagaatatagcaagttagggatgtgtgcaaggatttatcatgtttatggagggagagttgtaggtcaatatggctagagggtagaatgtggtggggaggggacatgtgtgaggatggcacagcctgtgtgacctgctaacggatcaaatctgtaccttttgtgagatgggaatcaataaaggcttttaagcagggaatatgccacagtcaggtttgcatattagaaacacagctctggctggggatggagaatggattggagggggaagtcaggatagaagttagggggtctagttaggaggctaaaacaataattcagaggaaagttaacaagaacctagaaacactaatgataataattatagctcacagctccatggtgcatcctctgttctgaatgtattatatacattgataattcagtcctcacaacactcctacaaggtcagttctatttactacttatttacagattagaaaattgtgctgtagagaagtaaaataatttgccaaggtcacactccacttaggaagtggtagagcagggatttgatctcagacagtctgattcacagctaagttatgaagagtggcccaagagaggagatgatgataagcggcagggagaactgacagtatttgttgactcaatatagaggtaggtgggtgatggtaaaggagagagaggaatccgagagaccctgaaggctgtgatttgggtgctggggtaggtggggctagagacagcatcatttcatcttttgtgctgcgtacagagcagcaacttgatagagcctgccctgccacttgtgtggcattaagagaacccgtgtcatcctgtttttcagtttgatctgtgcacatgggggtttcctagccagggttggcatgcatatgagtaatgtgaagacttcgctggaatgtcacagggattacgatcctgcccttctgacctcccagggatactgtgagcaacaaatgagataatgagaggcagcccggcagagtgggaagccagaggcttgagctcaagtgcacttcctgtttctgaacccttgtgggaagtcagctaatgacacggagcctcagtttccccactggtgaaataaaagtcattcttctcctgatgaccacagggggctgctgtgaaaggagttcaggatgtcactgggtggatgcactttgtaaatgattggatacttcacaagcaagcacgggagtggttactgtgctgataactacatgccagtggaaaaatgagctgtactgggagtgtatgacatctaggcaaatcattttcattgataaacatgtctatagttatcaaacaaaagcgatatattgacccatattttcaaataatgctctgaaatcagtgaactttcaaaaaa

SEQ ID NO: 58680 - DNA, 555 bp, Homo sapiens
tggagctctaaagctcagtcattggctggaagctggtgtgctcatcttattagaacttgtaacccgggaaggtcagggtcaatgatttcaagtctcctctttggattggcaggaagtgggatgtgagcacaggatggggctccgatgtggtttctgggggtgggtggtggggatggggcaccagggcactgtgtaagagagatgggaccctgaccagactccttgctgtaattgcctgtttctgtgtctgcatcccctctagactgttattttctggaagggcagggaccatttctatcttgttgatcttcaaattccccagtgcctggtgcatagctggcatatttgtggaatgaatgattcacttttgcagtctcttccctgtgtgaaagttattttatgtatcaggaaagcaaattctttttgcatctagaaactttcagcctcctcctgtcttgatcttaaagagtttttgtcttattttttccctttggaaatgcttgatgctcaccgatatagggaccatttactgaaggtttatcacacaccaggcac

SEQ ID NO: 58681 - DNA, 616 bp, Homo sapiens
gggatgttgaaaagtaaagatatccacattgcaggagaatctgaggtctgaggcataagggatgtagaaagagaaaacaatctggggagaaagctgtgtcttcaggagaaagttacttttgacctaaaacaagagggaaagaaaaggttctaagaaggagctgaggatttagatttagttgattatagtccatgagtttttcaagttgaggagaggtgggagattggaatagattcagggctttattgagccatgtcggaataaaattccaggtgaagaggcttggacttgggactgctgatggtgtctcgagtaaacagaagtgtgagtcacagtagatttggtcctgacacttccatgggagaaggtgtgctatcagttttattcatggcttacttcttggtatgtctgatctttaaggtagatgagcttactttgtgctggtagtatgataagatttttcacattaattgattttagcattgtccaatgctaacaccaattcattagcccagttttacagaaaacaaaactgagacttactatgtggcagaagtagcactgaaactcatgcacatctgacagtagaacttgtttccctgatcgtggcatatat

SEQ ID NO: 58682 - DNA, 951 bp, Homo sapiens
cctgtcggcccctggacttgttgcccattatctatcatgggatctacacttagaaagtagagcaaaagaaaacacaaagaaagacattgtgtaaatatattgatcataaccaattagaagactaattatgaaacagaatgttgaagccattttattaaaatataggcataaatggagacttcctctattaagaaaaagagtcaaatgtgaatgaattttctccaaaccctctttaaaagacagaatcctgagcagaaggtttgctaccctacagggctccacattccattgtgtaggccgctggccacccatggtcatttacacttaaatttagataaattaaaataaaataaaaactcagttatttaggcatactagagacatttcaagtgctcagtgatcacatggaactagaagctgttgaatcagacagtgcaggcgtggaatattcccatcatcacagaaagttttgtggatagtactgctgtaggggatatctcttgctcttatcaaataatctattgattcacattttgttgaaacagtaagtttagtcatctgtgtttcaatttctatgtctaacgtcaacatggaagaatgtttcgtgccatgggtaatcaatggaatgatgaaatagtctttaataaagtggactttgcagcacattaatatgtcttttctttttggaagcacaagatgagtttttaaaaattcaaaattgatttctaaaatgtcacccaaggccaggtgcagaagctcacacctgtaatcccagcactatgggaggccaaggtgggaggatcacttcagcccaggagttcgagaccagcctgggcaatgcagggagacccttatctctacaaataataacaaaaaattagccaggcatggtggcaggcacctgtggtcccagatacttgagaggctgagtctaggaagttgaggttgcag

SEQ ID NO: 58683 - DNA, 2463 bp, Homo sapiens
agatgggcaagatatgagctattgcatcccattgttagagatgaggaagaaaaagccacttgtccagcacctgaaagcagctgtcagtgagaagataaccttctgggagtttttagccttttgatggaacgagttcataagcttctaaactgatatatcttaataatagatttgcactcattggcagtccacaattcaattataaatgtttatttttcaacttccaggacaggcaatgtggctagtggctggggtgggatgtactaaaattagaaacgagtatgaaggaaggaaatcacctgctatgtagaattgcttctatagccccagtggacaagtgtcatcagatatactcaggagaggaaagtgttcagcaagaaggggaaagcccacccccatttctccctcatgtctgagaaagaaaagatcctaatgtatgctctggtgtgaaaagtagagatgtaaacattccatgttcaaagctctggatccagattacttcatacacacactttatgccaagggttttcaagggctactattatagcctgttggtgggttcaagatactgcttaaaatttaagagatgtaaacatctgtaggtagctgatttcaaaatcaaattattaaggagaaatctatcaaaatgtgaagtttcacttgtgcaaatgtaacccaccacattctgatttttttccccagataacctggcttccaggggagtaggaaagtttcaaagacctgagggccatagcctatagcactccaccatccacccagggagagaagggacttactgtggcgagcttttcaatgtattcatcaggtgcacccagagaggcaaggccaatttcctgtaattgggggaaaatagaacctgttctgttcctgtaattggaaccacagaaccaacctagtacttggccataaaaaggtgatgggtggccagatgccttcagaacagcccacatagaccctgagtgtgttatcaagtctttcctgcccatatgttatagaatcacagatctccagggtagggggatccttccaccctcacttggccctttgttttcactttataagtgaggaaattgaggcacagagaagggaagtgacttgctcatgatcacagggtcggttagtatctaaagcttcttctcttgactccagctcagtgattattcatcagcagaatattcctggaatgttaaatgagtcttaatcatgtaccctggaaacatcacaggagaactgcagataagtggtgacatcggtccaggcatatatatagctggagagtctaacacatcatagattaattctcaccacagcttctgttgcagaattcctctactgtctcattgtctcttttacagcacttactgcagcctgccttgtgtgtatgtgtctttcctactgtatatattaattcactctcaaaatatttattaagttcatttgatgtgccaggcagtgtataaaatcagtaaagacatcttgtgagttttagtggagacagacaataaataatgaacatatacataactatgttagaagaatataagttctttggaaagaagaaacaaaagaagaaataaacaagagggactaagagctccaggggattcaggggagacttcaattttaaatagggttccagggtaagcatcattgagaaggtcatatttgagcacagacttgaaggaagtggagttgttggttatactgacttctgagggaagcacactgttggccaagcatatagccagtgcaaaagcttgcatttctttcccaagaaaaggcagcgttgtttgggtcaagacacagggaggaaccaatgtggctggagaagaattagtgagggggcagtggcaggtgatatcaaagagggatccagagccagatcatgtagaatatttttagatgttttagggcttgagtttttcctttcagtgaaacaggagccattgcagggtaatgagcagatagatggtcatgatctcacttgtgttaccaagcactccttctgcctgctgtatgagaatagatggtagcagttgagggtagaggcaggacaccaagagatggtaggggttgagggtagagtaggacaccaggagactggagggtagacagggaacaaggagactgaaggggttgaggatagacaggacaccaggagactggagaggttaagtgtagacaggacaccaggagactggagaggtggagggtagacaggataccaggagactgaagaggtggagggtagacgggacaccaggacactagaaaggctgagtgtagatgggacaccaggagactggagaggttgaggatagacaggacaccaggagactggagaggtggagggtagacaggacaccaggagactggagaggttgaggatagacaggacaccaggagactggagaggtggagggtagacaggacaccaggaga

SEQ ID NO: 58684 - DNA, 1581 bp, Homo sapiens
gagatcaccagaggagtgcttgtagacagagatgaagactatgattagacccactttgaagcaagaagctacatggtctgcatctctatatcactccctgggccaagtccagagcctggttcagattaggcttataaaatactttctgatttagagtgaaccaaattcaaattcttagcctggatctgctctctcaattcaactagaaaccactgataaatccaagaccaaaatggcgccttgttctcttagtcaccattctttgtgagcctagagtttgcctacaacaaggggggccccacattccctgtgctccagccccactccatcctgtactgtagtgggaagcaagtcctgcctctgatcaaaaaggaatgttctcaggaaactttcaacatgacttgctgccttggaactgtccagatcaaagttggaaccatgtgacactgatgccccaagagctcctgtttgttgacttgagcaactgtccactcttctgtggggttccccaaagtggaaatggcttaaggaggactgccacttagcctctgacttcgtaaactaacttctggtggtaagaataaaaggttcctattcttcaaggaaaaatctgattgttttttggccacagtaacaaatccagattttaaaactgtcccaagcaatcaaagatatcttggcagcagtaaccacacttctgaatgtcattggtgatgcttctacagttaaagttcaactaatcccgaaacacttccacttccaaaagtccaacgatctttgaactccataattccccaaacctcacataaaagtaattttccttttgtttagagaggctgcatcttacaagtacagttttccctcacttagcaagcaataaattccacttttttgtttgtttgtttcaaatatttagtggtagcttctttatttgacagtgggaatgtttatttctgccagctgagggaaaatgcccattaaattcacacacaatcccattattctgaaatcccaatacttggctcagcatttgctcataggtcattccatttgattcttgtgcttctttgtgaggaagatgactggtggagagggcttttgactgatccacttttattaaaactgaggcacagggtggctgataatgtaaccccaggtcacacagctggttagtggcagggttggagcctaggtacatcagaacaccattcaaccttctcatgatcccagctaccaaaccatggttttaggctgcctctcagtgcctggagagaattggtagcattattttactcagcccaaaactttcttttttggccaggtgtggtggctcttgcctgtaatcttagcactttgggagggtgagatgggaggattgaggccaagagtttgaggtcagcctcagcaatgtagtgagactctgtctccacaaaaattaaaacattcagccaggcatgaaagtatgtgcttgtagtcccagccactcaggaggctgaggtgggaggattgtttgagcccagaagtctgaggctgcagtgaaccgtgattataccactgcactccagtccagcctgggtgaca

SEQ ID NO: 58685 - DNA, 3917 bp, Homo sapiens
tcagagtttgcttgatgtctcaaatgtccctaattgtagaaccaaattccttggactcctctggattactatggcatctgctgagtgctaggtgcaaaatcaccagacataaataagaagcacaaggtgggttgtataatttgtccaaatgcatcctctaaaaaatattaggctggatgactcaagagttttatttacaactctcttgtccctttccaagaatgggctgtgggggactggagctcatctgtaattatgccacagttttcttgtaaaacctggactctttacactggttctgaagcagaaatgaactaaaaaatgaatgttggtcagcagcaacacttggcaaagtctactaaaatacactgaacccccaacacaaagatttcaacctgcagtcatcagtcagtgttttcctgctggaagcacttgctaagcatggaagcatcccactcccacattcgtgcaaagagctgggaagctgctttcattaaatgccataaaaatgtgaaaataatgattatttactacagcttctcaatttcagtgtctttagatgggatattttagctcttatggttattacaaaaacaaagtcatttattttagttggtcctctaacataaatgcccagcaaatcatctgctacttagtcagaaagtatgtgatttccttagtaatgctatttattttggagaaaaccaaggagtatcatatacactttattaaaacaaacaaacacataataggggttattccaatatttaaatggacagaaagtatctgaaaatataactaaataactctaaaatttcaaaaaattaaaattcactgaacttgtagttgaagaggtgtatcttttgccttgatcattaacggtataaggttcaaaagaactgtagtgatgccttttcatacttaagtaacactttatagtatagaattcttttctgtgaccatcccaacaatcctttgaaaaggttaagggagacataaaaaaataaaatcagagatgaaggtgcttggccgcaagtagctagagagcgaggcccattttttttctaatttcagtcattagttttttaaccacactgcctttcctgccaggcatacatacagtgagcactccacaaatatcaactttgattattattactaccattatgtcaaacacaaataattaaaacctctgggtgtagtaaatataataagtaacctcaaacaggctcacggtgcagccattatttatggctccaactgcagacaacacacccctgagggctgtggctagggaaacccacagaggggaccccactagggagagagagaatagtgaggaggtaatgccagagagatatagatagatctgaagctttctctggcaaacagagattacttgttaaacaaagcaaagagcaatgtcatccttcttggctcaggaataaagagaatgggtaggttccacctactatttacctaagatgaaacttcaaaaggagacataaccaatccctgccttatgtagagctgagagcacagcaaatccaagaaccgagaatggacacacctctggcacgcttatttgtgggagagttttggaagggaggggagcaaagaagaagttctgggaagcagaccataggatacagtgctcatcactcataccccacccctggaagcatccacttccacagctttgaggataacaataaaacaatttatgttttatgactcagtttttctagtgctagagatttaacttatgggaaaattcacatagcatttcaccaaaacttctaagctaactaaactcccataatagaggaatgatgaagtggactgtggtataattacacaatggaagattaggcaatcattaaaaagtgagtaacggccgggcgcggtggctcacgcctgtaatcccagcactttgggaggccgaggcgggcggatcacgaggtcaggagatcgagaccatcccagctaaaacggtgaaaccccgtctctactaaaaatacaaaaaattagccgggcgtagtggcgggcgcctgtagtcccagctacttgggaggctgaggcaggagaatggcgtgaacccgggaggcggagcttgcagtgagccgagatcccgccactgcactccagcctgggcgacagagcgagactccgtctcaaaaaaaaaaaaaaaaaaaaaaaaaaaaagtgagtaacaaaaacaacaacatgtattaaaaaacgtgtcagtaagcacttcaagacatgagtgcagtggcggtctctagatgaagggcttagggatgattttgtttccttctttctctttttttaaaatcatagttcaagtttcctagaaacatttattgcttttttttttttttttttgagatggagtcttgctctgtcgcccaggctggagtgcagtggcgtgatctcggctcactgcaagctccgcctcccaggttcatgccattctcctgcctcagcctcatgagtagctgggactactggcacctgtcaccacgcctggctaattttctgtatttttagtagagatgaggtttcaccgtgttaaccaggatggtcttgatctcctgacttcgtgatccgcctgcctcagcctcccaaagtgccgggattacaggcgtgagccactgtgcccagacacatttattacttttataataaaaacttaactttatctgttaaatggttataatgataaccattggggtaaatacttataatagatataggtatgggattattaaaaaatgtttaaaaaattatgcccgggctgacaaatggggggtggggtgtgggagttatgtaactgctacttacttggcaaaagtcttatatgagtgaagtttctggttaattacacactgaacatagagctgaattgtttaaatcatttctttccctttgagtcaatttgttaaaaaataaccctccagtttggcatgtaatttccttattggcgtctttctaatttactagtatggatccttagaaaccaataattttgattgctaagagagcctcaaaagttaatttacaagcctgattaggatcatacttttaacaaatgaatttttacttttcaacaagaggtttgtgtaggtttacaaattgacccatatacgctcaccacatctttgctgagggataaagaaagcactcttgatattactccaagtgggcatctcggggaaggcaataaaggcttgaacttttcaaaaacaatttcacgatttgtctaatatttaatttatgcataaaagatggcagcataaaaccttgctaatcaggattcaaacagaagatataggcaaggtgaaatgaatcaccaatttttctaaggattcaccagaaaccactttcttctcctatcctttaagaaagcctttctaaagggggattggtcacaagtaaataaaactatagaaacagagttcataatggtgaaaagttggcttgtctttctggatcttcttttgactgcatactgggcgccccgtctcctcctcctcctctatcttattcactgacaagagataatggtatcttgcaagtatgtgggctatctgggttcaaattctggttctgctactcactacctttggatatattaattggccattctgaagttggtattctgtgtttaaaataaagataattttacctggcagcttaatgagagtttaaaaaagcaaaagcacccaacaatttttgtctgcacctaataatttttgtcttcattaatatatattcagtaggtactccttatactctgcctcctcaacttggtatagatacccatttctctgaaagatggagcacatcacattttatgtgtcattttatccttcaatatttgttttaccctaaatttttctcagctctttttttta

SEQ ID NO: 58686 - DNA, 4412 bp, Homo sapiens
cttggagtaaacttaagtgaagttatgtcctggcctatttcagaggttgctggggacaacatcaaagacatttacaaaaaatgccctaaatcactggtcttaggtaaatagacaggaccattcaataattcactcagttaagcaccatttttgtgttaaccactgttctaggtgctggagtgtaacagtgggaaaagcagaaaaaaaaatctctgcccttgtggagctttatgttctcaaaggaggagacaaacagtagttatggtaaataagtaaaatatacagtcttcagatggtggtcagcaccatggagaaagatgaagcaggaaagagggactggctacaccattgtgcatgggggtgctatttttaaacaatgcagccacgaagtcataaaaaaataaacaggtaacctttaagcatgaacctgaaatcagtgagggagaaaaacgtgagggaacagccagtgcaagggtcctggagtaagagaatgcacaatgtgagggcagaccaacaaggagaccggtgtgactggggcagagtgagcaggaagcgggggtgtgaagacaccaggcagagaagttaccaggaatagatcatggaaggccattttggccattacctgaactttgtttggttttcactctgagtgatataagaagctatgagaggtaattaggcagaagagaggtatcatttgattcatgttttaaaagacacattctggcagctgttttaagactagactgtagtgggacaagacaggaactgtctggggcaacaacagtatttggggtgagatacggtagttgcaaaggttggagaagtcgcaaggagatactgatggaacttcttacatgtttcactgatttcctcttctgggagggccagcaatgccccagttgaccaacaatatggaaattaaacccactggcatttacaggaaaccagaaatattcaagaaagtatgagcagcacaattaaattctacagggagctcaagattatcccccactctagtctggaggaggagatcttggagaggttcaagctggaccttccatgggattctcaccccaaagaccatcttttgggatctcactcttgcttcctcttggcatgtctcctgtgtgattctttggacattttttctttcagtcacctcccacttcatgagattatttcttcccccaccctcccttccaggtggctggggctgcctaactcaggggagactccttgcaggagaaagccagggttgcagcttaatctggctcagctcacgcctttagagaaaagaactgtcttttctttgtgtttcttttcctataccaccaaattggtaaaatattctaggtcaaaaagaccctgtgggctgggcacggtggctcacgcctgtaatcccagcaccctgggaggccaaggcaggtggatcacctgaggtcaggagttcgagaacagcctggccaacatagtgaaaccccgtctcaactaaaaatacaaaaattagccaggcatagtggcaggtgcctgtaatcccagctactcaggaagctgaggcaagagagtctcttgaaccagggaggtggaggttgaggtgggctgagatcgtaccaatgcactgtagcctgggggatagagtgagattctgtctcaaaaaaaaaaaacacacacacacacaaaaaacaaacaaaaaaaaacaaccttatgtatggagcaataatcacaactcatatgctatcaataggccacaacctctgtgatcattgaatatctgatgaggtcattgatctctgaatatctgatgaggtcatgatcactgggtatctgatgagatcattgaatatctgatgagggggaggagtggatcccctaggcaggagtagggcacaaaaaagtgggtatgactaatagatactgtgcctttcccatttgcttccaaaaggtctgtctactgtaaaaatggaaggtaaattctgaagcagtttttgtctctaagtgtctagctcctggaagcttgtttagtctgagcctctgtgtcttcatcaattgaatgatgctgtctttgaacctacccacatacgtcagagatgaccttggagctcagagctctgtacatctgcttgtttgcttgttcccttccctagagaatatgtggtaaggtgaacagtgtacttcccccaggagcctgcttctcattttgtagcccattactaagccacttacagtaaagactctcaggagagtattttcctaaaaggcatggacatgagctagtagaggctaaaaatatagagcactacagaaaatgtttaaaccaatgcataaataattgaaagttggaacaatctactgaggtcagtgggatgttgtaggttagcaggtaagggttttggtatactcctaatcatttggccccaattcactagaacttctacttcttatcttaatttttagaatgaggaaacctagccactaagaagttaaatacttttcttgaggtcttcaagctcacaggttgtgcaactgggttctgaatccaaacggtttgactctagatggtatatccttaaccccaatgccattccatccctcaggaccccaaacctaggttatcactgatagtttggagttcataactctaaaacagcatgagtttagtggaacactagtgcctggaagatattaagagatcttccctaaacagggtcccatggtaaatacatataggaaatgctgagtgagattacattgaacaggtttcctccctacagaacttctcagagtctttaataagttcatgtgcactatggctctctaaaacctagatgtggaatttttcagatataatgacccttggaattcttttctgataaaatacctactatcatacagattttgacagaatattatttgggaaacactgctctaaagtatagtctagattatttcatttgttttgccacttatttcctttaatttcattttatagggtccagaaatgtgttgtaaactgcacagcttaaaggtctcatccgtattttcatctatggcttgcttctccatttcattcacaaagatgttgggagagatgtaaacacccgagtagactatgcacaccacagtccccctgctctaccaagctacttttcttctggcgaatggctcaaccccagctcttattgctcattgccatttttctgtaagtattcacaaacaatacaagtcattcattctagattttcattaaaacaaaaaacaacactttaaaataaaagctttctactctccctagtcttccaacatctttctcatcttcacgctttctcaaagattcctgatggggtaaaataaaacacgtgaaaggggtaaaggaataaaaattgtgtgagcatcttctgtggcctcagagtcacaccaggcatagcaagaccagtaagtcaatcactggtagatctgggatttagatgcccaatatcaagcctatattcctcctactctttatgtcataacatggggctactataatgtttggaaccaaagatatgaattcttctacgggcaaatagtgatctcttgatttctcataaaaccttggccccaaatagctccctgattcacccccttgtaagtaacagataggtgatggggtgaagtcactagtccaaggacagggtaccaagatctaccagccaagcttctcttggctctcaatattttgtttcaacattcccagtttaaagatcgttctctttacaacaaaaagagatgcaaaataactgctgtgtcattctgctttctcataacaattggtttttctctgattaaaaaaaatataaggccggaggttttagcataatagacctaggtcaatttctgaagtcctaccaccttgtctaccttagacaagctactgagtctctgaggtttagtttcctcctctctaagatcagtatggcatcgctgactccccacagcactgtgatgagtattaaatatgacttaattcatgtgaagtgataacacagtctctcatgcacagcaagaaccccttcccgggcaatagcttagaacaatggttctcattcccgacttggcatcagagtcaccagtggaatttaaaaaaaaaaaaaaaaattcaagaataaacaaaaatccaaaacacatgaaaaaatgactgaaagtattgattatatcagaattttaaatttcagtatgacaaattataccataaacccaagtaaaatgagaaagactgggagaaaatctttgtaacacacataacagtattcagagtatataaaatgtcaaaaaatcggtaagaaaaaggcacatttgccacaaaaaatacaatgtgtagacaaatcacaatttacaaaaagacaaattataaatgttatgaaatatgacct

SEQ ID NO: 58687 - DNA, 2078 bp, Homo sapiens
tcccaaataggtgggactacaggcacccaccaccacgccgggctaattttttgtatttttagtacagacggggtttcaccatgttagccaggatggtctcgatctcctgaccttgtgatccgtcagcctcagcctcccaaagtgctgggattacaggcgtgagttgaaattcttaataacgacttttgaatttgtgtttcataagcaaagtccagtgggacaatgaagcacatgctgggtatttggagactcagctcatgtgtaatcacaccatttgccctctccttaccttctcagccatggttctaaggggttgctttcaagcacgttggccctctggacccacgcagccttcccctccctggtcttacctcaccaccactactgccctttgcccagagtcatgaccaggaggcatgggctttggggggaagtttatattctgctgccactctccgccaaccctgggagatctggcaggggatttggtgggtgatttggcttcaggcaagcttcctttccattctcattccagaggttacaatctcttgggggatagctcatcactgtgggttggtgcagcaggtccacggaaatggaagatggatttccccatccttggtaggggcttggctgtcagcccagccctggctggacagggaacccagcagttagagggccaaggtgcccaggggaggagagcacaactaaatggcaaatcaaaaacaccataacaggacatgagagagaccacagaagaaaggataaagttatatattttagtacttttaacagcattatttcctgttattgaggaagagaccccacgttttcattttgcactgcgccctgcaaactatgaagcccgttctgtctggggcagtactgaatagcagttaagagtgtatgtaggttctagactcagaatgcctgggtttaaatgatttcttccgtatttactagctgtttgaccttgggcacatttacctaacccctctaagcatcagtttctatctctgaaaaatgggggcagaaatagctcctacctcatgttattttcattagactgaataagatcatgtctataaagctaccttttactgagataacttctcatgctctgccttccctccccagctgctcagaatatttgcttcccctgttagatcctaaaggaggcagtttctcttccttacaatttctatgtgtcccccatcttcctccccacccacagtgctgagaacatcataggttttcacaagatatctaatcgtatccagtcatgccccaaaaggatttgttgattgcatgcccaaacacactgagcactaagtatgtgcacagccctgaccaatgtgctacccctgcctcccaatcagctagagaggtcacaggaatcttagcataaagcaatgtattttcaggtgggacaaaatcccaccaaaaatattagcatagtactcggaaggaatctggctgaggaaacctatttggagttctgtgaagtttggctgcccagcaaacacccaaatcaacgtttcctaaactctgttcccagatgtgaatacatgttcttaaaataaaaaggatccacagtcaagtaagtttggaaaataatacatacatttctctctgtaaacaacttagtataattagttttatagactctaaaagtcctataataaagaaatcaggtaaaataatatgcccgaatttcccaagtttattaattatggaaccactttaatcataagacatttaccaatgtcttgaagaacattagctattttctaaagcatagttttgggttaagctacttgaagaaagggacggtgtcttgcatattattttacacttatacatagaagacaatcaatattaatttagtgaataaaagaattaatatttatttcttgtttactctttaactgtaatcacatgtgacacatgtgattacatgttatgtgaaatgtaatcacgtgtcacatatgacttatagttaatcatgcctaatcacacatatgattaggcattttacaaaacacattatttcatcacaaagttcctgttgaaactga

SEQ ID NO: 58688 - DNA, 5401 bp, Homo sapiens
caattattcattgatgtcaccattcaatcctgtaaattcaataccttttattgagcaactactaggttccaggcactatttgggctctgagaaatttaaagatgaataagacaatgctttatcttttaggagctcacaatctaacttaatagacacatatataacaaactgaaagatccttagaggtgatataatatgatttataaaatgtcccagaaagacattgagaaatacagtgtggaaagtactaaaaatggaacatgcacaggcttttgaatcgtaagacctggattggaatcctctctctttcattttccaggtggactactttgggcaaatcattcagctttcttagttttctcatccgtgaaagcatgctaataacaagatctgtcaaaacagtattcagaggatgaaaaaaggaaaagaatagtttaaaaagaatattgagaagtatataaaaatgatggaaaattataaatacacaaaaatgacctcttgacctttggcaaagatctcaggaagcattaacttgctcccatatgctgagatctgagacatccaattgttgaaaaagagttacaaaatccatgaaagtacacaaataacctatcagaaaataaacttagtcttaaactaaatctcaaagaatgtccaggatctagcacttactacatgcatgtgacagaaaaccaaggttggggttagggctgacattccagagtttgctaaatcattagcctaagtcgaaaaataatacataaaattctatgtgtgtccacaataagcagcaggtacctaaaactgggaagaaaaaaatttgcagaacaattactctcttgtaagcaagttaatgaaattaatggaatagatgttacatcatctcaatgagagaaggctgtgttaggaaactcttagtgactcagaataacaagccctgcatgaatactgatgacccttagcaaaaaattctttcaattcagaaaattcagatttttgccaaaacatcccatgaaactgaggtgtgaaggaaaaaacaaatttatcagcaagagtgattttagggagcttcaaatgaaatggaagactaaactgttaaatatcccattttgatcatgatgttatctttctaaaaaacttcatttatttagagcctatataaacatttatttagagcctataatttctgggtattataataagcacttgatttggattatctcatgtaatttggcaacaacctaagaggtaggttttattaggcaccaagtgcccccttttattgatgacaagattaaggcttagagaggttaaggaacttgcctatagttacacagttagcagtggagccaggatctgaacccaggtcatttgatctctgcatactgtccatgaatcacaatctcttgcagcctctattcctcttcccccttttaaaccctgccagagaggtacagatgagtctctgacttaagtcttcttcctactaaagaatactgagccttcttctttccagtttccttgaaatgacaaaagatattcctgtctctagttcacttggtagcactcttttctcctgttggcttccaagaaaagtaagatatttctgatacacatccacagatgccacttttgactagggcaattcagacttgaatgtacctgggcttgaagttgagtcaccccctaaaccccaccccactacagtgtgtgttcagccaatcacaagtctgatctcatcttctccagaaatgcctctgggcatcaggtcctttcttcccactgccatcacctgaatccatttcttagtggcctgcatcgatccagcctgacatttttactcttgtccttctatttagaatccctcaaacgctccatccccatggcttcttgctgatgtttggcagtttctgtggtaccgaatctctggaggcccacctacaggaacctcctttccagccaagctgctttctttcttgcctttttagctcctcattagagtattcaccaaatttccctttccaagatctcaccttccttaaaggctcttttgggtctcaattctcttaggaaatgtttgttcccctcagcccaggtgcacaatcacttctttatctatgctttccacttggcatttgatgcccacatggtatttcataataattgactcacagaaattgatttgtccttagtgctcatctagttaaactcccttacattacagatggggaaaacttagagccaaagggagaaaataactcacctgaggccacataggtagtggaggctggtcaagaactcaggctcctaattatcaatttttctacataattccctttgctatggacataatatgggaatttagtcctgtttcttgcaaagtaaaagatttactctggtccagtcaccagacagttagtcaatagcactcctaacagcctatatttcaccatgctgatcccccttcacttgctccatttctctccatgcactttgtaaatcagtgtttctcaatgagtgttccttggatcttgactccaaaattacaggtgattccttcttataatgcagttccctgggctttacctaaacctgttgaatcaagttgtcttagaatctgccatttcaaaaccatcccaggtgattcttaaccatagaaaattttggaaccattgatatatatacagcctatttttttaattataacttttccctaaatgtgtctgcaaattcacatttactatataacacgacactactttgtttgttattaatataatttgtggattctcaatcttctaagtgctctataaagaactttaaacccctatgctttcctgatgagatccctgcccctaaccccttcccacagttgtggggaccgtattgccagcagcaccaaaactatgtgcaggatggagccaggacctgttctgggatcactctgactctcacgctgttcctctgtacaataagttctgtctcctaagagccatgtactattttcataagaaatttttttttttaaggattcaaataaaaatcagtcctaagttctgcagtctttctagttatattaacgttaacattaaccattcttttctctccagcctccctgttttctactgagaactcttctccctaatcctactgatgacaggggcctgcagacttacattatttccctggcctgggctttatgactgaatctcaagagtccaggagcagacttcctcccatgggtaaatatgtaggtcacattaaagaatgtattctgcaattcttcacctcaagaaaatgccaacaaatcccggagaatggaatataccttgggcattatttccaagtcacgtttagggttctttcacattccatgcccagggctaactcttggtcattttcctctctgcttagtttctgcctcccctggtctgagtaagtttctgtctgaattctcttcatgcctcatcttcttcccaaaatgaaaggaggatagttactcacaattttgccattttgataccttgctgagagcactttataaatattacaaaagaaatctagaaggattccacatcccatcccagatcattagggaccagccccttcagtgtacagaagagtaaacagacaacagagagggacagtaacttgtccaaagacacacagctaattggtggcagttctggaggccagatccccaaccccctaaagcaatggtcattcattcctgtgaaagccaccgaggacagatgttctcctacttagaaacaattgttgaggacatttgtctgttgacttcctggatattctcatcagcttccaacgaattcagacttcttactgagcttatgaaaccaggaagcaccagcagtcttcggatctctttctctggaggcccaaattcccctaactgagcagctcaggctgccgtggctcacctgtccaaagtcagagagtttcctgcccaagcctgggttttccaggaccgcagtggacatgctggctccccgggagtgaggtctctggctttttagggcctcaggtacaggcaggtttgcaaacagcacgtggggctgaaggttttaacctcgcactagggaggagaagagagttacaaagggtgtctcttgcgtggtgcatctccgcacagtaacgcccctcgtgggcgttgtcctgacgcaggaggccagggcagcctgccggatgctccaggtcacctgcccaggacgggccggaggggaggggctgagggagggtgtgggggacgcaggaggcaccacttcgctgcccgccctgggtaaagggaagaagccagggagcgacgggccacccaagccccgtcgattagacaggtttaggcacttccgggactctcagaagcctgggaagcgagttctctgcaattggactaagcctgcgaccgtctggtataacaattatatgaataatccgccccccttacccccagctgaaacagtcaggattctcatttagatttttgttgttgttgttttcccttctgttaacctctaagcacactgccttgctgtgcgctgacttcagaaaactacagctagagggcacgtgaacgctgagcacagcaggtaaagagcaaatgtaagagcgatctgggtttaaatccagcctggtgttctccagctattcgcacaactgctcctgaagctcggaaaagagggtggtagagccaccttgctggaaggttttaagaataggaataaagaaatgcattaaaatttagtacagttcttccacataaacactcagtaaatggaagatattgtttaaaagcaaatccacataaatttgacaataattactgagacctgtaccgtgtgcttggtggtgttctagtctttgggaatacagcaatgaacaaaacagactctgcctccccagctatgctgccattctggtgggcagaaaataaacatataaataagtttaggtagggctaagtcttttgaagaaagtaaagtagggggatggtctatgagtgagctggtgggatttggccagtggtcttcaaatagtcaggaagatgccattaaccacacttttagagaagactgagggtgaggcattactgaccaggaggtaaaacaaagtataaaagaatgctggaaagcaggttcagaggttcagaaaggatgtgaaaactcaggggcctcaagccttgagtgcctgcttaatattttcccaagagaaagtaatgggctgtaagaaaataagccaataataaaggttgctggaagcccatccctctcctcccactgttctttgaccaagcatctgaaaataaataaacaaataaataaataaataagtaaaataaaactcaggtttaggattcaaaacaagtggtttaactcttggttct

SEQ ID NO: 58689 - DNA, 1523 bp, Homo sapiens
tggcaaaaaggaaaaatttatttatgcactaagataaaaataagagattgcttgtgccataaacttgcagatgatttttaagccacctttttgttcaatttggttggaatgcaatgtgctgctataatgagagcagtgctgggtgctaaggaaatggaggaaaaaaaggcacatctagaagaagcatccacagtcagtcagtagaccactgaggtattttttaacactgcacagaggtggggaacatgtcacaagatgagaagttgtgtacttggcaaacttagagctgacctttgctgatttggaagttgaagattacccaaccattgcaggtttatcagttctttcttgtttatcttcatgtgcagaaggttgagttaatcataatccatgagttcatggcacagaaacaaaacctacatgacccttctcttgtttttttattcattctcttttatcataattcctcactctcactgcctttccccagaggcaacttctctaatatgatgtttagccttgaacttgtaaaatacatagaaatgtttgtgcgtatatgtatttttcatggatatgtgatgtggcactatagatttactacaatctatggatgtactatagatttcatagtttcttttttctttcaactgtgttcttaggatccagccatgctgctgaatatgtatctagttctttgcttttctaaatggttcagaatatcccagtgtgtatttgccacacttgacttctttattttccagttatggacatctaagtcattgctaatttttcaccaccccaaacaatactgtgataaatttccttatctttcttcccttataggcctggggtagaaattttctgggatagaagagtggtgctattatgaatcatagggaacatgcactcttaatttcacaaagtgctgccagattgccctttagagtggcttggaccagtctacacaccaaccagcaggcaaaagagttcctattggtgggtatacctaatatgtggtattctccaaaggtcagaatttttgccaatctgatcagcataagctggtgtcttgttgtttttaatttgaatttctctcataactcatgagtttgagcatctctttatatacttatacctcttagatttcccatgctatgaatagtttatcatcatattttctacccattttctactaggattcctgtcttgtagatttgttgcaataatttctgttagctctgtgtccaaatattagctctgtgcccttctcagtcactgaacacattgcctcccaatgtgtcactgtcagttaattgtcaactggtgtccttccttgattaaacaataaaacaagtaattttgaaataacaagtccatccttttaaaaatttttgtggtttgtactatagagtattgtttaagaagtccttccccatcccaaagttccaaagaggtgctcttctctctagcatctagatctatcatagctagatctttaatctacctgcattgtagatatacct

SEQ ID NO: 58690 - DNA, 1911 bp, Homo sapiens
ctgctttaatgtctactaagtcacaaatgtattgaaggcactcattgtgtcttattcccctctgattaggtttcatagttatttgatgaatcaatgagcatgtcagccttgatcatttttagatctgaacagtattttctaacatcttagatgattagcatatacctcctgttatctatttctgtctgtttgtacttatttaacacatatccagtgtttactatgtgcactgttgtcagcattttaaaaatatcaacttacttaatcttgtctttgttgctgtttcctaaagagtccatgagagtgaatatctactattagaaatccttctcttcctctctcttcctcttcctctcaaaaggcctgaaaatcagttactggtccctgcccgtgctgcaaatacttggcctagggaagagtggtggggagggatgaaatagttaactagctgacctggggcgcacagtttccctggcagatgccgcgctcaggctgcggctgcttcctcctgaatctgttaggagtacactttccctttgccctcggggccagcgtccaggtttgccacggtggtggagacagctccagccacgaagctgatttataggccagagcattcccaggccgcaccgcaaggagtcgggctgagcttggactttgggaaggtggtgatggacacaggacacgtggccacacaatggggacacacgactgacctcagtcacttcggtaaactgcccttgctttccggaggcggcaggaacgtttcaggagctccaaggctctaggcgcctgcattcctcgccccagccggtagtctcctagccctgttgaacgcaagagcatccaagggcgcgcaagtccccaagagctctcagaggttcctgaccctgagcgttaaagcccttcctcgcggatgagacccttggtgcgttccacccgcttgggggctgagactcgccaggacgcactcagaatgaactttccgcgcaggtcagatataggcacccaggggttttgtgacgtcacaatgccgtctgacccggtgaaaggcaaaggaagggtcaaaaacggatagtgtgtgtgttgtggctgaagtgggggcatgtgagaagagggaagtccgaggaatgggggaagggatttggggacatgaatttgagaaggagcaatcaagtttgtgcgtggggggggaagcaggattttttcttcttccctcctatatgcaaactgtcacttcgggttagcgtgagcccttatctggctcattagcatgagctgtggctaacacgcttaaaccctctaattatttattatgccgtcacggggcggattgcaaccccaccccggggcgcactttcgggaacctgcagagctgggcaccgcacgggggccggagcacagagcctggccccgctgcgcgctaccagggagactccttacggctcaggagtcccacagggtactgttctgagggtcaacgaagcagagttgttgggggtctatctggaatggcttctcaccaacattcatccccagggtagtagtactgaactcgcctggtgaatctacatagcaccctaacttctccattaacaactccaaagacggaagttggagccaagaggaacagactttgcaaaaataaaaacagaagccaaacctggtgcaaagggttgggaattgggctgagtagcatgttgggtacaccttccagaagaaccctggggagaacctaaagtttgctggagccctcttccccacccccgagttccaagaggatccacaaagtgggggtgggagatttgatgggctgaaatccggtcactcacgtccacggttctattcagaaaacagtttcaaaataagttaacctctgtagggcatttttccccctcccctttaaattgt

SEQ ID NO: 58691 - DNA, 633 bp, Homo sapiens
cattcctgcacccagatctcggattatttctactggaaaatcaaatggatgattgccctccacttcgttctgcctatgtagacaagacctgagacatgccccagcctctctccggaccagatccttaaagagatggggcctattgcttggtctgctttctccgcagcgccgcgtccccagacgtcctgaagctggacggggttctggccagagagcgccagggccgaaggcccaggaaggacgcctgggcaggcgctgtccaagcggtcgagcgacggctgcaagcgcctccccctccctctcggcgccagcacgcggccccgccgggctccgctcccagtcgcctgccaccgggccgccgggcacacgcctggggcgggatggtggctgcgccaaggccgccgaggtgcccgcggcggcgccgaagaaccaggaatccccaccagtgccctaagcgccatcactcaacccccgccccgcatctttcttctccgagggtctgggagtatcccagagcactcccttctttatgatatccgctaagctggtccggaaataatctttatggggagggggtggcggtagggggcgatggtacagggggccagaggtcatcctagggggacgtccctg

SEQ ID NO: 58692 - DNA, 1132 bp, Homo sapiens
ccacaccgttcctgtgccattttttctgcccaaacccttccctgcgctttgcttcaagttcttagtagaatccaagagagcttcaccccaagtctttccacctatacacctcaattcctagagccatttgtccctcctgtgacgccccccacccccttcctaaagccacccccggcagcagcccgccccgagcgcgccgcctgtttattcagccgggagtccggcacgcgccaggcgcacgcactgcaacaacaaacccagctgaatggagagtttgcaaggagcgggagaaaggaacgggagggggggagaggagaggaggagggggagtttagggagtgggtgggaggaagaggtaagaggaggggggggagtgggggctgcagccgctcgctgcagcagcggggagtggggggcgaggcggggccagggctgcgcgtggggctgggtgtcccattgaaaaggcggacgcactccggcagcccagcactctctcacttctggccagggaacgtggaaggcgcaccgacagggatccggccagggagggcgagtgaaagaaggaaatcagaaaggaagggagttaacaaaataataaaaacagcctgagccacggctggagagaccgagacccggcgcaagagagcgcagccttagtaggagaggaacgcgagacgcggcagagcgcgttcagcactgacttttgctgctgcttctgcttttttttttcttagaaacaagaaggcgccagcggcagcctcacacgcgagcgccacgcgaggctcccgaagccaacccgcgaagggaggaggggagggaggaggaggcggcgtgcagggaggagaaaaagcattttcactttttttgctcccactctaagaagtctcccggggattttgtatatattttttaacttccgtcagggctcccgcttcatatttccttttctttccctctctgttcctgcacccaagttctctctgtgtccccctcgcgggccccgcacctcgcgtcccggatcgctctgattccgcgactccttggccgccgctgcgcatggaaagctctgccaagatggagagcggcggcgccggccagcagccccagccgcagccccagcagcccttcctgc

SEQ ID NO: 58693 - DNA, 451 bp, Homo sapiens
tctgaactcctttctccctctctccactcctgagccaagaaataattctttccggacttcccgagaagctccaggttatccggagtcaacggtaaggagggaagtggattcggtgacactaaggttctttacccactgcgaaagcgaatggcttggatctagcgcaggtcgaagttatattccttcttcctttgtatgcaagattaggttgttacaaaagagggtgtgtaggttaatggcaggaagcaagttgcagcgcggagcgcgggccctgagcgcgtgtcaggcttaatgatttattcaagctgcagcgcatccgggcgttgattggctgcaggcatgcgtccgctgtcagctgcgcgcgccgggaactctccaggctacctgaagctggggggaggaagaggaggcgtggggacccgaggggagaggtgtgaaaaggaggaacagg

SEQ ID NO: 58694 - DNA, 967 bp, Homo sapiens
tgttctagacccattttctctatgttcaatttaataccaaattattaaggttaatatgaagaaatggatttgtctgtttgcccatgtcctctttccttctaaagataattgaagatataattaacatgttttacaaatctggaagcattgaatttaaattgctagttggattacctcatgtagaaaacatccattaagcaatataaaatgccagccaacagaaaagtgcaaatatttaaaaattggagattataaaatcaggatagacctacactttggagggagcctaataatagtagtaagcaaaaacacattgaacttaatgtatgccaggcattcttctaaagactttatgcatagagactaagcttatagatggggaaaccaaagcacagagaagttaaataacttgcccaaaatcacctaacaagtaaatagtgaaactgagcttgaaccaggcagctgacccccagaccctgtgctggagcaatccaagctggacacagagcaggcagtgataaaggtgaagagaatttggcattctcagcttgagcctcttggagacaaggcctacaggaagctaatagaattcctggagagatctggtgccaggcagtcactttaagatatgaaagaaaaactgttcacactcaggactcaataacatttgatgaaggtgaggacgttgctctgtggtgtgtcactggcgttatggaagggttccatctgggtcattagcaccataatccccaaagtcagtgttaggaatctaaattctgaatttagagtccacaatagttgccctcattggtgacattcattcttcagcagtcacaacttaaatcagtctcatgttcatcttgtagggcagcaaattaaaatttaattcgacaaagctaaaaggacaagaaagagtttaggacaatcatttgctcaatattaaagcagcactggattaaggccaaaa

SEQ ID NO: 58695 - DNA, 1076 bp, Homo sapiens
gcagcaggatatttttgtgatgaactggagagtacattccattgtcccttccccgccatgcccatttacacattctatcctacaatgactgccatccagatggcagtaaagaaattccacagaacaaaacaatccttggtctttgagttcgaaagccaagactccaagagaactcagtgtaaacattatatgtggagaaatttgtagtcaatttcagctcccttatgcatatacactagataaggaagtcttgggttggagggaaaggtgagaggaacaaaggggatgtgaataaagagggaattaggtgggctccaggacaaggataccaggactgaccacattcaggacttgcacagcctgcattcctggggacagacatcatccttaaccaagcccatgaaccgcaggtatctaagccagtgttcactgctcacagaagcttcatctcagcaagcaatatacatggccatgctgggcagctctattaatggttcttcatggtagcatctggtgctaatctgtggatagtagccagcagaagtgactcaagacttagatgtcctaagtcctaagactttgctcagtcctctgtgtcggcagcctcctttcactgactttgctaacttctcctctcccactcacctcttgagttggagaatggactctggtctgtatacttaagggagggcgtggtgctgtgggaggaaaagtccaaagtgtatttggctagatatgagagggatctgctcaagattttcctcctggtcaagacagtggtgggagaaacaacttgccctaaaatctcttaaatcaatgactttgtttctactttccctgccactagcctatatcaggtttttatgaccatcttacttatgccattacatccttggtttctcattcctcccacctattttgccctttgctgtcaggctaaccttcttcaagtctggattctttcaagttagttccctattaaaacactttgagtggtcttccctttcatattgaatgaagttcaaatcccatttatggctttactatataggtatcaaaaccaatcttacctccta

SEQ ID NO: 58696 - DNA, 631 bp, Homo sapiens
agaatgcaaggagacttggatataaaggtactttgtaaactgaaaagcataatgcagtattattaatccatgacaaatcagaattagaaacaatgctgttgaggacagaaggcctggacctcattttcaaatgtgtccttgactttttctgtttattaccccaaagcagacatatccacccagggacagtggctcaggccatttaccaatcagatagaggattcatggaaatgactcagtgtttaccagggcaagcaagaaaacttgcaagccatgcaaaaaaggcacgcccaaacaactaatgagtgttagcatcctggcataattgtgtctcaatgtacttggtctttgccgtgaccaattgtacactgaacttcagtctccctgataaagtctcagaactaaaaatacactgtaaaaacggcattgagttctggctggtcacacatcatcttgcaaaaagggaataaagtctttatgttaatctctaaatattttcaaaattaatctctcatactattatttccttcttcattgctaggctgccatgcaataaatgctctcaaattgtggaactgcagttgaaaccctaaagagtcagtgggttattttttattgcgaccataaaata

SEQ ID NO: 58697 - DNA, 1797 bp, Homo sapiens
cttggtacctgctaaggaaagcatggaatagaggaaagaaaaagcaaagagagaaaagaagggaagggggaagaaagaagaaaaggctactgactttataaatctttatactttcccctgccctttcctgccctgcacctggctcagggcagcccacagaaccggcaccattatatggggggagggggagcaatgtggtacagccgaaatggcactggctttgcagttagagaagtgggtttaaagtttaatcttgcaacacattattttatttttatttatttttgatttagcaaactcagtacttcctacttgccaagcactgttctaaaccttgcaaatatttcttgtgtcttactggacaaatgcatgaagtttccagagacctgactgttcatctttaaaatgggaacaacagtaccttgcatggttgttgtaaagtttagaggtgataatgtatataaagtgctagggacagggcatgatgtatggtaggcactcaatacatggagtgattttcatcatcatcattgtcattatttccattattctgatcactcaataaagtcttttcagatgataagttattagtcagcctaatagactgtgagatttaaaatatatcttgaaactatttctacaaatgaattactagcttgttagagggtaagattgctgtttacacactcttgaaggaagaaatattatcttcttttttggaagatcatcctggctgcctgactgcagaacctgaggcatatgatacagagagggtgggggaaagggaggcagcacccagccatatcatccaaattgacctcaggagcagtgggtggccttcctgtgcatctgtcagtcatcagtgttctcagcaatctgtctcaaccactctatctttgatctttggtaagcactgtgactgcatgctatattcctggaagctgtgcttgaagaccaaaaactgaactgtggactagagggtagaaacacggagagagagaaactgctgaagcaaggcccaggggagtgcttggcactacagggaaagagattatgaactgatatgggaggaatgactattgattttttaaactttgcacatgatcccagcgtgttatgctacatggaatgaagtgacgtcagggcctgttgaccctggaacttgcccagagctgagttaggtaaaaggaaagatatgaaagaggggaagtttgagtagaagaaacccaaatggatggggtggggtttccttggatttacttcattggtgtattcaattcacctcccaaagttttcccaatcagtaagtcagataaccaacgtattactttaacaacccttcttacatgtcaagctcatctgaagtgattattcttctgcctttttataacttcactcaaaattcaaagtccctctttcccctttgttatgacatctctctcttatgtttaaacactcatttaaggcatgtttttctctattcacactttcccagataacattggagggcattctagcccagtcttcactgtcctccatactccagaaagctaaatatgtcttttaatcctgcaacccagcctttggcactaagtggccttccagcttatcctggtccaaaagattccatgcccatattgtggagacatctgttaccaactactgctccttgacctgatcagttctctgtcttccatatgtgtgtagaccttttcctgccttcctttcatccctagaacccatgcaaatttccaggataacatcaaggataccaactagctagaatcctgaatattt

SEQ ID NO: 58698 - DNA, 665 bp, Homo sapiens
atagtatttctgccacttatttcaccacagatactttgttaatatcttggaactcttgtttttagaaaaaagcattggaaatggaggagactgtcaaggacaataataaatgatggtactgtaaacacctagcattccattttgccaaattctaaaaaaataaaaatagaatcttaaaaattgcacagtagttagtactgggcacaattaagttctcctttcacaaaatgatcttacctgggcctgaatacctgaggtcttgctcacactggcgtggttacaggggtcatgtacacaaaaatgacctatttgtttgtgaagaactttatgtacttattaagcacaaatagcttgagtttgattttgatttttcagaagaaattgtttcttagaaaactgatcatcaaactccattccacaccagtttgttttcccctctcgcactctctttgtgtaatagaatctgttcccacaggtttggggaatataaaagaagcctacaatcccccagccccccttcccttttccctcctaatgccccagagcagctagtagggtttattgctcttccccaacattggctcctttctatacatggagtaagattgatgatcctcattctaaaatgtgaagatccagcatgcgcctttgtcctatgtcccttg

SEQ ID NO: 58699 - DNA, 1317 bp, Homo sapiens
tcattcattcattccttcattcatttctcaaattttaggcaggagggaggctcctcctgcctaaattcatgaataagacaggtctcctgctttcataaatttcccaatctgtgatagcaggaaaaacagaatagggtaatatgcatgaagcaaagcaggaaaggtggggagttgagtgggtagaagaaatagctctaaggaagtctagctcatgagtacgtggtgaagtaactaagtgacaagatggtgtcaggaagttgatggaatgagccagagatgagcagcccacagttgtaggacaattatgatgatactagcaattataatatttttatagagctgtcagtttcctttggtctgcctaccttttccccttgctgatatatctcattcctcacaatgctatgtggagtatataatattcccccactatttatggatgaggaaacagggtctcagagaagcaaaagacttgcctaaagtgtcactctccctagacaaactctaagttggaggtgagctatttcactgcagtgtcatgtggcaaccccacaaagtcctctgctgacatcactgtatttcctaataaatcatacccagattttattggcctatttcaaggatattgctacaaaatatttccaacagtttcagatgtttttcctggaattttatccaaaagaagaacatagtataataacacaatactaaagctaacataagcctcttttgtgcctagaatctaaattttgtcaaatatatctcttgaactcgtaccctaggagttaataattaaagtttccaccacataacctccagagatttgtttgttttgttagtttatattgcccaataatttacctccaatgacaaagcttctcccaaacaaggttttgaagtgtgtgtccacttctctccaggaaataaatgtttttagggggaacattagcaccacagtggctgttagagataagccagtccaggctccttaattagagaccaaatctcaggtaccaaagagttcagtgatttgtttaggggtccagagttgttcgtacattttactaaatccatgttatttatttttgctggcatctatatagcctgtatataaaacatgaagtaaaattgatcagaaaatatccagtttaatgttttttattgtataaatgaagaaacagaggctcagagagtctaagtgatacttctgagttcacatgggaaagcagcaaaaaagctgaacacccaattccctatttggagatttcacatgggacagtgcttctcaaaatagagattgatggacactttcatgtc

SEQ ID NO: 58700 - DNA, 724 bp, Homo sapiens
atgaaaggacagttgaacaagaaaatgttgcaaagctcatcctagccaagagttggcgagctagaagttttaaaatgcatatgccctaaaaattgggcgctcatcttcaccacagtgaaaataaagcccaaggagcttatgtggcctcgactgccaaaaagagtggcgtgaagttcagggatccaccaagttttagaatccaaagggaaaaaaaatggaataattttctattacactccactttcaacctctccagatggattacgaaaatagtgagaaatctaacaaagcattgcacaactcttcaggctgtatttgggtatatgacaatgagagagaggcagcatttatcagttgactctgccctggaatattttcttaatgctgatctctggcaaggtgaccgggcaccatgacccaaaccaagtggatgattaaatcagccaattaataagtacatactgagatgaaagggaggacaaagcagccaggataactacagctggcacatttccccatgattaagctttgacctccttagatcagcacactggatgctggacactggacactgatcctccatcgagaccactgaaattgcttgctgctgctccatatgccagagccctgttgtcctgcaggcttcatcaaccatgtggcacttctcttattctgcttcttcccgccatgccatatcccacctccccccagttcaatactactc

SEQ ID NO: 58701 - DNA, 819 bp, Homo sapiens
tctagtggagagggacaaatccagtgctgtgtgctcagtactatggtaaggatgcaacgggtgtcacaggagagactcacctgaggagccaggaagtgcaggaaagggcttctaggagtggtgacatctgaaatggcaaaggatggaggagagggatattcaaggcactggggaaagaatgagctagagatgtagacttgaataacacagccgtttacaaccttccagctttgtgtctagaactcaggatgaacatgtgtatggtaatatatgaatagaatgagtctcagagtttatactacaaaggattctgggtttcagactaatgagtttggaatttattttgacactaatgggaagtccctaaagaattttgagcaggggagccatatgatcaaatagcattggcagcaaatacttacagtacaacatagtggacactgtgctgaaaacatgacctaagtactacagaaatgcagaaaaggaggggggtaaggctgtgcttccagaggaagccacatgtgagatgagtttgagaggatcaggaggagtttacaggcacaaagggaatggagagcatttctactagatggaagtaggtgggggaagggaaggaagtaaggagggaaggaaggaagaaaggaaggaaggaagggagggagggagggaggaaaattgtaaacacacttcaataaaactgtgaaaatctaaagaaaaccttaatttgatttagatgatgtagacttgatttacatttttattattgatttttttcccaaagatatttatttttatttttatttttatttttttaagatt

SEQ ID NO: 58702 - DNA, 1602 bp, Homo sapiens
tctgttcagtattttccagactctccgcttctagtaaatcacaagttcattatagtcacaccaaacactactttgctcatttgttccagttattatttttatgctacctgtgtgttccctcatagacatgaagtagaagaacatttttaacacaggttgttttcctcccacatcttcaacacctgatgacatttagctgttaggatattagtcattcttcctatgccgatatgactcagtctaggaccatctgggagctagaatccatattttcagcctagattcaccaatgacctgttaggtgaccactgggaggcctttgcccaggttcagttccataaaagaagaaggaatgtggccttcttttttcacatagagtcactaggatttttttaaaggtaataacaaaatcctaagaatgtcttgagcatacatatatactatataattaaaactgtaaataaaattttaatgaacataatgactgctttaagtagttattttaagaataaacacagcattgtatattggccattttagactgtaatggagggtgttatcactccaactactagaggacacattccatttatgtagttttacctcgaccaccaactctgtaatcttgagccaccatctcactttcctgtcattatcccatctgtgaaatgaaaagtcaggactctgaaatttctaataccatgtcaactttactaatatacaggatgttttgtctaaagacccaagaggtaagaataagaaggtggtatggatatagtacaattaaattactttaggaagccagaaattagggaaaagaagaaggaaaaggaggaggagaaagagaagagaaagagaaagagaagcacttgtcttttacctgatgacttcatgggtctgagtcagcgttaatatgtgagcagtttcagactgatgcactcacagcaggtctcctcatagtggctattttacctagaaagccaaagtccaaggaggacgagcagaaaagtgcttttcgcatactcacagtaagtactcagtgtgctgtccagggtcaagaaaaatccccccaagagcactcctattgccctgtcctgcttttttagttcctctctgcctttcagacactcagtaagttattactaagggcttattcagggacagaaacccctctaagtgctttattatgtactcatttatttaatcctcacaacatcctaggaaataggtactgatagtaattctgttttacagataaggagtttgaggcagagagacgctaagtaatacagccaaggcaacatagctgtcaagtggcagagcaggattcaaactcaagacagtttatctgtgatgcctgtgctgctaaacatggacttggaactctggaatcagatgctcctgtgtccttcccagatgagatggttaactgtgggtacatctttaaactgagaacagtaaaccctacctccctgggttgtagcaagcattaaatatgtataatacttagtatagatggagctcttaataatttttttctttcccttagaagtctccatttaaatctctccatttctcagtctatagagctagaattcttct

SEQ ID NO: 58703 - DNA, 646 bp, Homo sapiens
caaattaaaatctaattcttcagtagtgacttaagataatttatgtgccttaaataaaaaatgtatgtgctttaaatcactttctagaagctttcaaaggtttttaatagcatttagatgtctagaatatttggagcaactcagatcattccaaaattcaaaaaacacataaaataattaaaatgaatagtaccttcctaacactggatgtcaaacagccagtgtatctttacgtaattcagtttagttcatcgaactctgttctatgcctagtatgtactgagcacctccctctgcacattccacatgcccaagtcaaacagtgaaaatttttttgtgaatctgaattctccaatgcaggaatcacttcctgaaataaaggcagaatggcattttaatatctccaagtaaatgaaaactttcaagcatgttgctttgtgaacactaggtgcttaatagctgttgatttggatttctggccctgtcagatgaaccattcactgccatcaatattcagtgcaagaagaatcctccagagaacattgatgtagctttggagtttggagcaacagggcatgacctagacaggatatgctttcctatgtcttgagccaaaaaaatagaaatttccttccctgaaagcaat

SEQ ID NO: 58704 - DNA, 2464 bp, Homo sapiens
agcaaatgagtgaatggaatgaatgatcctcagctttatgttacatcttacagcaagtgtaattgttattgattattattcccatgatcatctctctgaatgcttcaaagttgtttaattacttgtatgacaccactgcctcaagacagttaaagcactagggggaaaaatgcctcaaaacatttcaaatcaattgaagtttttagataatttcctgaatatattgcagtaatttatagaaaatgtagactttatctgcaggctagactgtaaatttatgtaaataataaaagccctttataatttctcaaactctatgagttaaatatactggtcattaatgtccccattttatagatgggaaactacaaggttgactgctttgtccaaagtgacaaacaaattagtggcagagcaaagattacaattctggatttctaaatgcttgtggaacagaacctattaccttcagggaaaagaaacttggaagaaaggaagggaaatgaggcttgaagccagagacagtggatgcaagatcaggctctgatgcttactagccaagtggggcacacatgggccacatccattgaccttggcaagactcagtgtcttcatcttttaaataaggataataaaacttatccaaaagtactagttcttaatctggggataatgtaaggatccctggattcacttcagaactccttgaaaccataagcaaaattcatgtataagtttctgtgtacattttactggtacaaggatacatagctttcattaaattctcaaagtggcctactgagcccaaagcagtgaagaaacagccactatctgtttcagtggtcagtcaccaacaggacaagcaatggttgaatacaggccctggagtgtgactccccatgttggaatctggctcagctatttgctagtcatacgcaaagtccatgactcatctttatgggggtgaaagagtgcataccctcttagtcactttgaggattcaacaagatcatgcctgcaaagtacacagtatatggtgccatctcaataaatattagctgctgtcattgttctcacatatttcatccacaatagcatatctaggcgtcactgggagtcatccttctccctcacccacatcattcaatccacatcaaatctggctgacttgctacctgaaatacttcttgatttattcacctcattttcattgagacttttacctcatggaatcaggccctatcccagcatatctccctgcttgatcactctggaatcctctctcccccagggtgaattattaggcactacaatgctaatgtgacttcagaccccaaggcaggggtcttcacactgtgctccaaggagcctcttccgtggctgtggagagggggcaggagctcctgacattctcacacgaaccagagcaagccccagctttgtggattttgtacatgaggcttccttccagtttgaagaaagggtttgccttagtttgggttgccatagcaaattaccatcaactgggtagcttaaataacaaacattcctttctcacggttctagaggctgcaagtccaagatcagggtgccagcatgaccaggttctggtaagggcagtctttcggttgcagacatccaacttatcaatgtaaactcacacagcagaaggacagcaggctgactcactgaggccttttcttataagggtgcaatctcactaataaggacttcgccctcatgacctaatcacctcccaaagaccccacctcctaataccatcccatcaagggttaggatttcaacgtatgaatctggggaggacagaaacattcagtccattccagggctgcactgcttaaagcaaacaacaaacaaaaagacaaagaactgcacccttaccctttacaaaaatggaagataaggtccaaggcaccattgccacctggctcctggtgtgtcttttcttgtctcactatcgtgtttccctcctctctgccgatattactacactagatgatctgggacttttcaaatgttttgatctcaagacccctttcccttttaaaaaagtattatgcctcctcttgttttggtttcctgttactgctgaaacaaatgaccacaaatctgtgccttacacaaatttattaccttacagtgtggtggtcagaagtccaaggcaggtcagtacagctgcattccttccgtaggcttgaaagcaagtaatgattatatgttctgctgcaggaggatttctgagtcagggctggcaaaatcaatttattattctaacagttcctttccgtaaagctataaatgcatcattataatttccacctttttacagtttccaggggtctcacacctttcaaactcaattactgatgctggagtgtctgttccatgttggggctgctgtattttcttccctttctcatgctagtggttggaataaccaaaa

SEQ ID NO: 58705 - DNA, 703 bp, Homo sapiens
ctggcatgaactgctccacaaaccagaggcaattgtttattgtcttaaatcacctccctaggccccatgaaccttatttgacaagaaattcagtacctctttttagacaagtacacctcaccccacctttggagagttgacaaaccctaagggattgtacagtccgaaaggggtttcaatacagctcccctgcaaaggctgagagaaaaacggggtggagtgctgtcattgccccttgccaccacacgaggtcactgttaaggacagatgctgccatagtgccctctggtccccgctccagcactggaggtttcctggttctctgagggaagcccgcccttgtgccaagtgtaactaagggcgcctgcttttcggatgggcgctttcagttcacatgcagcgccgccttccagaacgtccgccaaccccaggctcaccaaatcaggattcactctttcaactaactctgcaggaacagaatcaccgtccaccatttccctgacaactttaccattttaaaaagcggttgcattctagcccccttcccccctgagggtgaagtgcccttcgacgggccattgccctctgtggttccaggaggcacctgtcccgctacagagaaaggaaaacaacacatttaaaatcaggcagctggtcccaccacatggtagtcagtctcctgctaactcctcctgggcagaaa

SEQ ID NO: 58706 - DNA, 949 bp, Homo sapiens
ggatggggcggtggccttccagctgtcacacctctcaatccagggctacggctgtgcacagtctcatacaggggtctcgtaccttgcaaattaaatgctgacttccctaaaattgtataacaattcttttttgctttaagtctggctgtgattttccaggcccgctcacttgtgttgttctctttcctggatgatggctccaagcacccacacgaattcctctcccatgagtcccttctggggtgaaactccagattcctttatttctgatcattttccaagcccccccagtccttgccaggtgcctttgaaaatctccatgtccttctttccactttcacatgcataggaacctgagtctgatgaggtggcccgtgttacaatttttaaatacctacaattgaaagcaaattcagcagctaaggtttaaaatgataacggtgatatggaaatgccagttcatataatgatctacggtgtttacacagtcacgaacggaaatggactttgaatcctggtttaagtttctgcctgggaatttagcagcaagttgggcaacttgcttcctctctctgggcctcagcttcctcatctgaaaaatgggggatataaaagtacctaccttctgggcctggtgactattaatgagatggtgcatgtggaaggctgacctagtgccttgaatgaagtcagtgcccaaatatcgcctattggttatcattggtttgatgtgatagagtgaaaaacaaacatattagctacttatcaggagtcctgccagcatgggagatcacttctatttattccagaatatcttcatgaaaggtgagaaatttccaggctaaactctccaaccaggaagtagttgaaaatggagttccttggcctctttcaaagcgtcacatcctcttccccacaccccacacacatatagataaaaaggagttct

SEQ ID NO: 58707 - DNA, 1598 bp, Homo sapiens
caggcaagctggagccagggagaaagcaaggtgcctcatggaactggaaaggaaaggggcacatggagaattaaggggatacagctacaaaagagaggcagcttccatgggccaggaaacgactgataaaactgccattcctcacttaccagccaaaactggctgcctaacttaacttaaggaagtaactgccagggaactccagtaagccagcaaactgcaggtattatcctcagaatcaactgaggctggacccagggatcttgactcttgctttgagactctttccagtaagccatggtgcctagactgaagttttcgttccagcggcccctttatttcacagatggggaaactgaggcccagaatggagaagtcccaccgtagcaggtgcagacagaaccagcacagactcaagcactggcagggcttcctgaatcccagcatcccacaggagagctcctagcaggcttcagtgtggaagtgaggacactggatcttcactgacagaggaatgtgagcaaacacctgcattaacaaaggccccacaaacactgtctaggcaaaagaaccccaatcgttattctacagtctactgaaaacaacttaagcctcatattttataacaattaagcagaaaatacctgaagtaactttctaacctcaggcttaaagaaaaagtgagagagaaaaataatatatccaaacctgcatctgttccaataagccagtcaaggtctgcagccaggtcatggtttgaatgtattgctccgtgttcatgattttgagctcagatctcaactctgggatgattgcaccagtcctccagccatgctttagggtcaaatcctgatcacaaagatcacgaaaagtcaacgtcagtctcaacagaatctaaactatgtcattattttcccagacatgagaggcattcatttaattactttttgatggtaatggttagttattcaccaagctgaattcaatgaattacatttaattaaaacctatttggccccagcctttgatcatttcattccaagaaagtttcagttctggaaataattgccgtgagtcacaacccctgcagaaacactaggtctggaatcattaaccatggtctgtaaaaaaaaaaaaaaaaaaaaaaaaaaaaatgaggtcaggggcagaaaggggcttgacctaaatgctaccaaaggtcttcattcaattcatccacagacctgtgtgtgccaggccctctgggttatggagaaccatggaatctcagatttggaatgatcacatacaacataagcatgcatgatcacattttccattccaaatgctgtcaccccatatttgacaacaggccagaatatctagtatcagctatgtcctggaaaatctaagacatatagtcatcatactaaatgtgcattttcttatttggcaaatatttatcaagcactactatttgccaggccctaaatactgaggataaaacaatgcacaaaaaaactgagaaatcccagccctcgtggaaaatacagacaataaataagtaaaatacacaatggcaggtggggataagtacaagggacaaaaatcaagcagaa

SEQ ID NO: 58708 - DNA, 1369 bp, Homo sapiens
cagtggactaaaccccgtgacatgaggcaggaagccctgtggcaccaccaccttggagaggaaatgaccctgaatgctttgtgacactgaaggccagtttcctcatctaccatctgcctgcctctggaatctgcaaatgaatccacctcctccacataccaaaaaaaaaaaaagatttgtgaagtcagtggccaggatttcactcctgcttctgccaccagtgactacagcaggtgccttcacctattcacctggactcatccactctcaagcgtcaggaggggaaacacctgctcctccacccctcctgtggaggagaaagtgcttgagaaatagacaccaatgattacgaaacaacagactgaatagtacaggaaatgtcacgctgtgctacaacaggagtataaataattcaagaagaatttcagttactaacacaacaggttgcttagcatacaaaaccacatggtccacagtaaaacctatgtacgatatcatttatgttttgatatgtaacgttaacaaaaagatcacttcaacctctttcctcccgtctccatcacccacattactttaaaaagttatctgagtggattcattaatattttgcctctcatcttgattaacctgttacaactactggcctttgaaaaaacagaaacaccggactccctttatctttgctccagaaataagataagacactggcactaagccagatcattcgaggcagtgaccttggaaatcagcccttgctgagtagcagcagtcatgtgtccacactgctaaggctctaacactggagagaaaatataaaaagtcaagtgattcagccgggtcagagttatttccctgccctttggaagccactgctgcctctaaggcacaggcacagccacccaggctgcatccacaagagccaagcaaccaaatggcggctcagaagacgcagtgaaatctgccagctgaattccccaagaagcagctgcatcgaatgaagagccaaacacaactgcagcaggcatgggcagattgcccggccacatctgaatgcagcctcaaccagcgttgaaatcgaagtggaagctccttttccccagctctgcatgagaaacacgaggttaggagcacagatctgaatgagtctgccagggcttccaattcccgctcccttcatcactagggatattaccttgataagtaatttatcccttttgggtctcaaagtcttcattcttaaagcagagaactataaaagtgcctatttcctgatgtcactgagaagatcacaggagctaccacgtatagaacagttggtctatgtaagcactatagagaggcttcactagtgtggctgtgaaaggaacca

SEQ ID NO: 58709 - DNA, 874 bp, Homo sapiens
ttttaaaaatacaaaactagccgggcgtggcggcacatgcctgtaatcccagctctttgggaggctaaagcaggagaatcacttgaacctgggaggcagaggttgcagtgagccgagatctcgccactgcactccagcctgggcaacaagagggagactccatctcaataacaaaaaaaaaaaaaaagagtgaaccaggcaagaccttctgagtcataatgtaaacagtgaccagtacaaccaccaaaaactgagatctgaatgagatgagaggaatgagactggagaagtgggaggaggtgccagaaagctaagtccttatctaccacagcagggacaatatccagaattaataaattaggaaatagaagaatgagcacattacttaaaaaatctaaagactttaaaggttttaggggcagaggggagcacagaagattactgctgacccctgtgacatctttaatcctgtttgactgtgtgactctatccatgtttcactttgattttaaaaataaacaagcattaattttaacaaagtttgtgagagaagaatgtaagctaagacatacttttaagtataagctgtgcacctaaatacaaatcacactcctaaatcccctcccaaattggagaataaaaaaaggccaagttctccattttaaaagttacaaagacgcccgggcgtggtgactcatgcctgtaatcccagcactttggaagcctgaggcaggcagatcacttgaggtcaggagttcaagaccagcctggctaatatggtgaaaccctgtctctactaaaaatataaaaattagccaggcatggtggcatgtgcctgtagtcccagctaatcgggaggctgaggcaggagaat

SEQ ID NO: 58710 - DNA, 1919 bp, Homo sapiens
atctcattccatcccattccatcccatcccatcccatcccatcccaacccacccccaccaaaaggaaaacagaccagcctcgggatcggccacctccccagcagccccgctcttgggcatctctgcgccagcccgactcggctgttactattattactattgatgagtaacaacacctaacggtgcgtgggagtggccggctcccaagggaggcctgaggaaccccagccccgcgcggcccaaagcccctcagatgcagatttcgggctaaaaatcccaagaatatatacaacagctttcccgaccggggaaaggcgcgagttgtgaagtttctagagcgcatttttccccgtttccccgagtcgctccgcaggagcgatgctgcctgcggctgggggtgtgggcaccggggttcgcgactggaggccctggaggtccgcagctgggctggtccgggtcctagggcgcccgcttcccagctgagcgcgcaggaggggccccaggcgccggggcggggtcgccgcctcactcaccttctgtgcttctcttcgcctcccggtagcgctcccacaggtagcgcttcatgtccggggcggtcccgggtgcagtgcacaagggccgggcggggcccgcacacggccgcccccgagccgcggtcccgcagccaccccgcaaagccgccgctgtcgctgccctcgccccggccccgcgtgccaccaccgccgccgctgccatggtcatgcctgctgcctgctgccgccaccgccgccgcgccgctctgcgactgctgctgcccggcccaagatctacccgcgctctgccctgcaggagggcagctcctgcgtcggaacacgtggcggcgcaggcctgccctcccgccgctgcggggcggggagtgggcggagccggaggcggggtctaacgggggcggggtcgatggggagtgggcgggtctgggacgggggcggagacggggcggggcggggccgggccgggggccccacgcccagcctgctgcggtcaatttcagggtggcgcgggggtggccgtgtggtgtggtggcgcgcaggccacatgggatggaatgatgaggtacgaccccagcgccgcccgcccagctccgccgcaccttcgtcctgccttctgggactgacccccagctctggccacaaggacagcgcccctcccaccccagctgctctggccccggccctagaaggtgacctctctccgcattaatggcctctggcagtctaattaatggcagtctggacctcccctggatcgtggggcccctctgagacgtccccgatccccagcttaaatttatccaggaggacctgtgagtgggtggctgggccgaggttccactcatgggctgatgtcggctggaggatcccagccccttaagacctcagtaagtttgaagggccctcccattacacagcctggaaggccaatgcccgccccccgcctaggtttccgcctggcggcagaggtcattggaacatggtcacccagctcctgcccctgcccacgctaacggctcggtgcacaggtcttctctcaaacctgctaggctccacccgtcctgtgcctgtggttccactaaagccaaatgaaccgcaacctccctgcctgggggcaattctgtgtggactgagtcagacagagcttctgcaggaaagactgatgtggcccagccagaaccctgctgaaaatcgccgggcagcaaggacttcccaagctgtcctgtggttacttaattttgagcaggtggagtagggggaatggccctcaaggctggcactctgccaaggagaccatactggcttgtgtgaaatgggtggaacacagtttaagacaaataacccaaggcattagtgtatgctccagttgtgggatggaggggtctggag

SEQ ID NO: 58711 - DNA, 679 bp, Homo sapiens
tacatagctgttgacctcaaagtgaactgctttgaggactaatgtttggtaacactttttactgcagcgggcctaagacatgtttaaaaatgattaatggtgagaagtcccaacaatttgcggctctggcttacttcttattttatggagtccactcaggcacatttccatttagatagaaaatttccattaaaggtaggaaaactaaaaatacctgttacatgttgaaggacagctggttcagaggtctccataaacagactactttccctccctccactcttgcctttgtgtaccgaagatattgatttgctctcaccattcaccaattgaaaccacagcacacaaatctcacattagcagttggattaaccatctacaacgttcctgtgggccagaagtgggccttatattaaaggaatcaacttcaatcaacagcaggagataacggcaagaaatagcagcaagagatgactcctcacataaaaatgcttggtctaaccaccgtgagtatagactgcaaaactgaaatgtagacttatttaagaagtcacaaaaaaaaaaaacaacactgcaatcgctactattacagatgccttcatatctgaaagtaaatgaatatattatcctcccatcacagaccagacacgaaaactgttacataacagaatattatatg

SEQ ID NO: 58712 - DNA, 2406 bp, Homo sapiens
tgttggaggaagcaataaggaagtggggtgtctatgtcagagacgggcgcgggtatgcgagggggtaacgtatagagtaggttaaagagacgtagaaaatatttccaaaggcacaagtttagcatgagggacttccctcacaggaaagacacctggtgttttatatgtccttctgagcacagacagggtatttctatgaagttacaaagctgcaatcccgttctcatgtgcagcaccacaggttttgctttcaaatatctgcaggtgcatcctcctgcactcgttaaactaagggttttccttttctgtgctagacccgcttttacgaccacgctctccacctgattcacagaaagggttctacgaccgtcaggtcaccgccgcctttgtactttattggggagtcgaaggcctcagcgctgctcgcgatttccctaaggtggtcgggaaggtcccaaccacgttcttctgtaaaccagataaggaaggcctggggattccggccgcggaaaggcacagaggaggtgaacgctccggctgcccaagtgacgcacttgtaggcggattcggaaactcgtgctcttgagccggaggcggagcccccagactcagaccgaccccccagaaccgggcggccttgcccgaggcatgaaggctttctaggcccgcttctaaaagctgtgtacaatggagactcctggaataggcacatatctctactgtaatcagaacgagatgtaacatctaagacgcagggcagggctctggcaaagacacgctgggggaacgtgaaagaaagggccaaaactacgcagctggtcctcagagaccaaagactacgacccccagcattcaatgcagtgaacccctaggacgttgcatgccgggagctgtagtttctcaccaccgccacccccccgcccccccgccatctgaaagggttctaggggatttgcaacctctctcgtgtgtttcttctttccgagaagcgccgccacacgagaaagctggccgcgaaagtcgtgctggaatcacttccaacgaaaccccaggcatagatgggaaagggtgaagaacacgttgccatggctaccgtttccccggtcacggaataaacgctctctaggatccggaagtagttccgccgcgacctctctaaaaggatggatgtgttctctgcttacattcattggacgttttcccttagaggccaaggccgcccaggcaaaggggcggtcccacgtgtgaggggcccgcggagccatttgattggagaaaagctgcaaaccctgaccaatcggaaggagccacgcttcgggcatcggtcaccgcacctggacagctccgattggtggacttccgccccccctcacgaatcctcattgggtgccgtgggtgcgtggtgcggcgcgattggtgggttcatgtttcccgtcccccgcccgcgggaagtgggggtgaaaagcggcccgacctgcttgcggtgtagtgggcggaccgcgcggctggaggtgtgaggatccgaacccaggggtggggggtggaggcggctcctgcgatcgaaggggacttgagactcaccggccgcacgccatgagggccctgtgggtgctgggcctctgctgcgtcctgctgaccttcggtgagtgattctggaggagcagacgtcccccctccacacacgcggccgcttctcgaaggtcctgggggcgttgaacgtgggaggggggatcccggggcctgcggtgggccaagggacgtcaccattcctcgaaagagggcaagggaattacgtttattctcttcttcctctggaaataaaaaaagagagcaacatcatctaactgccctacagatctaatagtatctcgcccggaggtctcagcgacctcggggtggggcctctctgaggctctggctcccccgggagctgtgcgagtccctcccccctccccgcccggaggactttttcggccaccgcaaccttcggccatcccagctttcccgtcccctaattccccagactccgactcctcgcaagcccgtgtcccttcttagatgctggcctcgggagcgtgaggcctggggccagcggaatggcagtgtcagcgtgtttgattcagttttgctggagttcggttcttaacatttctcccccttctcatgcctctgggctcaatttcagttcccctcgccagaggttgcataaatcctatttgcattctgacctgtgctaacgaaggccgaagttttggcttgatcagttgggaggccttggctcggcctgcgcgcaacacgtgtgggtgtagaagaggcctggtatcagtctgcttaacgttatttataaatgatcggagacacactgtttagaagtggtgactgcctccgtatttcaggatctactgg

SEQ ID NO: 58713 - DNA, 1896 bp, Homo sapiens
acggaatcgcagaggaggaattctttgggagctaacccaaggaccctcattgctggaggagagacttgtgctaagacttgaagttttgaagaaggaaaccaagccaagttgttgggggggtggtggggggaggaggacatgccaaggataatgaaaagaatggcctcgaaatggggacaggtttgatgagttggagaaacagcaaggaagcaggcgtgaatgttaacaggggaaagaactggtaaaatggtggcagataggccacaggtaggcagcggccagactgtgtaagacctcacaggccatgcattgccctagatgcaatgggatgccatccaaaggttttgggcccagggcaaatgtgatcctaatttcgttcaagatcacttttgctgccacgaggagaatggagtggtccaggagcatctgcattgctataaaggaatgcctaaggctgggtaatttacaaagaaatgaggtatatttagctcaaaaataaaatagtagccctcccgcactcaccaggtccggtcggtagtacctgtgcaccacttctgcccctgcgcacatggccaggagactggctgcgaacattttcaggtaggtggacatgggcacgcccgcgggcatggtcggcaggctggacggggaaggaaggggcagtgtcagaagttccagctcacgactacaccgcgccagggctgaggcgctccagccagcgctggacacgagacacacggcggcgggggtgcaggaggacccctgggttctcgcccaaccccacgcctcggtttcctcctttacgagctgagggcactgagaggacgaacgccctccaggccgaggcccagccccaatcgtttatcagtgaggggcgccggcctgcgtgcggcattaaagggagctcttgatcagcaagcggaaaaccgataccaggtcgtttccccgcgccccttctacctcttggaggagaggaactgtggacttcactcctctctgcctctatacacgcgctctactagagactgtaccgcgaactgcagggatgctgggcaacaggtctaagggcggacggagcggacggcgagcaggccggacccaaaatacagggacccggggccgcaccggacaggaaagtgggagcgctgccggcgcaggcacgtgacgcagaggaggtggggcgctgggagaaagccagtgactttttttttttttaaaccaattccgacactttctcagccccaggctcccagcacctccatcactctccctatagttaaattttcctggcagatgtggaatctaaggccaggccgtggactattattacatcgtttgttctttcgtgcacacaaaggaaaccacgcctttaccacttttttaggaggggtggagtcacacattgagcatttgcgtgcttttatgggaggtcaccctcctgtgacctcttaagagtgaagttaaaggcactcactgtccctgtgtctggcgtcttttgatacccgaaatagagccacatccagacagctgtggccttatgacctggtgctactgggaaaggggaaatttgaaatcgacataacttaatccaggaatttttccattgttttgattattggttgttttttaagtaaaaggttagtgcaagggccgggggcggtggcttacgcctgtaatcccagccagcactttgggaggccaaggcgggcggatcacttgaggcctgaaatttgagaccagcctggccaacatggcaagatggcaagactccatctctactaaaaatatatatatataatatatatttttaaatatatattttatacatattttatattatatatttttaatatatattatatatttttaatatatatttatatatttataatatat

SEQ ID NO: 58714 - DNA, 2687 bp, Homo sapiens
tcaacatatattcattgaatatttaccatgtgccaggttctgagtagtgtctactaatggacagggtattcataaaagttctgtactgttttaaacgtttcactcaaactttaaacagttgatatattacaaaaatctttctgtatttactcacgaaagcctggatcctagaatgaagaaaatacatggagcacagagccacagccatctcccagctcacagatcacgtgagtgagaaataaacttctgtggctgtaaaccactgaaggtttggagttacctgttactatatgaataaactcaggaaagccaacaaatacagcagccatgtttttcatcatcctgcaaactagaaaaacccaaaagcctattccattaagagttccttaataaagtacaaacaccagtgacagaaattgagaactaatgaaacaaaagccagctgcaagaaccactgagacataaaagaggggttagtctgtaagattacgaaccactgagatttaaaagaggggttagtctgtaaggttatgggaggtgatgctcgaatgggatctagtctcgtagacgtcaaacgttaatattctcatatatccaaagtaatgcggagagtggtttatgtagagctttacattttacatagcagctttacattcaccctcatttcacagataaggaaactgaggcccaagatggcacagtggcctcgacgcccaggttttccactttcaaagaccctccctcacatctcattacctgataatgcaacacagtctttaatcggggcgaatttcggggtggaaaggactagataatgctgataagcgtcatcatcccatatacacagcaccccaaggacagcaccctatcgcccacgcgtccaccagcccccgaaaatactggagacaaaagctgacgtcggcagagcgctcctagtccccgtcttctggtcctccacccttcccgaaaggccaagcggcggagctggggcgccaacgagaagggggtgagcgtgattgggctgtcctacatcacgtgacggccagtacgcgtgggatttggctccgaggaggcggaagtgcagcacagaaagggggtccgtgggggacggtagaagcctggaggaggagcttgagtccagccactgtctgggtactgccagccatcgggcccaggtctctggggttgtcttaccgcagtgagtaccacgcggtactacagagaccggctgcccgtgtgcccggcaggtggagccgcccgcatcagcggcctcggggaatggaagcggagaacgcgggcaggtaataccggggccagcgccgcccctcccttgcgcccctcactgctgggcaggctggctggcgcgcgcgcgcgcacgcaggggtcttttaaatcccggccggaatacaaaggccggggccgcgcgtgcgcactgtggcctggtcggcctttccttccctggctgcggcggtggtggtggaggtcggggctgctctgagggttacctggtgcacctggacccttctttggttccccgcgataaccagttgactataaaatatattagtaagcattcagcagtctttggttaatgtgtctttctggatgccattcttggctagaagggttttccgtcaccctccattaccacgcagagagctgtaaagatgagtgtcgaacatttccagctccaggagttttcattttaaagttggttgatttgttgcggcttccccccaccccaaaggcctactgaaagcaactttaagggtcacgggttagataattttgttgtgggcatatgtatacactctcgagtagtcaatctaaaaatgacctttgagttttccagtggccttggggacgatcttaagaatccgtttttaaaaagtcctttgggggagtcaagagaaaaatttgcaaaagcaggagatttagggacttgaactcctggcggaagactaaatttttaaaaaatggatatggtgacagttttttaaaagataaagagtgatgatttacattgaaattaaaaggaaaaaaacctatgcctaatgaagaattatcctgactctcagtggctaatgggagctgaatttaggcaatacaagggacttatatgggcctgttcatgtctgtaaagttggcatgtctggaatctgattctgacatgccgagaattggtgttacatgaaagggcacactaaccaaaataaattagagcttaggaaaagagatatatgtagacaaagtgtggactttatcttgactttgtggatcaagtcctggaataaattactccacttctttcccagaagaactttacaaataagagaattcaccagaatttgtggaaatctctctctcataacctcacttaagagcagaattgaaacttgggccaagaataaattacacattgtaagactttattcagggtcttacagcaaaatagtaggacttcaatacactgtttagctcaaagctgtgatatgtcggcctgacttcatccaaaaggctatagaccagattttattttgccttgaaaagctttcaccttcaggaactgtggaaaattctgtgtaatcttctgaaatgactcagaccccaggtaatccttaagagagtagttctctgtcacccttgactgtgctaatcaagaaatgtaatgtgggatgtgaaaaaaa

SEQ ID NO: 58715 - DNA, 1091 bp, Homo sapiens
gagttcaagaccagcctggccaatatggtgaaaccccgtctctactaaaaatacaaaattagctgggcatggtggcataactagtgaccactacactacagtatcagttcagaaagaaagcaagacctatactagacaggcagcatcagaaggatgctggcaggaggtacctacagtagtcattattatagcaaatttattatataccaggtactgttttggatgttttacataggccaactagcttaatgctcctaaccaattattaggtactattcccattttacagatgtggaagcatgggcataaagagattaaggaacttgcccacagagctagtaaatgggagagctgaaatttgaatccagatgacctagcttcaaagtctgcttctctagctagcaaatgtgctttactgcctctcttagtgagcaagatggagatggactgatggcaatccagttaggtgaaataaaaacctgacttactactgaaagaatcaggcagactgaagagaggtctgtacttatatgccatgtatctctatccctaactttgttcctttcagtaccttaacgtcagggtgctgatggcatggtgataaaatttgtgagtgacccaagcctgggaggaatttgtggaattaactgattgatttaatcagagtccagataaatcctgactgactggaatggtgaatcatcttttacaaagaagaggcacaatcctatactcagctgcagaaaaatcagtgataaagtgtggaatgagggagaagtgatacaaggacagtgttcgttgatgggaaactcagtgtgaatcaacagtataatgtgggtgccagtatagctagtgtcatgggttctgcagtttgtctccaaaatgagcaagttggtagccctgctcattttcgggctgatgaggctttatctggagttttgtttgattccgagcaccaaaaaatgaagaaatttgaaatcatactacatgaggaattatactatttgaggaatactgtatgaggactggcttattctaaatctttatatttacagtttctagtagactgtacatatggtgaatacacagac

SEQ ID NO: 58716 - DNA, 2287 bp, Homo sapiens
ggcaggaggatcactggagcccaggagctcgagcttgcagtgagctctgatcgcgccactgcattccggcaacagagccagaccctatctaaaataaataaataaaaataaagagttgcgtatgactgctaccagaggcagtatggtataatggttggatatgactgctatcagaggcagtatggtatatgatataagggcttgggggttctggaatcagaagccctgtgttggaatcctggccccagtcttttttttcaacacctctcctttgtgtccatcagaaaattaccttactgcactgtgcctcatttccccgtccatgaaagggagataacaggagccaccacactggattgctggatggattacatgagttaatacacatgaggcacttagggcatgccaggctgtggacagccctcacttgttagctagcaatgaaacagaaacctagaaaaccatctctcctctgcttaagccaaacaaaccaaaaatacctcttgtggctcacggttcccaagcttcctggcatggctccgcacaaagctgccttcggttcgcccggcaggctttgtagcgaccttccctgcccgggtcccagtcacggtcgggagcagccgccgtggcccgggctcgcgaggcaggctcccgcccgcaccctcccgtgcgaggtccccgccctgcgctcccagctcttcgaacctctacccgagcttctctcacgttgcttgtgagactgcctcgcccacacatcctagatgctcaattaaagtggacgtaaaggaagatgctgtggcttcttcccaaaataccgaacgggaggctctgggtggggatgggagacgtggtcagtgggaagcgtccttccaccctaaggtgcgttgctccgggtggccgctggccaagtcgcctggggtgggggcggggctcccctgtcaggaccccccttccccagcgtctctccactgcccgcgggcctccagcctggccgccggcgcccgcggccacgtgaccccagcacagctggaggcgggtccccgccctccccagggagcagccggttgaggcgggagcggtgcattgtgggcagaggggcgggggttgggaagatggcggctcccagcctcctcaactggaggcgagtttcttccttcacggggccggtcccccgcgcccggcacggacaccgagcggtggccatccgggagctgatgatcatctttggagggggaaatgagggcatcgcggatgagctgcacgtctacaacacgggtaggcgcggcggcggctcgtcggccccgcctgctggagctgcggagggggaggggaggcgaggcggcggccgcggccctgacagctgtcaccgcccggtcactgcttccttgggcgggcggcggggagcgcggctcagccgggcagcccgggtccggcagctctgtcccggaccgcagctcaggatctccggggcccttggggcgcaacggaccccgagcggggcgcaccggccttcaggcgggggatcccggacgcccccaccccagcccgacaggcggacgcaggcgacagaagaccatgtccaaccgcctgggccactccccgaaatctcgcctctgtcaaaaaacaaaacccactccaaaccaaagttccttagggcctttcccgtctttgcctgccttccttccttaggaggaagaccatctagggggtgaggagggaaaacgagaggccttctggcactctcgcctcaaatacaacccggtgtttggcaggtaacggtcaagagcccctccgtgagccgcgctctaaagcggcggggacgtggtgaggcggccttgtgtctgcatactcggtgtggacgcccttctggactggccctcggaaagaggactgtcataacttgagcaccactgcagatcacaagtgcccctgggcagggagcccctatctttgaggacctctgtggaatagaaaggaaactggatttaatttttttttccccttgtaaatgctcaggctgtcacaagaaatctgtttggtgtaaagacagtgatggaattttgggtctacttcatgaccgataacttttctttgatcaaacaacttaatcacaggaataatttgaaggttaacaaaatagtggagtctgagaagttttatttttttcaccctctcctcctcccagcgccccagcatatgaaggtaaaaagttactgacactttggtcttagtgtaaaatccctggctttggaacaaattagacctgatttgaatcttgctctgccgg

SEQ ID NO: 58717 - DNA, 1975 bp, Homo sapiens
aatccctgctttcatgatacactttaaaaatgcattattcaattaatttgctgatagttcacattattttatgttataaagcatttgggggtttttaactgggagttgttaggttatctaggctgtcttactcttggaactgaagtctggattaatagtttgcccatatttatgtgagtagaatacatggtacttccaagatgtctggttctctctgtacagttctgtaagatagcacttttacggtgtggagactgctacttgcaaggttgggaatgtgcagaaagaaactattttttaaagatagactcttcctccaaagtaaggaatggctctgccatttccttaaatgtcccaaacattgttctttgattaatgattgctttgatctgaaaaaagaatttggatttggtttcttgtaaacctaatattggggattatatatgcatgaatgagcctccttggcatacctgtcctggctgaaaggcactttctgttatgacttttccttgcccagtaacctgttttcaacaactgcctagtgttcaaagttcagaaatatctttcattcagatgtactctgaaattgagccctggaaaacagttgcaaaagtatgacacaaacctgttactgcttgcttttagaggacaatcaaggaagatctaaattataccttaaaagaggcaagaatttatgccatggatcagaattttataatctcagtatatttttgtggaagaaaaaagaattacctattaacgtaatttgctcccctaaaactagtacatggcctttaagacagtgccagtggccgggcgcagtggctcacgcctgtaatcccagcacttagggaggtcaaggtgggcggattgctgagctcaggagttggcgaccagcctgggcaacacggtgaaaccccgtctctactgaaatacaaaaaattagccgggcatagcagcatgcgcctgtagtcccacctactcgggaggctgaggcaggagaattgcttaaacccaggaggcggaagttgcagtgagctgagatcacgccactgcactccagcctgggcaacagagtgagactccgtcttaaaaaaaaaaaaaggggggggggccagcacatattttaatgactttattcttacctgacacacttgctcagattaattttggtaaaggagttcttataataagttgtcttgcacaggtatccctttaatatgcagtggaaaaagaaacagtctggagtaagatcagggaaaactgtaactttactattaggcaagtgtctctctttaaaggcaatggccagaagccagagaaatgaatccatgccagtgccatctgtggcccaagatttgaagggattctgccttatggtttcacaaatccttaaaatcaggtacaaaaagcagcagtcttgaaacaaatttctaaggggctgtacagcagccagtataaaaggctgtattacacatctcctcagttttgggtggtgctgtttgttttctgtttttggtgattagtacaaaggttttacaaatgtttgaggaccttttctgatgaagttaagacctgaagaatgagtgggactaggcagagggaagtctatgtgtttaaggtcatggcaggtgggtgggggaggcaaagaacttggcataaggagcctagacgagatcaggggtgactggagctccccagtcaagagagagctaaacttggtgaagtaacatttctagctctaaaagaaaacataaattaaaactgaatatttttcaggcagtgtagtatagttccttaaaaaacaaagttagagttccattttttaactcacaagcacattatatgacttaataggagtttaaggtcaatatatacaaattattaacttatgtaaattaatttatcagctgcctaattcagggaaaccaaaaaatacatttaaaatagactagtaaaatagatttcacccagt

SEQ ID NO: 58718 - DNA, 1094 bp, Homo sapiens
ttatattgcgtttttcaattttcctatctctaacatgtaccttagctaactgcccatgtgtacaaatctgtagacagactggatgaagtttctgattcatgattaaactacactacaccatgaggtttggctaggagcaacatataactgagcagcatatagtttacatatgagaaatatatataatgagaaatttactcaacatagcccttttatttcaccaatatgacaacatgatactcaatttaaaaaaaactgagttgaaatttatttaaatcataagattttatattacaaacttttccttaatattcctatctcatatgaatcttcaccaaaaactaggggctacagaactcagtcagaactatcagtgaaaggttataatgtctacagaattaaacttttctacacttatcactcactgacttcaaataaaagggcatgaactgataagaactatttaaaatagtgctttgtcaaaatactcactgctgacattccaaaaataccattagatacttagtatgaatcattgctaacaatctacatgacttgtattataacaatgcttactaaatgcctcctctgtaagctcttcacttagtccatctgtagctgtgactgctccaccaattcccttttctcctttcatagcctgaggaaggaaaaaaaaaaagtcactgatattcaaatgaaattgtcttccaaatgcaaatgcttacttattgcctaaaattaggagcttctattattacaaactctaagcagagtatttattaacacttctggttaattacatatgaagaaggctttcagaaggctaacttttaatataagctgtaatcattaacaagacagagttagtaatgacctagaaagcaaagtatttacagataaaaataaattattctaattccacatcatatcaaaggggtaactctacttacagatgaagaagtctgcaaaacaccaccaatattgagcttataaatctacaaatgatccaagtgatcacttaagtatatatatgtctctcagccaactgggcagtactgtagcaagctgagagttaaaaattcctaaattaattt

SEQ ID NO: 58719 - DNA, 687 bp, Homo sapiens
ctaatctttgatgcttagaatatgccagccattcgcctatatataagaatgatggaaaaaaacttgctagatgcatcccaaaggttttttctaggtctaaaacatcctataaaaacttataaaacagactgtagattgtcagtaagccagccaacaaatatttactgagtgagcgcttagtatttaccaggttcatgctatgtgctggtcacgtagctgtcaacaacagacaaggtctctgtcctcagcttgcaggacaaatgttacataacctgggaggcagggtgaaggggtagagaacagagcctattagtccttccaggacacaggctctggaatcgaatcacctagtttgaattccctgccacttaccatgagaccgtgaacaaactggatgagaacaagacttaacctcccaggctcctgtacaggttaggagctaatccatgtaaagacagcatagtacaatgggcatactcagtaagtggtatatatagctattaaaataattacaaataattaagtaattgctagtgccaagtacgaagaaaaacaaagatgttttgttatgtgctatgtgagtttactccaaaagggacctcactagtctgaggggtcaagaaaggctatcttaggaaatgacattgaaaatgagactgacagataaacagaaatcagtcaggcaaa

SEQ ID NO: 58720 - DNA, 1952 bp, Homo sapiens
acctcatatggtgtatattttcttaagggcaggttgatatatgtaaaagctcaagggaatgcatacatctgtttaatgttttaagaaatgcaaatttgtatccaagaaaagcagtagtcccttcctccaccctccattctttggcatcaacaaccagagttttgcatcaatatacagtaatccttaaattaagatacaagagcaatgcagggaaggaataatttgccttttaaggaattttggttaaactttcaatactttacaaataaaccccccactgattagtgccactgatattgatccgtttgctttcatcactttatgttgctgattagtttccatactaagagagatgaaaccaccccagtgatttgtagcacgaaccacgcaactatggggtccatgcgggttagtgggatgccatttttttaaaggtcgcaggctacctaaccttgtttaaattatcctgttagagtgctttgggcgagattacgatttgtgggtgctctgtaattctttgttctctaagactaccgttctttaaggccctgcatatcctcccgcctcccaccactaatgattaaaaccttagtccaatccgaagggcttccttcccaccttcggggcaagtacagggaccgcaaaccgccagatggctgcattctttacgcgcaaaccaggctgcggggaagctaaagccatgccttcctccccacgcaggtgcctgggtggccccggccccacggcctggtcccggcgacctgtcagccctgcgagtgccaggaggccgcccccagagcgcatcccctgactcgcccggccgccccggccccgcgcccaacgcctgcctcccacccgccgcgcggcccccgggatgtgcgggcagacaaagcgccgggccccgccacagccccgcgggcgggaggagggcgcccccggggactcgcgccgccgccggggctacggggccagggcccgggccgcgtctcccgcccctcggccggctccccgcacaaaatggagccggcccgggacgccgtcgagagcggggccccgacgcagccccgcggcccctcctcggccccgggcccggagctcaacggcggcgagggtgaggtggcctggcccgcgtcccgccgctcctcagcccggcgcacaaagagccgcgccgcggccccgcgcccgctccccggcccggcccgctgcgggagcggcctcgcaggcgcggggcccggcctcggcccgcgcgggagggcgggaggctagtgcccccggccgcggcggcgttggcggcggggacggcgccgggaggagacggacatttcattcgagctaaagtggagtcggtttaggagcgatcattggccgaagcgagacacaaacctccaatgcagccctggttggctcccgtctccaatcggctgtttggttggacagaaaatggctgcgaaggaaccagtcccagcgcggagctccgcttccaggactcggcctcccctccctccgccgcgggccgcttccctcggcgcgacaccctccctccgcgccgcccgcgcgcccgcccgccgcggccccgccccgccccgccccgcccccggccccgccccgcccccggcccagtcccgcgttcctgtgaggcctccgcgccgctccggatgccgctcctctaggcgcgaggtcttccagggccctgcccgggcgcgccgttcgggtctaggcgggcctccttcccggtgctgacccgggcctgtgcgaagcgggatctctcgggcgtccctctctttgtcaccccttcccccgccacgtggaggtgcctcagccgcctgagctcagcctgcctgcgcctggatttttaagaaggggaaaccaaggacagaagccgccccctaggacgacgcgcccgagccaccgggagggtctgaacggcgggggcctcctggagcgccttcagc

SEQ ID NO: 58721 - DNA, 1087 bp, Homo sapiens
agaatgaggtggtcttcagtgtcaagtaacatatagttgactggcaagtgccctcagtgccctccccaggtgaaaagtgatgtgaagtccccctcagaacccaaccttaccttgaccactcattttaggaagttccctgccccctatcccatcacttcttttcattgcacccagaatcaattgccttcatacacttaatacagttcattcattttacttagatatacatttgtttgttgtctgtctcctatacagtatatagaaagctgcatggtgaaatgaatggtgtctgttccacttcacagtttatacccagcatctaactcaggacttggcacatcacaggagcctaataaatatctgttgaaaagtgaacgaaataaaagctacacttacgcaacaagacctcctgacattgttttccagcagccagcatcttctgttctgagaatgtggtgaactttcctgtatcttaatggatgattcattctgtggccaattggccgggggagggcagtagctccttgtttcaagctcctgcctccctgtgcctcttctgtttatcatttctgccctgatctgttggcagtggccaaaccccatggactctccctgggttttgcctccagaatcccaccctcctgttacagccctggtggccttcgaagtttcttgccaggattcccaccctgacctcctcactgggctgcttgccagcagtcttgcccaattccacccccatgttcccctcaactgccagagatagtatcgttaagatatttgaaaaattgactctagagtctaaagactcccctgctcttcaaaacccagagataagatcaagtccaaacattttggcgtgaggttcaaggcatttcacaatctgccgggaggtccctctcccagctcctctctaattacccagcccacttcctcccagcctgggttccagccacagagaaccttctggcattcagtgaatgcgtctgacagccagaatgccagcatttggtgccagctatgccttttgcctggcctggctttgcctcccctccttcaccttgaaattctccttctcatcatccat

SEQ ID NO: 58722 - DNA, 3128 bp, Homo sapiens
ctccaatcctactctttctgcaaggctgaatggatgcactttctcttttagatcaggaatcactaacgtgtgcactgaacaccttgcaaccagggtgtccgaaagggaggacaggctgaatttcttatcccctgctggtcacataggtatattcttgctatgtaactgccccagtggcagagctccccaggggtctcactgagaccaagtgcaaattaccaatctcacagttatcattaaagtctcacaattttcagcaaactgtcctgaaacttgccttgaatccatgattacaaagtaacattattagtcagaaggtttcatgtcttgaccagggatcagagatcagtgctggcaggtacgtgtttcacttcagtggctcatctcaggccaattccaggcctacaggagttaatcctggaacctctccaaaccgttctccacactgcctccaccaacgacaaaaacaacacaactcaatcagatgatgtcactctcctgcttaaaaatcttccatggctcctcattccctctggattaaatctgtattcctggatgcaacgtgcaaagccagttagcatctgtcccctgactccctttacaaatttactttcttcccaacacaggctcttcagtgcagtctgcattgagaagcaacccttcccagcactttccacacttttgaagtgcccttggctttcatttcattgcctggccaacttccactcagcatgggtatcacctccaggaagtcctccctggtacccagtctactataggtctactttagtacttataatcagttttttttttttttttttgagaggaaatctcgctcttgtcatacagcctggagtgcagtggcacgatcttggctcactgaaacctcctcttcctgggttcaagcgattctcctgcctcagcctcccaagtagctgggattacaggtgcctgccaccatgcctagctaatttttgtatttttagtagagacggggttttaccatattggccaggctggtcttgaactcccgacctcaggcaatcgcctgccttggcctcccaaagtgctgggattataggcgtgagccactgagccaggccgatcactgttgtctataattgttttacttatccacccttctctgtagattagtggcttgttgaggacaggatatgtagggtcctccagcgtctccctacccgctttctttctcagcctgcctgagagtgcctttggcctctctgcgacccagccagctgcatgttttccctgcaggcttgaacccaagccaaggccttgaacattcccaggcactgatgaagttgcctagtttggtttaggttgttgctcaagacactgacctgagccaaattctttaaaccctcatgtaaactccacattctgaccccgtcatggtggacacacctaggtagaacattgctttctctcttgaccactgggggatacatggcagcccactctgtaagtctgtcccactaataaacactttggactgatcatccttgtgtttagtgcttctttctctagaatcccatccagccccatctcaagaccatttggggctctctcttgtgggaacttccctgccactgctttgggggcaactccagccacaagtttggttggaaggaacaatgtcttttatttctgattcctagttatctatcacagttccctgcagacataagccattcaatgagtaaatgattctagtgaattgctttctagcgaaatgtatgcaggtagatgccatgcaggtcaaaggtggcatcaacaccagctggctgctcatggcatgtcctcctcaggcccagctgcactctccactgcaaattccatgagatatatctatatctttacaataattttcccacccgtccccccattaagccacttcaaataggttcctgttgtttgcaactggaaatgtcctaagcaaaacattacctcatagccttattgaattggatcattgtattgatttgtgcatctcgctgtaaattttatcttaaaaaaaacacaggagaaaaattaccccatggggttgccaggaggcagacatgagataatgcttgcacaatgctgtgtcagtcaggaatattttggaaacaagtgacctaaacacaaaacacaaaccaggttaagtaaaaaatggaatgcacaggctcacagaactggaaaacctagaggtaggtctgtgtgtttgttctctattgctgcataccaaattgccgtagcaccaatttagcagctcacaccaccacccacgtattgtctcacagttcaagactgaaatcttggggtcagctgggctgagttctcatctggaggctctgtggataatctgctttcaaccccattcttcttgttggcagcattcagttgctcgcagttgtaggactgaagtcccatttcctccccagctgtgctgctctcagttcctagaggttacccatggttccttcccatgtccctgccacaggcagatcacagcatgaatgtttgttttcttccagattaattagagcgtctctctctgacttcctcttctcacctcagatgatgaggcacccagatcatctcccaatcctacccacaactgattttaggccttcataatgaaactggagagtttccttgacccctttgcaggacttgcaacaggggtggctaatttactctgctgtcacgctcaaccctttatggaagggagcacatgagcaggatgggtacgggaaccagagcaaaagaatgctggaacctccagcagcttctctcccatgggagcaagccctgtgtgggccctgcggcagcatcccaagagtgttacaatgctcttttagctctgctgtcctggtgaggggggtgcctgttatacccctgagccccagaaggcatgttaccagctcagtgggccttttgtctcattgtgtggggtggctgccctctgccagcaagggcaaagggccggtgtgacagcctttttgggatcctgcacccagtgcatcccaaattcttgtcccatgcccaagaggaatgaggtcacccagacttgaaggatggcaaatgtagagattttactgagcagtggaggtagctctcag

SEQ ID NO: 58723 - DNA, 1683 bp, Homo sapiens
agtagctacaactacaggcgtgtgccatcagacccagctacatttttttattttttattttttttccgtagagacaaggtctcactatgttgcccgggctggtcttgaacccttggcctcaagcagtcctcccacttcagcctcctaaagcactgggactgcaggcatgagccaccatgcttggccagagctactctcttatacaggaagtacatttgaaaggagtttttacattttttcttgtctcttattgtggattgaaaagcattaacctctgttaaagaaatttgggccactgaaagtagattagaaagagagattgaggaattttcaatgttctggtgtgcccttaaatgataccagttccactgaaagtaaaggcccaccacaaagaaattgatgattctgggaacttccttgctacattaaattttaaaacattgcactcaacaattacctataaactcttttacaacctatttgatattcctggtatttccacaaatagtttagaaaaacaatgtggagtaagtagtgagacaggattgttcccttgaccttgacccccttcgtgggcgggaactggagtggctcatttcgctcagcctgcggctggccactcctcacaagagagagtgtgcaagcaagtgagtgagggaacaggagggaatgaaggctggaactggccggtcactcctctctggcgggagcaggctctgtgcgggccccgcagcagcattcgagctcttgccctcttggcacccgggttcttgtccagcatccaggaagaatcaggtcacacgaatgtattgaagggtagtgtatgcggaggattttactgggcgatggatgtggctctccttggaatggggagttggaaaggggatggtgcaggaaagaggtgatctttccctgaagccgcactgtctgaagtttgcagtgtctatccgcagtccccagtgctcagccacttgtatccctgacgatcagtcacttgtctgctcaccacttacaatgctctgccagctgaagtctttttacgggcacaagataggtggagtggcaggccaaaaaatcaatatttggttggaaaaactgggtcagctgttttcacttagggccacagttccaggcctaagggtgaggtttagccaggagcccagccgttctgtatcagtaagatccaataatttcatataacgaagcagaatggtgaaacattatcatagaaaaagagtagactcaccttcaatttcacaaaagtgttggttcaaatgtcaccttctcattgaggcctgctctaatgatctagttaaaattttactcctggccaggcgccctggctcacgcctgtaatcccagcactttgggaggccgaggcgggtggatcacgaggtcaggagatggagaccatcctggctaacacggtgaaaccccgtctctattaaatatgcaaaaaattagccgggcgtagtggtgggtgcctgtattcccagctactcgggaggctgaggcaggagaatggtgtgaatccgggaggcagagcttgcagtgagccgagatggcaccactgcactccagcctgggcaacagagcaagactccgtctcaaaaaaaaaaaaaaattttactcctttatcactcccaaatccccattagcaatctcaaaccccctttttgttcc

SEQ ID NO: 58724 - DNA, 1960 bp, Homo sapiens
gtagaaacagggtttctctacattgcccaggatggtctcaaactcctgggctcaagcgatcaatcctcccacctcggcctcccaaagtgcacaggtgtaagccaccgcgcccagccgaaggataaggattttgggtggtgcgctcttttctcctttccatttctgcattttccaatttacctttagcgaccgttctttcctgttaaaaaaaaaaaattcacgaccttgaagaagatacacgggctatgacttcgctgttgtcaccgagcgccccgcccaccgcgttctccgacccgcggccggcagggggctcgcggcctccgccaggcgtccttcggctccgtcagttcccacagggccttgtgcgacatgggctgcgccgagggcaaggcagtggcggcggccgccccaacggagctgcagacgaaaggcaagaacggcgatggccgccgtaggtcaggtacgaccgagggcgaaggcctggtccccaggtcgacgggccgaagcgggccttccggccggggttggggataaagtgccccggagccctggccttgaagcccctcactggagtcagtgactgaccgcgcgccacgctggagaccccagaaacgctcccccaggtcaccccgggagacggaggccggcggccggccgagggctgccccgcccgctggctgtgagagaggtgggaggtggaaggaggagcgggcccgccgcgaggacctgcccggaaacctgtcggaaaccgaaccgagatctcggcagcgacccgcctgatttcgctcagggcccgttagggcgtcctcttcctacaagcaccgtgtttccaatgaaaggttacgggggaagcgaccaaaccgacagccgagtccgggggtgccccttcacctctccagaagcccccggcccactcccagcatcctcctccatcgagaatcttgtccgacacgccttcccggccccctttctccatccccttgaattttgggcacatttctcccaccatcatcccgctttatcctttcacttgttcttccagaagagaaagctcccagtctcttctccattgtccggataatgccaataatggctagtggttactaagcactgacatgagaggggcctttggaagcactagacatgggtaataatcttggttcatgtttccagccatactgagagatttatcataaaccccattatacagatgaagaaactgagaagcaaagaggttataaaacttacccaaagcacacaactagtaagtggaagagctgggataccagttgaggccatctgactcaaaagccctggtcatagtcatatggccgcctccaccttttttataggcttgagaaagtgaggctccaaaaagtgccttgcccaatggctagaattattaaatgctgtaggatctgcctctttcaaaggcttacagtttagttacaaggcagcatatggtgaagggctaaaaggagtggtaaaaacagccaagtggggatggcagctcccatagatgaggtaggatttggtagaggtgtctgaagggagaacattcttgttaggggaagcagccggtgagaccatgctagagatagggaggcctgtatatcctgctggagttaaggacttggattaggggaagggaagaataaaggaacagggtaggagcaaggtcaggcaaggtccaggtcaggcagctaatttgtggccattagtacaatgaaggagtttgagcaggtgcatcccaaattgacgtttcatgtgccatcctcaggatcttcttgatatctatgtccttccatttatttactgtttttctttagctacattctttttgtgtgtggttaaaaaaaaaaaatttaccatcttaacaattttgttttttttttttttttagtttcgctctcgttgcccaggctggggtgcaatggcgccatcttggctcacctcagcc

SEQ ID NO: 58725 - DNA, 3232 bp, Homo sapiens
ggattacaggcccgccaccatgcccagctaatctttgtatttttagtagtgacggggtttcaccatgttggccaggctggtcttgaactcttgacctcgtgatcttcccgcctcagcctcccaaagtgctgggattacaggcttgagccaccacgcccggcctgaactattttataatacagaaaagctcactcgttataatacaacttgctaaatttttacaaacgaagtatatgcatgcagcccacactcagctgaggaaataaacgtttccagtaccccaggagcccctctaatgtctcttacccccataccaagggcaaacactactctgatttctaacagcatagaagaatttcacctatttacatttactttttgaaacttaaatttaggcatattttaagcattaatctattaaagcacggctttatactaggtatttttctttttcttttctttctttttttttttgaaatagggtcttgctctgttgcccaggctggagtgcagtggcccaatcatagctcattgcagcctcaaccgcctggtcttaaacaatcctcccacctcagcctcctgtgtggtaaagtgtgccaccaagcccagctaatttttttacattttgtagagatgaggtcttgccatgttgcccaggctggtctcaaacttctgggctcaagtgatcttcccaccttggcctcccagagtgctgggattacaggtgtgagccactgtacccagcctagatatttttctatacacatacatatatacataatgatgattattatttttctagagatgggtctcactctgttgcctagattagagtgcagtggcatgaatcatagctcactgaaactgaactgctgggctcaagtaatcctcctgcctcagcttcctgagtagctaggattacagggacacaccaccatgcctagcctcaattttaaattttttgtagagataggtctcactaagcaacagccccatctgatctcgaacacctggcctcaagtgatcctcctgcctcagcctcccaaagtatactgcaccaggcccatattatacataactattgacattaaaaatgttcttttgtgtgtcacctacaaacactctagaagccaccttccttaagtaccatatgatctctaagttccttctcaaattaaaattatgtggttaagtttcaagaaactaatttcttaatgatgcagaaggttttgcttgaatgactcttcaaccgagcatctattatttatcaggcactgggaactcagggataaacaaggcatgatctcagtccttgaacatagagtctcgtggagaagaatggcgtagaaaatgcagtgtcatgatgtgtaatcataaaagtagatgggtacacaccacttcaggagaatggcagagggagttaacatcttggcacttagcatttagtatttcttctgtaacacacattccattctattttaatgagcttgcaaacatttttcctgctggatttttgaggatcaggaatgtgttttgttcactatcttatctcctacagtccttggcatactgccctacaaatcagtaaatgtgtttatatgactcatatggcaaaaggcaatttttttttttttaataagtgaggaatgttccaaaagccaatgctattaacattgaccagcttcttctagtaaggagaggagacagtattttttcaaagtgcggtcctaagaccacctgcaagagaattaattacatgctgggaatgtgtagattaaaaactcattttcctgttctccatttcagacctactaaatcagcctcagagtgaaggaagcttcatttttggtgtctcaagtgattctatttgaaccaaggcctgagaacactgcagtgaggtgtttaggccagcgtcaaatcacctatttctgggcagaggtgcctatccttagcaatggggctgaggctggggtggaggttgctactgcagatcactgaggctgataagggtgagtcagatgccccaagaggaaattgaaagctttggaatggaaccaaagatcgtgactgacatgcagtcatgcaatctgcaatcagaagttagtattacacgatgcgctagataattgtagagtaatcttgctttttgttgattttaaccaggtaatttaaagtcattactcattatttggattttcacatttgaatgtttactctttgtattaatgtgtactgagtatttaaagcttttaaattagcttttttaaaaagtgtattttaggccaggtgcggtagatcatgcctgtaatcccagcactttgggaggccaaggcgggtggatcatctgaggtcaggagttcgagaccagtctggccaacatggtgaaaccccatctctactaaaaaaatacaaaattagctgggcgtggtagcacacacctgtaatcccagctactcaggaggctgaggcaggagaattgctttaatccaggaggcagaggttgcagtgagctgaggtcgtgccattgcactccagcctgggtgatgagaacgaaactccgtctccaaaaaaaaaaaaacggtgggggggaggcggtattttagatttacagttggattaaatccttgaaagaactcaaaagaaggaattaatctgttaatgccttttctttaccttcataaaacatcagggaatatttcatgaatattccttatatcctactttctagctctgagcattactttgctggtagaaactagtctacatgtatataactataaatgactatcacaaatcactctttgatgttaaaaacaaactatctggctggttgtggtggctcatgcctgtattcctggcactttgggaggcccagctgggaggattgcttgacaccaggagttcaagaccagcctgggcaacaaagtgagcctcagtctctgcaaaaacaaatagctgggcatggtggcgtgcgcctgttagtcacacctgctcaggaggttaaggtgggaggatcgcatgagcgtgggaggtcgaggctgcagtgagccatgatcaggctactgcactccagcctgggtaacagagggagaccctgtctcagaaaaacagcaacaaatctacctgttgggtttttcgtttgtttggatttttattttattttattttattttgagacggagtttcactcttgttgcccaggctggagtgcattggcatgatcttggctcac

SEQ ID NO: 58726 - DNA, 2587 bp, Homo sapiens
caagcgattctcctgcctcagcctcctgagtagctgggattacaggcatgcaccaccatgcctggctaattttgtatttttagtagagaaggggtttctccgtgttggtcaggctggtctcgaactcctgacctcaggtaatccaccggccttagcctcccaaaatgctgggattacaggcatgagccactgcacccagccttgagttaagttttgatcggtgtccactgtaatgctttgttgacagttactgtgaatgaccaacctgtaaaaggggaaaatccaaacttctaaccacactgaggtcatcatggatttataccatgcatgaggacataatgattataataactaagctattgagtcttttacatctatttacatcctttacatctatttactcatctcgttttccacaatcaccacatgaagtgtagatactgtatttatcaccattttatagatgagtaaacaaaggcacagagaggtaacagaagttgcctaagggcacacagtttgccagcagaaaagccaggttacgtgatttcattgcgggctcttataactattgagctatactgcttgttagtagaacgccagatgatgctatgggattagcccagagatttacaaaagaggagacctgggcacatttgaaggcggaatggcttaaacggccctgaatacaagataggaagaggatgttgaagaaaggtggggtcccctaagaccacttggaattgggataggttataggttgtagtgctctggtaaaggcgagctttagcagaggtagaacaatccttattcttctgaggttgcagtgacatgtaagtatagagagctgctgggaagagaagacagagaagtgaaagtaacttgtacctgacgacttgagcctttgggcagtgtgctggagctggctcgtaccagctcaagagaccccttgttaaacatcaaggaattttgcaagtaggttggtagcttgaaattagccaaagtgggagtattcaactccagaaattagcaaatactacaaatcagggcctccccaccaccactcagaactggtttaccagaacaccttacactccctttcttctcttttccacttcactaacagtcaaaagcctgctgaagtgccagttgaatttgaagcttgagtgagtgcccattatgggaaaggcactgtgccagatgccagggtaagaaagaccaacccctcaagtaaataatactgtggtggagagtgaagagcatgcaggcgtaaatcctggactagctgtcggctcttgggacagtcacttaaacttgggttactcatctgtaaatggagataataatatatatcccaaagggttattgagatgactgagaacatgtaaagttcctggcacagaggtgttcattaagtgatggttctaagagtggggacatgtaaacagatgtctttcatatagcttgatataagaaataaagatgggagccgggcacagtggctcatgcctataatcccagcactttgggaggctgaggtgagaggactgcttgagcccaggagtttgataccagcctgggcaacaaagcgagaccctgtctctacaaaacatttttttaaatgaagcataggccgggtgcggtggctcatgactgtaatcccagcacttggggaggccgaggcgggtggatcacaagatcgggagatcaagaccatcctggctaatgcggtgaaaccccgtctctactaaaaatacaaaaaaaaaaaaaaattagctgggtgtggtggcgggcgcctatagtaccagctactagggaggctgaggcaggagaatgacatgaacccgggaggcggagcttgcagtgagctgagatcgcgccactgcactccagcctgggcaacaaagtaagactctgtctcaaaaaaaaaaaaaaaattagtcaggcacggtagtgtgtgcctctggccagctacttgggaagctgaggcatgaggatcatttaaacccaggagtttgaggctgtggtgagctatgattgtgccactgcactccagcctggatgacagagcaagattctgtctccaaaaaacaaacaaataaacaaaagaaataaagacagaatgactacaggtcatagtcccctcagtagattccagagttttcagggtggatgattcatggatgattttccttgtttgttatcagaaggttaccggggttttttttttgtccctacaaatcaagtttaccggatttacttgttgtttttaccggtttttagcctgttcctcactctatattatttaattgtaagacaaacaatggatttggaggtaggcacagttggatttatataccagctccaacacttacctggtttgtgacctttggcaagattctttttttttttttttgagacgaagtctcactctgtcacccaggctggagtgcagtggcgtgatcttggttcactgcaacctccgcctcccgggttcactccattctcctgcctcaccctcccgagtagctgagactacaggcgcctacaaccacgcccggctaatttttttgtatttttagtagagagg

SEQ ID NO: 58727 - DNA, 2930 bp, Homo sapiens
aggctggtcttgatctcctgacctcgtgatccgcccgcctcggcctcccaaagtgttgggattacaggcgtgagccaccgcacccagcctctgatcaaattcttaaaggccaaattacctttataaaactgaggaccccctaacatttaccttgtaaaagcttttttttctccttttctctgtgaaaaagatggaatatacaaattaactaagtaatatctgcatttttacagatttaatctctcaacaattatttattgatcaattactatgtgtgcatactatattaagtgctgggaacatgatggtgagcataactaatcctggtccctgctcacatgtggctatgtacatctatattaattaaacttaaataacattagaacttcacatccacacctgtactagccatcttttatgtacttaatagtcacatgtggtgagtggctattgggttggacagtgtagatttagaatattttcatcaccacagaaagtcctcttggactgtgctattctagagtgagggaggtggacattgatcaaatactcataaaagtatgattgcaattgtagtaagtactaggcagaaagaatagatggtaacatgagaacatttcatagggggatttgacttctctgttggttttcccaaggaaaacctgttcaaactagatttgctcaatgcttggaagttagcaaagccctgtggtgggagggaggacagtaattacagggactgaaagcaagctaatgactgaatcatggggattgaggagaagtttgggtgagatgaaggggtggaaggaccacaaagggccttgtagaaagaagatgaagaagcagagaggcttagtaacttggctttgcagttagtaatagaacctggatttgacttcaaagtctacactgcataataagggtatattcaacagactttggttctgcaattatctctttttgctccttctttggaaattgccaaagttccctctactggattattcctttagcataaaaacatgctgtaataatttccttcttagacaaaccaaaaaaaccaaaaagtctggccaggcacggtggctcacccctgtaatcccagcactttgggaggccgaggagggtggatcacgaagtcaggagttgaagaccagcctggccaacatggtgaaaccctctctctactgaaaatacaaaaattagctgggtgtggtggcatgcacctgtagtcccagctactcgagaggctgaggcaggagaattgcttgaacccaggaggcagaggttgcaatgagctgagatcgtgcctctgcactccagcctgggtgacagagtgagactctgtctcaaaaaaaaaaaaaaaaaaaaattcctctatcctacatccctctttagctcctttcctattgttgttttgttttgttttgtttttatagcaaaacccctttaagagttgcctatacttactccctccatttccttattttctgtttcttgctgaacttcttctaattaggatttcttacctaccaccattttcataagtgacctccatgactcagcccttaccttataggatttcttggcagtgcttgaaatagttgatcttcctttttggagcacttcttcattggcttctgagacaccacacagtcttggttttcctcctacctcctgccagctccttcttaggctccattgctgggttcttttccccttttgcagtttgagcgtgccagggctctgtcctgggccatctttatttctctaaatacattaactcctgggtaatttcatctagtcccatggagtgacagttaattttatgtgtcaacttggctagcatacggtgcccagttgtttggcagataaaagcatagatgttgctgtgaaggtattttttagatgtgacttacaatgaaatcagtaggctttgagtaaagctagtgaccctccataatgtggatgggcttcatccaattagttgaagaccttagagaaaagatggaggtttcccaaagaggaagcaattctgcacccagaccaccgttagtctcaagattgccacatcaatgcctgcttgaatttccagcctatcagccagccttggagttttcagacttatcagccctcacaactgtgtgagtcaattctttaaaaaaaagaaaagaaaaaaatctctctatatatacatgtatcctattggttctgtttctctgaagagctgtgactaatacacatggtattaaatatcttttatgtttgacaccaaatgtttatttctagccttgacttctcccttgaactccatacttacatatccaactgcttagtcaacctctccatttggataataatagatctgttaacccatactatggatttgtcccaaactattgttttcccccacctcccatctttcttcctcctctctgggtgttcctgcttttcattgaagagtgctattatttaccccattgctaaagccagaaatctagcgttatcattgattctctttctcttacatctcttattccatccatctgtacaactgtacaacatatatctgtgcaattagctttaccttcaaatgtattttttaacctcactaatcagcctttatcatctctagcttggaccaggacagtaacttcctagcaggtctgtatatctccatatctccactttttttttttttttttttctttttgagatggagtctcactgtgtcgcccgggctggagtgcagtggtgggatctcggctcactgcaaactccgcctcccgggttcacgccattctcctgcctcagcctccccagtagctgggactacaggcgcctgctaccacgcccggttaattttttgtatttttagtagagatggggtttcactgtgttagccaggctcatctcaatctcctgacctc

SEQ ID NO: 58728 - DNA, 6422 bp, Homo sapiens
gaccatcctggccaacgtgttgaaaccccatttctactaaaaatacaaaaaattagccaggtgtggtggtgcatgcctgtagtcccagctacttgggaggctgaggcatgagaatcgctggaagcagggaggtggaggttgcagtgagctgagatgcgccactgcactccagccagagcaacagagcaagagactgtcaaacaaacaaacaaacaaacaaataaataaataaattgctgcatgatgagaaatggtggaagaagatgaggttcttcttccattaaccagcaactaaatagaactaaggagtttttcctctagaattcacgacaagggtaaggcatctgggctcttaacagcagcaagaaggatttgaaagaaaagaagatggttttaaaatggtgattttaatttaaagaaaaataactacatggtgctactctgggcatctttgctataatttgctcacttaggaacaatgtgaagttaaaatgccttatctagcctgttttggaatgccgttagaaaatattaattataatcactctgagctgtctatacaagatgcttttaatggcaagcctcttcaaatcaatccttattacttgcttttagtacattatttcaagttaaatgatccttctgtgtcctaagtcatgcttttgaaataaggtgtattttcaatatatttctaagaatgaggagtttatgaccctggttcatgggtcattcggtagactaaatgagataaaggcatataaaattattaatacagaacttggcttgggagccaggagtaaatgttttttgttctcccttagacccagtcttttcatgtttttccttctttcctccttaaatcacattgtttcctcaacacccacgtactagatccattctctgttctagggactccagaatcaggtgaaacactcatgtcaataatcaaacactcatgtcaataatcaccttacaggggaagtgtcaagttagtgtgtgtagtgtgtgtgtgtgcccatttagagggtgaagaagctaaatcaagcctctgagtttcaccttggaagggcctggcaggacctggcagtggttgcctgtttgtttagagggagtgtggcttctgctggctgttaggagcccgcaacgctctcagctgagagtgcttcaatctggcattatccaaagaagtgggaaagacattccttccttccttccttcattcagttattatgtatttattcagcaaatattcatagcctgctagtgcacagtgctgaataagaacatgagtaagagcagggaagcatgagagagcatggctcaccttagtagctgcaggtggctgggtgcagctggagttaaaagacactctgagtttttcttaaaaaaaacaataaataccaaacttagaatctaataaggaagaggtgctctcaggggaagttaggtgtgttcctaagaatttgtcatttcttttcaggattagtcaggatgaactagacatttcttttcaaaagcctaataacttcctttagggaactgccaaactgactaatccatgaccttaaggcagtgggtcccaaactttgctgccaactcaatcacctttggagttttttttttttttttaaacgcagaggcccaggtcacactccacaccaatgacatcagaatgtctaggggtgggagccaggcaccaggattctaaagaccctcacgtgatgacaacagctagcaaagttctgtagctactgccttagggcatagtctaatttcttcagtaaaaacacacttattccaaatttggttccagaattgccttaaattgtttttgctctgttcttaggttgggggcggctatgagcaggcagaggatgtggtgtcacccaattaggagctctcagcttacgaggcaattagcataggttgccagggctgcacgaggagtggatttctgctttgtcattctgactctggcagttagcccgcccgctcggcgcagggcgtggcttctcgtagccattaggaaacagcaaccctttcacctcagttttcttcactccggcatttgcagcagagcgaaaggtggtcgagtcctgaaggagggcctgatgtcttcatcattctcaaattcttgtaagctctgcgtcgggtgaaaccagacaaagccgcgagcccagggatgggagcacgcgggggacggcctgccggcggggacgacagcattgcgcctgggtgcagcagtgtgcgtctcggggaagggaagatattttaaggcgtgtctgagcagacggggaggcttttccaaacccaggcagcttcgtggcgtgtgcggtttcgacccggtcacacaaagcttcagcatgtcatgtggtaggtgaggccggcgcctgtaggctggcggtttccttcctcttggtctttgtagagacagtttgcagaacagcggagaaaatgggtattgtatcgtttcttacagagtccgagtcttgaaatgtagatgacaatgtgttgagtggactgacagatccttgagaatattaagaaagtataactatgtaagaatgcttctctaggaattttcacaccatttaatcctcagaaatcctgagacgttggcaaaacacatggggtctccatgtttttacaagtagggaaagcaaggctcagaaagatcaagtggcgtgcccagctggacacagactattaaatggggcggcgacgacgaccccagggcttcctcactctctcaggcagtacaggacagtgattaaacgcgtcgaccacattgcctgggtttgaatcctgccgctgcttttgagtagctccttgagcttggacaagtttcttagcttttctgtacctgtttccctgtctgtaagttgggcctggtaatacttacttgtagagtggttgtgaagttgaaatgtaaatatatgtgaagcagtatagacatgttagctactattattacaattaagcagctatactttgttttttgttttttgttggttttttttgtttgtttgttttttgagacggagtctcattctgtcgcccaggctggagtgcagtggcacgatctgggctcactgcaaccttcgccccctgggttcaagcgattctcctgcctcagcctcctgagtagctgggattacaggcacctgccaccgcgcccgactaatttttgtatttttagtagagacagggtttcaccatcttggccaggctggtcttgaactcctgacctcatgatccacccgcctcggcctcccaaataagcagctatacttttgaatgttggcgtgatttatgtctaatgaataggcctcatgtcagtgtaactgtggaatctgtatgttccactgagttcacccctttgtgaaattttaccattagtgcctagtttcatctgtagcgttgtgtattgcttcaggattctttttaagaatgcaccaggtaggcagagtgttcttaattttgctccacggtttcaaatgtcaaggaaacgttggaagttggattttggcattcagtatagatgcagagttgaaagcaagatcaaactgggaggtgttttgtgaaagttgagataaacgtgtattaagcttcttttttgaagcttttctgaattcgggatttaccgggaaagtaggacgtttaattttagcggagtagtgcaatgatttaaccctgactagaactctgacgtttacagctagccttgaggccatgttttcagccagtgtgcggatttgccggggtcagactccaagcttgattgtgagttctagcctttgtcagaaatgcagcaagtcatgctaacttgcaagggagtcaacagagggcacgcggtgcctgcggggccgggacggaagccccgcccccggcgcagttcccgcctgttagcgggggagaagcaccttacacgctccgctctgcttttgtgccacacagaggacggtcgggccctggaaggaacgctctcggaattggccgcggaaaccgatctgcccgttgtgtttgtgaaacagagaaagataggcggccatggtccaaccttgaaggtaggagagagtaacgtatctttttaaacgggggatgagctcgttgagctcagcgtggtcacagcctgccttttaaagccagcgtggatgtgaccctccaaacgggacgcagcgctgggaaatgacgaaaaacgctcgtgggctagcgcatgtgttaatcgaagttgatgagacgttggacaaatttcacatctcgggaaacttgaaatttctaacgctttttatcttttaaaatagctttttaaaaatgtcctttttctcctatttccccttcctctttccctcccagttgtaaataacattttttagcagcaatgtaatctgctaaatgttagttgtttagggaagtcctgagaaaaggggatcaggaaatgcttatctttgtcatcaaggtggccctgtaatcttcctcttaattctctcaggggtaggggacccggaaaccccagggtctggaggagagcaaccaggaagctcttggggtgacttcgttttccttcaggtgtgtctttttagcccagagttaatagttgggtgaagggaaaggaagaagtcttccctttggctggtagcaaacgcagtagaaatccttccttagacctatgctactgaggagttatagccactgagggatttatagcctacagtgttagaaaaatgcttggaggctgggtgtatgtatgttttatttatgtatttaaaaaaaaaaaacagtcttgctctgtcacccagagtgcactggagtgcagtggcgtgatcttgtatcactgcaacctccacctcctgggttcaagcaattctcctgcctcagcctcccgagtagctgagattacaggtgcccgccactacacccagcttcaccatgctggccaggctggtctcaaactcctgacctcagatgatccacggctgggtgcatgtttaagggaacaggacacctgggtgatgttctatctcacctgtggtagattaccaggttagaaaacttcccgtagtcccatcaccacgatccatgtgatttttgtccttatccatttatatctctgtaatttttaagaaatgaaaacattgccttcttagaagtaaacctaacgcctgcgttaaatgtaaaaatatatttagatgtgttgcagccttaggaaaaatactaataatttgaatttttatttattaccttttcttttaaaagtattttatttatttttgacaaatggttatagggaatggatctagacttcaaacagcaaattaatggaaaattaatggaaatacagaggcttttagctttagttaaaatatattgtgttactcagacctttagtttgcaggtaaaaagagataacggtctattatattaatattccttcctggccgggtgcggtggctcacacttgtaatcccagcaccttgggaggccgaggcaggcggattgctttgagctcaggagttccagatcagcctgggcaacacggtgaaaccccgtctctactagaaataaaaaaattagccagggcttggtggcacatgcctctggtcccagctactctgggactgaggctgaggctggggaatcaacttgaacctggaggtggaggttgcaatgagctgagattgcgccactgcaccctggcctaggtgacagtgagaccctgtctcaaaaaaaaaaaaaaagaaatatacatatatatatatatatatatatatatatatatatatatgtatatttcttcctgtctgattattctattattttcacctgtgccataagtttacatttacaaagttatatagtaatttgatctttatgtaattctactgatactcctggttttaatggcaatgggagtaaaaagagtcactctttttataagctttggaactcacttaattgatttggtctgatgttctgatgttttttctttttttttaattgaaaacttttttttctttagagatggaggtctcattatgttgtccaggctggtcttgaactcctgggctcaagcgatcatccggcctcggcctcctaaagtgctgggactgcaggtcacgacatttagtgaggtatagtgccatgaatgaaaagcataccatcaagaacacttaaaagaaatcatttagcatatttcttaagtaaacttattctactttgtgtcttttttttttttttttttttttgagacaaagtctcgctctgttgctcaggctggagtgcagtggcatgatcttggcttaccgcaacctctacctcccaggttcaagcgattttcctgcctcagcctcccgagtagctgggattacaggcacacgccaccacaccctgctaatttttgtatttttagtagagatggggtt

SEQ ID NO: 58729 - DNA, 1895 bp, Homo sapiens
tagctaatttttgtatttttagtagagacaaggtttcaccatcttggccaggctggtcttgaacttttgacgccgtgatccacccacttcggccttccaaagtgctgggattatgggcgtgagccaccgggcccagccctatttttgttttttaatgagtgctaaaaaatgaaaggagaaacagcaaggtaaggactattggtttgaaagatctgtgaacttttcagccaattattgcccacatttggggctaaatggtaggttttgaaacccttaagggagctttgggtttcagtggagaaaggcatttatttagtggagaattgagtgcttatagtcctaaaggccacacctttaaaaagaaggttaagatttcatactttaattgcaacataaataatggagggagctcttcaaaatgtccacttttcctttctccttttaatattgtttcttcctcatccccttttccctgaataaacaacagcagcaaaacctaccctgctttcacagtgagtgtactatagaagacaagggagaaagaatcctgctggaagaagttggtgagcctaggtgactcccttgataaaggatgaaagctttgcagaagagtgttccaaaaaagtgtagtctccagaccacctgctcagaatcccctggagtactcgttaattatgcatgcccaggctttacccgagttcttttgaagtagactcgggaaagagctaggaatctacccccgcccccccgccttttttttttgagatggagttctgctcttgttgcctgggctggagtgcagtggcatgaactcagctcactgcaacctccacctcctgggttcaagtggtgtggttctcctgcctcagcctctcaagtagctgggattataggcatgcaccaccatgcctggctaattttgtatttttttagtagagatgtggttttgccatgttggtcgggctggtctcgatctcctgaccacaggtgatccacccacctcggcctcccaaagtgctgggattacagtgtgagccaccacgcccggcttgccttattgtttttgttttgttttaaataagctccctccaataatttttaggataaatgtcaagtttgagacgctttaatattattgtacatagggtagtttgatcaagatcatttgatgagataattagaattgcggaaaacaaaggactagtctttaatacccaaaacatatttgttagaaaacagcaaataggaacccaatgggggaggaacactttttgttgaacactttaacaatgaatagaaaaatagggaaccaagctgtttgcagccagggcttttgtatgtccatgtataaagttggaactagggacctccaagatggttaagaactatgaatagagttcctactgctcaaagatgtggctttcataaacatcttggtttttaaagcaaagttccagtattcttatagggaacctcttttgtatgtaaatcagcatctccctcaggattccagggttttgaaatcacttgtagagaggcctattggtggtactgagaggagaagcagagtgagtgaaaaagtatttactggaataataccaagtgtcagacatagttaagactttagtagtttgaggtaatcctgggagataagactaaaactgacaactcagggcttaaataatttcttcagggcaatattaggagagatgacaggcaccaagcaatgcgggattaatatccaggtgaattttgcagacagttgcggtggccccatgttccagtcttggggggtagatgctgagacaaaggcaggtctccttttatgttttgagacaaggtctggctctattgcccagtgcagtggcttgatattggctcattgcaaccttcgc

SEQ ID NO: 58730 - DNA, 484 bp, Homo sapiens
aagtgtatatgttagagtgtgggactcaaacctgactgattcctggctttggctccaaaaagtctcttaaaaatccatttgttataggtaagtgttaacagcaaaacctcactggagaaaaatagtggactcgtgacttcttcctttatttggttacagggagacatgtgacctttgtcatccaccctatcacgtttgtgttgagcagtatgggttgtgggaaagagctcaagaatgcttggaattaacctaaactcctagaaaaggaactgaaaatataggagaaaagggtgaagaaaagaggaaaggaaatggaggtctgtattgaaccctgggtagcaactcttgagcgaagaaagaggaaaaaggggaaagaggggagctaaattatctctgaggcaactcagtctcatggttgcctgaactagtctatactgcgggaataaggtagacgccactggtttctttgaagtaccagtgcgct

SEQ ID NO: 58731 - DNA, 2071 bp, Homo sapiens
tcctacagacctcaagtgaggcatcagaagtccttgccattggcttccttttgtgtatgatggtgataccctcttgtatgtcgggaaaatgaggtagaacctgcctaataattgcaaaagcaaacagtctgggtgagtgtgtgctaagtcagcagagtcaaggaagaaaattatggactatcctttatgtccagagcacagcggacacaaaatgaagaaacacaatctagggtgagtgtggtcaggtaaggtgggtgagtgtaaaagaattgttattccttcatttcttcaacaaatactatgcaccaggcacctttctaggcagtagagctgagcagtgaacaaacatcagacatcctcatcctgaaaggcttatgttatagtggaggtaaacaggcaaaactaacacaaataagtaaactatatagaagttagtgccatggagaaaaatctaagcagaggcggggttagggctgtggggcataggcagtggaattttaattaaggtggtcagggaagacctcagtgagaaggtgacatttggcttcttctatcaagcagatatctggggaaaagcgcattccaggcacagaggtcagcaagtgcaaaggcctgaggcagcacatgtctgggaggttggaggaatgtccagtacggtggagttgagtggggaaaggagtcaaggttggagacagaacagggagagaggggcaggtggttgggatcttgttgcactggcaccattgggagccactggagggctctgagcagaggaggggtgtgcttctaacttacaggttctcaggagcactctggggctgggctgagggcagcctgagggtgaggaaagggtggaaggtgggagcccagcagggaggccgctgtagtaatctaagggagagaagatgatgcctaagccatggtagtagcagtggatggacattctgacctaatttgagagtagaatttatggttaaattggatgtggggtgggggagagagaggagttaaggatgactccagagttttggacttgaagaattggaaggactgaggttggaggtgtcatttcactgaggtggggaaactataggaagatgggtgggaattatcagatgcttgggttttgggcactgagtttgagatgcttatgagacgtctgagtagagatggtgagtgggcagttggacatgagtcgggagttccagaatgaagtccaggatacagttaaacaaatgtcacagcatcagcccagaagggtgtttaaggtctcaagaatgatgaagtgtaccacagggcatgaatgcttatagaaaagagataagctctgctgggaacctgcagctataggaggggcccacactggaacagagctgcctgaggattccctggggatcctggggaccctgtccatgatgagggatggtgaggtttagatctagaaacacaggggcgaggaaaggacgctccaggcagacccctggcaagcgaaagcatggatgtagtccaggttcggggcttggaggggcatggagacagaaagagaagcgctcaaacgcaggccaacgctgggcaccgttctggggcagtgggaagcagagaaggcacacggggacagggctgggatgagattgaggcttccggccgcaaaatccaaggaggcacacgctctcccagagcaagatcggtcctttaacagcactgagagttcagtttcctattccctcaccctaagcctggccctgcagaaccaataaacagctgggctctgagcagattaaattcccaagccacacaggtttgaatcccagcagcgcagtttttgccaagttatctgtgcttaacctcacttggcctcagtttcctcttctgtaaaataggagcagtaattgtatgcttcaggccaacagataagccactttttaggcttctgttgttgaactgcctgtcccgagcttgggggtggggagaccaaagctttgtgtggaggctgctgtcttcccacctcctcttgcccccttggactcttctttggaagactagactttcccttgctttcccatcaacccag

SEQ ID NO: 58732 - DNA, 470 bp, Homo sapiens
atcagtgactagaaaagtctctcggctcgggagattttgttgttttattctattttttttttccacactgacttcttgtgtaaagaaactcatggcagcacctaatcttcagaaataagtgactggcagctcagtgttgagaaattatactaaggacgggcactgtgggactatcactggccctgtctgggccatttggcagtcagtcaaggctggaatagtgagtcaccctcggggttagagataaggaagctaggctcagggaagaatggagttgcctgggaccaaccttctggtaagagacagccccgggctgggacacaagcttcctgactgctgttatcttcttcgcggagttgatagaaggcaggagctggattgtgtgagtgttctctccagagagacagaaccaacagggagtgtgtgtgtgtgtgtgtgtgtgtgtgtgtgtgtgtgtgtgtgtagagaga

SEQ ID NO: 58733 - DNA, 3554 bp, Homo sapiens
gctgtgtgaccctggacaccgttctcagcttctccagaacacagtttttcatctgttaaatgggtatgatgacagctcgtagcttacttgctttggaggccagcctgcccgtgtccagatcccagctctgccacttcctcctcctgtgagcctggcttttccgttttgtcagttgattcaccttcagtcaggaataatagccaatccctcaaaaggtggcaagagaactgagttgatgcatatcaaatacttgtgcttagcacatagaaattgctcaactcaacaaatgttagtttagaggaggcccttaataaatctaagttcccttttcccctctcgctttcctaaagcttcacctaagccaacagctggacagaggcggaagcttgccaagagagtcagaagaatctggactccacaccgcctgctgcagggcctgctggcctcacagggagagggaggaaggggggtccaccctggccaggtgcactctggtgagagcagcccacagaggccttgtggtctcccaacttcctcagtccttaggatgctaacagggctgtagcagagcgagtcctcaaaaccaaggggcttccccaccactctgaatccaccagcaatctctgcctctgcacggcacccagggcagggtggtccttccccgcttttctattccagaccgtccatgaactgcctccatttcctccacccacccccaacatagcctccttcatggagcatatacacatgtgcaagtgcatatgttcagacccacacacacacacactcacactcatacacactcacacaaacacatccatacacacatgcactcacacttacacacacactcccacacatacacacccacacatgcactcacactcatacacacactcccacacaaacacatccatacacacgcactcacactcatgcacactctcccacacatacccacacacacacaaatatactctcacacatacccctgcatacacacacatcatacatacacaccacatatacacacacactcccacacatacccctcacatacacaaaccaatacacacccacacatacactctcacacacaccccacataaacacacacccacacatacattctcacacacactcccacacataccccccacacctatacatatacaccaacagaaacacacacatacatacatgcacatacatgcacactcacacacacactcttttccagctttgtgtttctgcttctgccttttcagtttctttgatttcccacatatggatttcctgccctgccttctgagggtgttgggcaggtgagaagccctaagatcatgttcagagctgaaaacataatcaccagattggaatactggagatgagatggtagagaatggctagttttagcttttctcattaacacggggtgggagcagatgaccttttccttttagctgacagctagtctgctggccatgggcacaccctcctccgcaaagcctcttgtgatctccagtctgactggacacggcttcttgctgcgcccgtgatcctaagcatggggtgtgggtggtagggaaaagcctggagcagggctgcttggttgaaatcttggctctgcaagttatttggttttgctgtgccttcatttccccatttgcagagtggggtcagtatttgccctgattcttagggttgttaagaatattcgatgaggagagccacatcaagtgcttggaatgcctgtctactgatcattactgttaccagcgcgatcatggttttgatcatggaagctcttagcccactgcactgtgatcggtctaggaagtcctgtcgcttcccccacaggtttcgcagcaaacgggccaggacagttatctcaggcagcctagagaacgcctacagtgtgagcaaagccactgtttaaagtgaggtgatactttattcaccaaagattcctttacttacagaaagtcccccttgaacttatgatttgaattttagacattttacccaatctctatctttctctctctttttctctctctctctgtctctctctcctccccgcccccagccctcttcttgcataatgtgagaagaggctttcaacagccaaatggaaaccccctttgtcaccttgtaggcgtgtggcattgggacactgaagttagcaaatcggccagtgactcatcagtttcctctccataactggggtgtggttgggggatggggcaaaactggcacttggcaggaggccttggcacagttcccaggcagcattccttctgacccgtcagtgaccatgtcctacccattaaggaatattgtaatgatcagccctggaggaaggagcattaagatttctgctctgacttcagatgttttgatacaatttgggtagctcgagttctccatccctgacaatgaaaatgcccaggaatgtcagggaagcgcgttttctggaaacctacctccctgagacctgtctggcctgcacaggggggtggaccgtgtgggagagaggggattgtccctctctccccaaggtcagctctggcttgcggagtaatggctcgtgtgagtgatgtgtgtgcaggactccattaggggcccggctgtccagctgtcttgtggcaagtgtctttgcagagaggggcgaaaggagcagatagctccagaaatggagaataaagagaccattgctttctgctttctggcaaattctgccaaaatactgcagagaatgaaaaactttgaaggaaaacccctttatcagctatcccatgccttgtggccattgattccacgagcaggtgtttctgagagctggaagctggcctggccctggcctctttcaggaatagaacatgtgaggatggttggcttcaccacctccaaagggacctcgggaggagtaacctcccaatggggcaagattactcaccatgacgggcagctcagtgcatggcaacaagcgtatgctctgctgggcagccttcttggctggaaaactggctcgtgattctgactgtgactctccctcctacactttccaagccaagagcctcccccagatttcacatgcctcccgcatggcacctctgttctcctgctgccaccactcagacacccaggcgtgaggattactctgaaaccctgatgcttggccatacctgccccaccatttctgaggctgccataatgaatcaccacagaccaggtggcttaaaacaacagaaatgtattctttcccagttctggaggccagaagtccaaaatcaaggtgtcagcaaagctgtactccctctggagactctaagggaagatttattatttgcctctcccagttgccaaactccttggcttggggccccatctctctgctccatgtacacgttgctgccccctcttctgtcttcttttttgtctcttataaagacacgtcattaatatttagggcctacccacacactccaggataatctcaagatccttagcttaatcacatctgcaaagaccgtttatccagagaaggtcac

SEQ ID NO: 58734 - DNA, 1640 bp, Homo sapiens
cacatgaaatcttaaagcccaaaataattcttcagtaaatccaatgagctcacattgtactttgaaaataattctgaattcactaccagtctttcagctaacgctaggcttgactaacatgtttagagaaaaaaaattttttttacttacctgtcttacaagaactagtggacccattagtattacccacttactcactgatgttatcttacaactagcatcatcagatattatcttagcatgccaaattttgtgtattgaggtccaaggtaaataattacataactttgatccactagcagttaattccacattataaaactaatgtaacttaaagaattattgacccaaaaacaagatataatcattcacatgtatacaatttatatttgagtcacgactaaaactgttagcaataaaattcattgtttacaaattaattttgatcatgtaccgcaactattaaattttacacatctttctgctaaatggaagaacactctccaaaataatattatcacccacatactcaattgttctgtgagctaattcatatttctcaaccacttagaattcaaaaagtgtatttccaaatctgccaagtttttctaaagtagttgtttggaaagcaacgaacaatcatttagtaaaaatactgagttgcatttcaattactcatcatctgctttgctatgaaagactttctttcaaatgatctatagataagttgataaagaggaaggtaagtaagggttgttattcatgggtagttttaaccaggtacagtctagaatttaggtcactggctttagacaagcaggttaagtgctatataaacatttcctctatcaatctggaaaacagattctattctgtaatctcactgtggactttagtctcaaagcatccagcaaatgcaaatattgagatttctcagtatttcagaataattattaatgcagtctttatttacatatttctttactaagcctgggaatctaaatcattggtgaaattcatgtttgtagttctaacaacctggggctttgctcaagtgagtaataaggtacaagcaatgtttacagagtgaacctacctcaggtttagagttcaagaaataggaatgagtgaaattagtgttattttttaataactcttagaaagatgtctatatctgtaggaagcaatctaaaatgattcaatgaaaaagtataagacatcaagactccagggttgcttaataacaaatggaaacatacatacattcgggtctaggaaaagatcaagaaaggtaggagttaaagaatgagtgagtgctatgaattggatttgcaactgtgccacgttaatttggcactatcaccaccagtcccttctaaggcttggagctacattccccaaaatcccctcccctatagcttcaggtgacagtctaccagtgagaagaacttgcataagatttggaagtcaccagtgaagcaaagactattatttttggaaggtgatcagacacgcaggtgtccagacttcctcgctgtaatgcatgcatggctttctttcctgctccagggcttcaggtggcttcactgagtttcctaccacagatcgtcatttctccaacttctcctacagtcatgtaa

SEQ ID NO: 58735 - DNA, 549 bp, Homo sapiens
aatatagacaccacaacaaattaacgaaggttaaaaaaagattaaattcaccttcattcaggtttaacggtagtatgtgatcaaattaaacagcaaatatcatttgcagcattttgttttttaaccagattccctacagcatggcctatttcaaaacagactggtgttttaaatctattattattctggataatgctcaagaacaatacttttgaaatattttctttgagataagctagccaaaacttcacttttcctgccaaagttatcaagttgcttaaattcttgtatgcttaactatgtttatcagagcaaagttcaatttccaacaaatgaaactaaaggcaccttttaactcccattcaaataactttcttcttcaaatgttgccacttttgtttctcaaggcctcttcattctcttctcccgccaaaaagcctctcggattgagttctatctacctaggtaattcaccagttcttataacataatacaagtaggaaaagatgaaacacatgcatataatttcactaattctcaaaatctcag

SEQ ID NO: 58736 - DNA, 2773 bp, Homo sapiens
ctttatttacaacttaatataatatacattttattattaagatatgaagagacaaggatgatgtttactataaaaacacttggtaggtatcctgaatactatatagggcatttatttcacaaataaaatgaggctggagtcatatttgtagttctgagatataaaagctcattataattgatttaggaatataaaccttctttcatttaggaataacaaaactaaaaagaaattacaaatattcacttaaacctccatttgcaaaccagccagaagaaagcttgtaacgcacttatttatgccctgccctgtccattcatagttctcagtctgctctggcccataatcccagggtagaaccctgactggctggccactcagtgactagagtctctttgaagactttgaactaagagacacaaacacataactgtggcacatcaaagagtgatgggcactgaagctgcaaggtcacccacgacctgaccaggaagaaaacctgacaattgctgccatagctggcaaggctttccaagctatcaggtgtttctcagaaacacctaggcctgtcttatacttccaagagcatctaagaccaaaaaaatggcactgatttgataagggatgggtggccccaaaacctaactggactgcgttcctgccaagctagactgagaattgttgctgctactattgctgcttttaatgaaaactactatattcctcagtatttgtttccaatgtcttagaatatccatctcctctctggataggaagatcaatagcaaggaatggcaaagggagaaagagaaggggctatgtaggacgtaagtgggtgttagggcctggttcatcaattccatcactcactcactttcctttcctctctcttgtgattacagaggggtctgggatctgggaattccttctgaggaacatttttaaaatacagattccaggacaccagacctactgactcagaatgtgtgtgtttgaggcccataaatcttttttatttttaacttttccatgtgatgattatggtgcagacttcctgtggacttgcaatgagtagattaagcactagttcccatttttgccacttataggctggccagtatagacagaaagttggtgtttaaagaaaatcagattaatgaaaccaatggccagagtgaagcagagataaaacgatgtagtccccgaaagagagaaaagggcagagagccttccaggtaatgaaaggctgagctatacatctggaacttaggagattcccttcagcttcacatgagttagattgagtgggtgtctgttccttcaactcatctacctttttaaaaagtagtgagtatttcactgccccaatagatctttaatcaaataaaatgcaaaacaaaccccaaagagattgagctataagacaggtctattccataggaggaccagtgataggaaacttccctcctgatgcagaattaccaggatgatcaaaatggaaatgcagagaaatgtaggtaaacaagaaagagagatgacagtgtcaccattcagccattctaaagttcagaaagctcaaaatctgtgctttgaaaacctgaccaaatagcaaaactaggtagaaaaatagagaggagagaaagaaaacaagggggaatttcccaagaccagtcatctcagaatttcccaagatcagtcatctcgcagaatatgtgcagaacgtggctaagcacatagtcaacactgaactggccagggggatccagatgcacagacacatccaggtcatacttttgctcctagtattcttacttcggtataagctatccagaagtttagatgcagagatggatactcaaccaggtataccatacacagagaccatccaaatgtgtacaaaattaaaaacagagtgcctcctggaaaaaggaagccctgtaaatggagctctgggctggattttagcccacgctctgtcccctcagcaagtaccttcatgcagtgcagaatctgcataaccttacacatcagactaggcagttgggtaaaatatgaaactgtgcttaaaagacaaaaaacatatatgctagacagatattttttgttgttgtttgctcagcatcttttcccaattcctttagctaatggtatctccattacctatggtaaatccatttccctattccatgagattctagtaggtatatcaatcacagtaccctaccctgcagaccacaataatgacaaatggctcaaggaggatctgagtcccttcctggaattttatatatttgctgcttactatttcctgagtgcctacaagatgctggggctacagtaatgaaacaaataggcacagttactgctctgatggattttaccttgtaattggaaggaaaaacaataatcaggtaagcacataaataaaagagataatttgtgataaaggctatggaggaaacagttgattaaacaaagaataaatgacttacagggctatttcagaggggaaggcctttgggggaagactttcctttggaatgacttaattctgaaactttctgtcactgtgtcttcctcctcacaaagctccttctaccaccaccatcatcaccaccacttggaagaaagccgtctacatgagaagaggatctacagaaagagggaatcagagctaggcggtaagagagtcctgacaacataattagaatctctataccatttagttaaaacccactccattcctgttcttcccaactataggccaataaat

SEQ ID NO: 58737 - DNA, 1124 bp, Homo sapiens
tgtaaggttatcatttttattctacaattttagaccacgaatatctcataattttcatggctatcacatcttaaatacttatttggaggactcatccacaaggccttctctttcccctatccccagagagaagtagcattctgccatgaactggtggcactgaagcacattacctcccattagattatgaaatgggcagtgcaggacagcctccacaccaaggtcttcctcaggtggtggcctaacatcaccttcccttactgggacaccttcgtaatggcaccacccaagggatgaggccaagcttctaccttctccaaactgcactttccgtaaatcagttcaagtgcaccaactaatcacaagaaactaaattgagattacgtaaatcacaggtacacagtatcatgttactcaattatcttggcatcaagttgaaacaatgacctaactctgagttctttactcctgcaatcaagtttctcttctaccctttggtcagggctgagcactattttattcaaataccagtttgtgagtttgtctgttttcaaaagaactttcttctggagggttctaagcccagcttgaaatttaggctaaaactattctcaaaaccaccccaaaagccaatttagctgtcatatagtgatctttgctcataaaaattcccaactacccttctttcccagattagttaaaagtgtgtttctaatatccactggcatagagttctcttctattgttttaatttttttcataagagtaatatgtattcaatgtaaaaaaaaaaaaaaaggtcaggcatcacagtggctgatgcctattatcctagcactttgggaggccaaagtgggcatatcacgtgaggtcaggagttcgagaccagcctggccaacatggtgaaaccctgtctctaataaaaatacaaaaattaggcaggcgtggtggtgcacacctgtaatcccagctactcgggaggctgaggcaggagaatcgtttgaacccaggaggcaaggttgcagtgagccgagatcacaccactgcactccagcctgggcaacagagcaagactccatcacacacacaaaaaataataaaaataaaaagtaagaaaagaaaag

SEQ ID NO: 58738 - DNA, 548 bp, Homo sapiens
tcatcctttacagtttagaaaactgcatctcagagaggttaaataatatgcccaaagttacaacgttagtaagataaagacacaggacttgagttcatgactttctgactaaccagttaatgataaggaagcccctgtagacatttctctgtgttataatcctctggcgccagtgtacacagccatgggcacaaggatgatagaaccaaggtgtatcatcagtgttccctctcagctcctttcatgccaaacactagaacccagtaaactggattcaagttatttttgaacacagtttattgctcaagaatggaaacagctccttcacaggtttcacctctgatccataggtgaactatctctgcactatcttctgttactcaatcaataaatgaacaaatacggctgggcgtggtggctcatgcctgtaatcagcactttgggaggccgaggtaggtggatcacctgaggtcaggagttcgagaccagcctgatcaacatggaaaaaccccatctctactaaaaatacaaaattagtggggcatggt

SEQ ID NO: 58739 - DNA, 3302 bp, Homo sapiens
taaagtactgatacatactacatgagtgaaacttgaaaacattacagtatgtctttcgacgccagacacaaaaagccacatattgtacgcttccatttatatgagatttccacaacaggcaaacccatataaacagaaagtagattagtggtggctagtggggtggggtcaaggggaaatgaggagtgattactaagagagacagggtttcttttggggatgatgatctggatagtggtcatatttggaaaactctgtgaatatattaaaagccacactttagaagaatgagttttatggcatgtgatgtatatctcaatttaaaaattgtcactacaaaaaaaagatgacatatatacgtaatatacacatcaatgtatatcggtaacacatagatatgtgtcatctctctctgtaaatgagcatttgggcttttaaatttgagatatgctccgtgtatataaagagaagaatgaaagaaaagggtgacggggcactcgcggagccctgaacaggcatctggggtgtgcccgagccagcctcgcagcatctccatcccagctcaccttcagccatcactcatacaccacccgccgcctgtccctgccttgggcgcccgggaccgcttgtccgcggtggccgcggaacagcttccctcagcccgaggtggggcaggcgcgggggcctgggctcgggcgctgcccggcggcccggagaggcgtccgcagggggcacggctgctcgggcggggccgctccctctgctccccgcgcccccgccgccgggtcccgagcccaggcctctcggccccacctccctcccgcacctgatgcgcccgaacgcggcgccgcggccgaagccgagacttcccctccatggtcacctgttccggagcgcggcggcggcagcggccggtgtgagaagggtccccgtctcctcagaccagaccgagacaccaggggcgggggatggaaggggcattcacctggtgcccggcaccggtggtggcggggaggacagcggctcccagcccacagctccttcctgctcccgcgcctcctcgcgcggctgcggccccaagctgacagcccggccgtcggcgcccgcggccccctgactccccgccgccccgcccccgcgcggcagccccgcgcaagcgcagccgcgccgccgccggggaagcccgggccttggtgatgtggcccgcggggcggcgacccggagcgacagcaccgccccgcccggaccccggccgcgccctggcagacagctgtcgggaacgggggcgctggatgacggcaagggggcagttttctggggagcctgcccaggagagaagggctgtggcctccttcggcatccctcttccccaccagcccacgcacgcccacttcaccgcctgctccaaggtccgaacccccgaatccatgactcatgatttctcttctcagaccagcggcctctttttggctgaggtcatgtttcttgcagactggagttaaaaccgaaccacgtgtctttcggcccagcagcgcatagtgtgggcggtgcaggagccgagacgggcaggaaccaccgcaggagggggtgaggtttagggcagccccatagcaccctccccgtgccaggcaggtgtaggcgccaagcgcatggggcgctgaagagttggctggggtgccaggcttttcaagtttccccacacttgcttttaaacctagatcaaactgatccaaagtctgcatgtaaatccgagagctcatttattttatttacaaaactattgagcatctactgtgtatgattcagggaatgagacacaccccagggatactccagtgaacaaaagaaaggtgttggtccgaagacagttattttaaaaattacacagctaatgccataatgccaggattggtggctcatgcgtgtaacctcaacacttcgggaggaccaggcgagaggatcgcttgaggccaggaatttgagaccagcctgggcaaacacagcgagacctggagtggctaggagactgaggtgggaggatcgcctgagcccaggagttcaaggctgcagcgggctatgatcgcatcactgcactccagtctgggccacaaaatgagaccttgtctctaaaacaacaactcaaaattacacagctaatgatactcttttcctcaaatcaaagcttctaccaattccaagccacaccagtgatttagtagcagcttttctggtgctgaaggacaccagcatacatttatccatgttctttttttttttccttatgctttgcgatcagactttgagctttaaccttaaccttcagggtgaagggtgcttcggtatcactcttggccatctgcagtcatgctttttataatgactcatcctggtgttcctcaccacctaaaaatgaaagtataattgcaaggaatatggaaaagcagtgttttgactgcatttccagctggtttttgttctggttgttttttgaattacagatcattagaaagtagctgctcttgaaagtttggcagaagttccacccaatatgtgttcctcccctgagtgtgtagtctttcaagatttctacacaaagcatatacagaagccagcctgtcttggttttgaaaattcttccaccatttttttctgagagagctggtggtttctaccgtccttcagagcattacatggcatgtggcaggcaaccttctacttacattcttcattcagtaccgcaaagtagtgtgtactttggagatatgttaagcttcaagttggaatccaaatttaaatcaaatttcagccctgaaaataactcacattggaatcgggcgaggaaatgcccccttgtaaaaaactgggtcctaatgggtgcagacaacaacaatcccatttctacttcatctcccgtctgacagctggcaacttcaaatgtgaagcaagtggcttggacttgaggctgtgtggtgatgctgttgtgattgctggaaaaaagcctgagagttatgagagtgtataacaaaggagcgtgtctgtgctagggggtaagaaagatctcctggaggaagtgacatttaatctcagccttgaagaataaggaggagttagggcaggcaacatagagaagggggtggggtgggcagtgcatttagctgtggaaactgcaggtttgaaggccctttggtaggaagaggctctgtctgtgaaggctttgggaaaaggccactgtgcttagactgagagagctacctgggagggagaggtgggcgggcccttgagggtcaggttaaggactttgg

SEQ ID NO: 58740 - DNA, 1195 bp, Homo sapiens
gaaaatgatctagaggtctgccaccactgaattgtacaactaaaaatggttaagatggtagattttgttacgtgttttttcaccaattaaaaaaaaatttaataaaaaaggataaagaggagggaagcctaatgttatgctctttatgcccgaatttggcgaaatcgagccttgcccgctgttttttcctatgacagtgtctgaacctttctttttcccaggagtaggaatggcccctgctcccgcgcagcctccaggctgcaccacgctcgccccgcctctctctccgctccttactccgcccaccgcagtttcctccaatcgcggccctctccccgcccccttacccgagcctttttcctgcatccgggcctgagagtgcaggcttgagggaagcatggaggtccatggcaagcccaaggctagcccgagttgttcgtcgcccacccgggattcctcaggagtcccagtgtccaaggagctgctgacggcgggaagcgacggccgcggaggtgacggacgggtgacggcggcatgggccgcacacgtgcggcagaggaggcgcggccggtgcagtttgggagccggccggtggctccctgcccgggctccgtaccctcgaggggagccccggggactgctgcggggctccggcgtgccctgcccgcggcaggggtgggggctttggggcgggcacccggctgcgggcccggaatggtttccccagctagtggttcttatattctgcaaggtagtgagcgcccaccctgccaggcgccgctgccaggcatctgccctgccctggaagctgggaagctctcgagttcttttggggaagggagggcttttggtttggctgcctgggtcggagcagttggctgatagggggaagcggagtaatattatgctaacagtccctacctctttcacacccacacagaccaccccttagtgctgctgtcttgtagagggagacatgcatccaggaaatccacacagcatttcagacactataggtagaatttaaaagcacgagttcgaatcccagctccactagtaattaactggtgggacttagagttattttcattccctaagcctcagtttttgcatttggaaaatggtgatagtagtaatgcctgtagaatttttgtgaggaggagaatgcctaaaaaggcttgggcatgttgtcagt

SEQ ID NO: 58741 - DNA, 949 bp, Homo sapiens
acaaatctccaaaaatgttaaaaatatatttattgaaaataatccatgtataagtggacccacacagttcaaatctgtgttgttcaagtgtcacctgtatttagctattctcaaacatacctatttttattttaagaattcctttctagtttgagttggaaaactgatgcttgtagtgtaatcactgttggtgacagtgcagtcatacaatgcatgcagaatttactggttggaaagatcagtttttagttgatttttttttttttgtaaagcaaaacttcttatctcagctattaaaactgttccacacagttgcccacagcctgaaacctatcaaatgtagaaaatagggacatcacagcaaaatttggagggcatagtacaaagaaaggcgacagctggttttcccttccaaaggtcaaaatgacctcaggctggagttgcctttctgccctattcttggttttattaagtttatttgggatctcatctgccatgagcctgacttttgctcaggaaagaggcctgagaatttaaggactatctgtgagtgggcagagctgatggaactttgtctgctaatgttttcgggttttctttgaattctgttctttccaattcttcacattggcctgagtcttcttgtgattgctgtgaagataattatccaggtcctttctgatctttcttattggaaattggaaccagctctccttgactgtgactcactcgctaaatgtgtaaagaaatgagcagatctgaaacaagattttttcagctggaaagagtacaccagaactgtacacagccgtgatgagttattggcataggtacttatttaaagattttcttccactggatgctatgctaccttgtgtgaacagttgcatttgtctgtttcactacttagcatagtgtgtggtgcacagtaggcatggaataatgataa

SEQ ID NO: 58742 - DNA, 2118 bp, Homo sapiens
gtcctctgatttgtcttcctatgaatttacatacacgtaggcacatacgcgtttgtataacttaaaaacataaatgtaatcacaaatacacattactctgcaactgtcttgtgtcggttgttcatgccattataaatatatttcatctattttagcagctcttcagtgattcgtagtatggatgtattgagctttatgtaattcacttgtaatgaacatttagatagtttcctattaaaaaccacgttgctataaatattcttgtgcaaatacgtgtatgcatgtagaattttacaccgatcccgattctccaaaaatccaaattgcaggtgggatcattttagaatgtacttcaatagcgttcttcatcctgcctcgcgtttttaaaaggactgagtggagagcggggaagaggtcgtaagatcccctgttagggtgttcataaagtaacttctcctctcgcacagaacgtcttgactaaaaaacaatccgtacagaatgtgcgggagagctgtaggaactcctacggtggcgacagagagggaaacaggcttgttggaagaagcgcctggtcagcgttatcctcgaggatcatgccttcctgttaattccccaccccatcaattctacctttttaggttagactggggagtaactttcccaggtattaaaaatcgtctagagagagcagggcgaaattagagtgccgaagtggcttgagaagcacagtgaatggtggcgaagcccgagccgggtcgcaagacgcccgctggcactgccggcgccatggcggccgccttcggccacggcggaggactcgctttcccaggggcccccgcggtcgcaggggcaacgagcccggccggccctcgcgagcggaggcggggccggggccggaagtcacgtgctgtgacagtagctggggtgaggccgtcgtcgccgcacgggctggttggggctgtgtctgtgggaggcgccggggtgatggcggtggagactctgtccccggactgggagtttgaccgcgttgacgacggctcgcagagtaagggagctgcagggcgagggctgcgggtggacgctccttcggcccgccgctgttctgggctgggcagcgctcctgcgagagggacggctgcgcagccgtctggtgcgggacacttcagagcccttggggtgtgcgagggacgcgctctccagcgttactttcggggttggggtcccagccacggcgggtcaggctgcccgttcagggctcggcgtgtgaggcggagactctcctggggagcctgcggtgccccgcggggagcggcgtcccccttcagctgccccggggcttgggcggggcgcgcccgggaggcccagcggccccgggatcccaggctgcttctgtctctggcctcttggggatttcgccagattctgagcgttcagctctggaggacgctgatgtctgggttcctgtttcggtttcctgtttttcttcttttcctcccaaatcaacttttgcaagtttgggtgtctttcccatcgcgttgctataaccgtagaagggagcgaaaaaagaacttttcaccctgcgaaaataaacacgtgaatgtcattttatcattttccaggccttttatttatgctaagtgatatttttcagtgatgttctgcagtttccatcgcagttataaaggcttcaaaaattacagcaaatcttcaaattttgcttcacaagatcgaattgtctgattttaacttagaagtctatcccgaaataaacaaattgtgtttctttcagtaaaatattgaggccaaattaattgtagtgaaactctacttgaaataaatacaagttggcaatctgcttcttatctttggtcatagtaatctgtgtaagtgatctaagagagattggagcatgctgtttgtgattttttttttccctcatagttttcccaaaaggtggaacgttgcttttaaaaattccggatgaattttgcttgatttacgaagagagactaatgcctacaatgttagatgaattaggttttacaagtctctcagagaagagtgagctacatccaggatgggttgcagtttttcacaaaacattcctgaggtcaggag

SEQ ID NO: 58743 - DNA, 430 bp, Homo sapiens
attgcacccaaaattatagagacaactggagttcattttcaggtaaaagacatttagcttgacctgtaaaactgtaattattactatattttactttggagtttgtatggttggagagtatgacagtcataggaacactcttaaagaggcgtgtgtgtgtgtgtgtgtttgtgtgtgtttgcatttgttctctttcatctgtgaagttgatgagtcattattgaccattatcagtgtaacttagtttttcccagtagtgccgtaatgcagattctctaaatgatgtctttggacagtgaaataaatctgcagtattgcaactaaggatgaaattttgttcatcttaaaaagagaaaagtattctctatttaagactaaaagacaaatagtcctttctgaggatccaacctgtagctgaataaattgattt

SEQ ID NO: 58744 - DNA, 740 bp, Homo sapiens
tttttccttattttttaaaaacatttttgctttcgttcccttactttgttgacactgatagaaaatgtggggagaactcctgactaggaggaccctccatgcacgtcctgtttgcttggactgcagcagcatggtccagtggaaaggacagggatgctgacatcagacaggcttgaatcctggctctaccactcacaatgtggtgtgaacacaggcaggtatttaacctttcccagccatcgttactgcttctgttaaacaggctgaaaaacatgccttggtttgtgtggattaagcaacaactcatttcgtattcctaatcaataatttggctccacaaaagctagtttttctttgtcctttagttacctggggcatgagctttcttgtttttttccaaaacttgtaatgggagtcactgcttgcagagcggtctgattcaacttgatcgcgactgcctaaaaatccacaggaagacacactcagtcccaggaggtggacgcttaccttccaggttgagaaaagggctgagatgccggtggctgataattacctcagggttgtcggtcaggtagatctgtctggagatgttgtttattgcacatatccactgtagaggacattaaaaaagaacactgaatcccaaagtcacccaccacgttaggaaagaaatatgacaaacaaaatttttacctcttcattttcctttctgctctcagcctggaggattattcccctga

SEQ ID NO: 58745 - DNA, 913 bp, Homo sapiens
ctccccttctacctcaaggactgagtaaattctatctttgtaaattatctaggagaaataaaaattatccctatcagtgcatttttgagtactttttgcatgccagctttatacgctcaatactaagtagttctcacccattctgtgagttaggtattatttatcatcaccactttacagacatgcaaatagctctccaaatccagagggcaaataaacagcatagctgggcttttaatctggggctggtgagatctaagattcgtttactttccactacatagcctgggatacagaatttgtcctttatgctcacgtttgggaatctagacgttggcaatgaatacagtggaagggatcttcccactagaccacagacttccagatattttgggattcctgctgggtgactaaggggaaatcacccagcaatcacttttggattcaacatgtggcaaagtttcttttagcagtgctggcagtcacgcatattcatcaaccttctgcacacgcatctcccaacagatctggtccttcgaggctgtggcttcagaggccactcttacaagcttaaagacttgcctaaggtcaaccatttgccaggcaaggaagcaccggggcaaactgctaacactttccctatcgctcaaccaagtcaaagcatggcagctgtatttgagggtaacacaggaagacagccatgccagtaaatgccttcagaacagaatgtgatgactacttttccagaataacttctataagaaaggtactgtttttcattaacagttaacaggctctgtgcttgacgctttgagagacattatttaattcaatcaatataatagcccaattaagtgggccttgctgatgccatataagatggagaaaccaaaactcagaaagattaagtgtc

SEQ ID NO: 58746 - DNA, 1577 bp, Homo sapiens
acaatcatcattcctgcccatgacaacgtggttgtaagtaaatattttaaactggaaatcttgcttctggggtttcgacaactaaccgcgtttccttagcaactctcttctcaagcaaacatgtgactcaggagtgtagtctattgcttctcgccctgggttatctttctactgttcattaaggaaaactcttccccaaccttccaaaaatcacttttgctcctctataatcacatcttctatgtatcttttatccatttcaacacatctgagagagagccacgcagtgcatgtgatatcatgatataataaaaaatatgtatttggtctttgcccccagttcttggcatagagctctgaaaacccttgtaatttcctcatcaatagaagtgctaggagcatattttgttataatacttggtctttgaccccagtttctgacacagagatcctaatcctttggaatttcctggatgatgggagtgtcttttgttctgatgaggcaactcctggtggcctccaggataggggctggtcaccagaaacaccaaaccacgattatgagcttggagcttttagccccgcccccatcttccaggaacgggagagagctggaggttgatcacatctatgtgatgaagctgccaataaaaatacctgaactgcagggtttggagagcttccaggtcattaaaacacctggcagagcccagaggggtgacgtccccagagagggcacggaagttccacgccgcctcccctgtaccttgccctatgtatcacttaatctggctgttcatctgtgtcctctgtaatatcctttataataaaggtaaatttaagtgtttccctgatttgtgggccattctagaaaataatcaaatcccagggggatgttgcaggaacccctagtttatagctcgtttgtcagaagtaccagaggcctagacttgcaattggcatctgaagtgtgggggagggggtagtctggcgggatcatgcccttaacttgtgggatctgaggctatctccaggtagatatgtcagaattgagttaaattgtaggacagccagttagtgtcacagaattgcttgatgtggggaaaacccacacattttggtgaccaaagtgtgctgagtgctgaaagtatagaaagagaatgagtttgtctttttcctactgtttagtagggtagaggacaaagcccaataaaaatcatatgacgtgttcacttttacatcccccgtgcctagaacagcgtctgctaaataggaggtcatcaataaatgtttgttgaataaataatggcttgttgaactggtttgttgaataaacgaaaatgcaatcagtacagttttatatgaatgttagtttctcattttgtaaactgaagacagtatctactgcagatcaataactggtcagttaaatggcatctgcacactcctttatgtttattctttatcatgattttttgagtattcaaactccttaaaagatggaactatttggccaggcgcggtggctcatgcctgtaatctcagcactttgggatgccgaggtgggcggatcacaa

SEQ ID NO: 58747 - DNA, 1783 bp, Homo sapiens
agaacaaaagacccctggggaaagatgtgctgaattatgaactaatgtcatcctgcactcatttgctatatttacacaccagttttcatctgcagagctcaaaggacttgactctcatctcgagtgtgctaatgaagttcccttgtgcgacaaatggggcaggtactgtatttttctcttcactaatgggaaaacggtgccaaaaggaggcctggtaccgccggaaaagagatccaggccctctgcctctcattctggctggcacaagtctcatcacatcattaggagtagcagtaataagactgactcattatctgtaccggacattgtctgctgacaactttacaggtatttctcattgacttctcctaacaaccctatgaagcaggcacaattattattcctattttacagacgacaaaactaaggcacaataaggtggttttcctgaggcactcagctactacatggaatcaaagtttagatctcgcagactcagttgcagctgagcttgcaggggggtcacgacatcaagactccggccgcggggctctctcccctgttccacagctctgccccggctcaggactcagggcccggcccgccccctcctcagcccgagagaacccggtgggaggcgccgcgagggggccgggcgcactcccgcggctgcccggccgggggcgcggcctccactccggggctggaggggcctcctcggcctcacccctgcgggcgaggggcaccggagcggcgggaggtacctgggggctgtcctgcaacgcctcctctagcaggagcttgtccacggcgggcatggtgcggcgcggctcagccgagggctgggttggaaggacagagggcaggagacgcggcggccgagagcactccccggctctgggctcaggcgacgcggcggccactccgtgcccgcggcggccccgcgcgcgtccacgcctggccagtggccgccgccgcctgcccgccggcccagcccccggccgagccggatcaacaggaagtgtggcgcgcccggcagggaaaccggaagtgtggtgagctccggtcccgacaccggaaatgtggcgcccgcgcttccgcctgcgctcgccggctcgcggggagcggggggctctgggtgccagtcccgttgctgagggaacccttcgggtgtttgttctctgtgctgaaggtccgtcaagtcaatgcatatgaagtccaaaagaggaactcgagggtagaaagataaggttttatctgcttatggctacccagaaagccttttgagttgaaggagcgaacagattttttcttttaatggaaggaaaaacccacacttcccacaccactttttctagataaatttcgacgcccctgaaacagctctgagagcaaagaggtcgcctatgctatgggaacaaagaaaagaggagaaaagctggataactgactcgtctgtgataatcagaaataaccactttggaaaccacagctatttgatgtggtcataattaggtctcgtcctcctggtttatgttttgtgattttggagaatttcataatcaaatgtttagaattggaagggctagataatctaggttccagtgttgtcatttagagatgagaaaatgggacccagagaaataagtggtctgcccagggtcagttagtaaacgccagaggaagaaaagaaggaagggagagggatggaagaagactggcaagtggaacgtgacacctttttacacggaaggcaagggtttctgaagttccttctttagaa

SEQ ID NO: 58748 - DNA, 1429 bp, Homo sapiens
cattgcagtttgctagccatgagactttgcgcaagtaaagtaaatgtatttaagctatctgaacctcagttcacttctctatgagatgagcacgatactgcctactatatcctgcttccgtaggcacttatctatgtgtctgtattaatcaggattttttcagttgcaaatgacagatcctaactccaactagcttaaggaaaacataaaaacctggaagagcgggagctgctagtggtggtggtggtaatggtagtgatggtggtggggttgggggctggagtttttggattgtataaccaggaagggtagatgtgagggcagaaacttcctggaactaggaagccaaagcccttggactctctcttcaccactcatgcaaacacgtctctccatgctgtctttattcttcaaaacctgagtctcagggtcgctagaaccatatcggctggcgctgcaggctcgcttctggtcaaagagaggaaagggacatctcctagctttggcttcaaaagtcctagggaagaaatctgattaccctgacttcagacacctacctgccaacttcttggacccctaactgtgaccgtgtgtgtgtatgtgtgtgcataccaccaggtaccatgctgggcccagcctaggtcagggccacacccctgaggccagaggaggtggagtctgttaccagaagaagggggatggggagaggcactgcacacacccaaacatgactcatgtctaccctatgtctacacatgtctactgcatgtcccagtcccagtcaacccatccttcctccctcacatacccagctccctttctcctactccacatctcagtgaaaagcatcacccaggggctgaagccagaaatctgggagccaagctgtattctttcctctggcttatctcccacttgccataaattctcaagccctagggctctgcccgctaattccttgcacatctgtcccattctccagcccctctgaccctgctccagcacagacctcacaagcttgtgctacccacaaggactggtcctctagctcctggtcgtatctttctccccctgctgtaacttccacactctggtgacagttatttttccaaaatgatagtcatgtcctgtctcttccctgcccaacattttttagtggtgcctcatcaaggccagctacatagtttgtggggcccagagcaaaatgttcagaaagcaagggaaaagtgtcattagctggattgaaatagaaagatttttgctttttcatagtttctgtctcaacttgtcatggtgtttttatctattacttagtgttctaagtaaagaaaaatttgaattataaattattaatataacatttactgttcctctttatattatgcaatgccagttttacatgaaaatataagagcatttaatgcacatg

SEQ ID NO: 58749 - DNA, 736 bp, Homo sapiens
cttcaactgggcatctcaaaaaatattctctctaggtaggacagactagagcagggaaaaaaccataattggtaaagaagtagcagtcactcatttcggcctagagaggggaatgtttaatattttatgggctgcacagtgaccatgttttttctcactttatcatgatctcagagtggccttggctgacactgaagtcttgtaatattgtttctatccagtaggagaacatggcctggctgtgagcatctgcccagtgccaggatgttcaaggctgctttctcggcactgactgtgagtgcactaagtacttcacacacattatttcatttaattctgaaaactctattaggcagatattgagtcccattttacaagtgataaaatagaatcctgaagaatttaatgttagcagtgagtcaacagcaggcagtcaggactagtagtactgaccccaaagtccatacactattaagctaccactcgtttgagcctgagctgccttagagataaggaaagggcagagggcatgcatgtgtgggaaagcaagctggactacagggccttggcacttggctttttgttcccctgcttgtgctgtctctgggacttcaacattccttagatcagtcacctaacactgatgtcctcccaggttctcgaccctggctctctgctccaataacattcccctcctatccatttggctacctctacttgcctgatcacaccttgg

SEQ ID NO: 58750 - DNA, 1368 bp, Homo sapiens
aaaataacaaggatttgaggtgatggatatgctaataacctggatttgatacacatgtattaaagcatcacactgtaccccatagatatgtacaattgtgtgtcagtggcacatacttgtagtgccagctacttgagaggctgaggtgggaggatcacttgagcccagagctggaggctgcaggcagccatgattgcagcactgcaccccggcccgggagatagagagaggccctgtctctttaaaaacataaataaaatgatgaaatgaaactgaaaagtgtgaaaaattgtattgggttttattgccatatttatcagacaacaattacacagctttatttccacagaaatttctttgcctttaatgtgttttcacatacattatctctgtgatttaattcaaaggttttcttcctctccagatttcaggcattgtgcttagcactgtggggacttaggtgactaagtgccagtctttgcattccgtgtgattgcagcctcattggtaagagtacatagtacatataaaaacaggatatgataagaaaatcatttgcatcaccactttggagttctagttggcaggaaaggtttggaatacagcttcatatttactttgggtttaatgtgtctttggggtaaaataaagagacatttggaactgagggctggacatgaaaacatttctacaaagagtttctgactctctcttttatagataaccctctttattccaaaatagacttactatttgccctcttctgttagaagagcttcttttgctgaagtaaatgtcttatttagaaaaagaaattgtctagaaaactgttccaaccagtgtaatttccatcctctctgaatgataatttatttttgcaaaatcttctcttttaacatttgatcacctgctgtctttgcattattacataacagtttcaggcttgtatatctcttctataccaactccaggggagaaggtggaccttattccttttgaaaaatccttcagtgcttattgcatcacttggtgacaagcagattatacacatgcaacaagaatttgcttaataatgaataaatggatgaattaatgactgctagaagcttgacaatttcaaagctgtctgtaaaccttttcaatttatgtggattatattgtaacttgttttataataaatctatatggaagattatcatatttaggaatatttatattttgaaaatattaattacaggaaaaggcaagacaaatttcttgggagtagggagatgtccccaaagttaaaagtgtaaagatgtaatgagtcgttgggaacaagagcagaaagaaggaaaggaaatgtttcagaaaagctgatggccagca

SEQ ID NO: 58751 - DNA, 2817 bp, Homo sapiens
gctgcagtgagctgaacacactgcagcctgggcaacataggaagaccctgtgagggaaagaaaagaaaggaagaaaggaagaaaggaagaaagaaagggaaggaaggagaaaggaagtagaaagagagagaggaaagaaggaaggaaagaagaaagggaggaaggagagcaagggaaagagaaagaaggagagagaaaggaaggaaggagggaaggaagaaaaaagaaaggaaagaaagaaaaaaaagaaagaaaggagtaaagaaaagaaaaaagaaaagatagaaacagatacacagtgattaagtaacttgcttgtaagtggtggtgaagttaggatttggacccaggcaccacagctggagtctgcgttctgtttgctgtatagactctctatcccctgggcttaagtgaagttaggatttggacccaggcactgtagcgcagagtctgtgttctgtctgctatatagactatgtccatccctgggcttaaagaggttaggaggctttaggttatttagctataaatggcagggtagggagttgactccatgtctgtctggctccaaagtcataagcctccaatttcctgccctgttctatcttaaaacagaatgcgagtgttcaccagggtcatcactaaggcatttagaaaatgaaatttctgcaaattaaacacagggagaagtctgattcatggtggggttagcagcagccagttgtgggtgaagctggagaaactcaaggtgggtggattgaatctgcaagaaatgggaattcagaatgcagcctcaatctaggacatttccagcctgagacactatctgaaatcacaccgcaagatcttcaagctacaaaacactgtagtagtttaattaatcttttttttttttaaaaaaacatctgttgtagcatttaaaatcagaaaatgatgtcctcattatctctctgaagcctggcagattcttctctactaaagggtcctggatttgaaaatcacttcctttagaaatctcttttgagtccaggttccaggtgcaggagtccaaattccttttgctttagataatgattaaatgtctccttttcaccttccagttccctccctcttttccaagcaatttaatcttaaccattcatgtatattgtttagttagtcatggcaacaaggccatttgataggtcaattagcagctaaacttagacatgatattgacattctggctgtgttagccacatttttgagatcctagtataaaggtttgactgatctccatgaattgtcaatacacttagacaatgaaggtgctgtaattgcaaaagaaaagaaattttcaggaccgtttaaatgtattttgccaagggggaagttaaaccctggaaactgagtcatgtagcatgtttgcaacttacgcttcttagattatagattaactctcttctgcattgttcttgttctgtaaatgattagaagagaccagagaccagaattccttcccttccaatcactgatctttgttgtagattaagcccttccatttttgtcttgtacgtaactcagaccagatggtacaaaagagtccatgactgttacatcttcagtgtggaatgttaaatgtacctttcctgaaaggaaaagaccacctcgactaatcagatcattgtaactctgcattcggcctcttgtagaaaaatgttgaaattctgctaagcttccctaaaccttgtctatgtaaacaatcccaaacttctacacttcagaacactgacttccattctttggaatctgtgcttcccaagtggccatcttcaacttttgcacttgaattcaactctcttcaaactagtttctggccaggcatggtggctcatgcccgcaatcctggcactttaggaggctgaggtgggaggatcacttgaggccaggaatttgagaccaacctggacaacataatgagacctctgtctctacaaaaaaggaaaaaaaaaaacaaaaccaaaaaaccaaaaaaacattgcccaggcatggaggtatacacctgtagtcttagctacttgggaggctgacatggtgggaggatcccaggaatttgaggctgcagtgaattatgattgtgccactgcactccagcctgggtgacagagtgagatcctgtctctaaaaataaaaaaatcaacaaacaaactagattctgacccttttgattatttgaggttgacaaacaacaatgaagcaaaaccaggcctgatctctgccctaatgagggatagtctagagggagagagagaagcacatctcagaatcatatacaaacatgaaagtgcaactgtgacaactgctttgaggatcaacaggttctctaatagggaaatttagcctcatcagggaggttgaaacaaggctttgtgaagaagcaacacttgagtaaagcctgaaggctaagcagaaattaattaggcaatgaggggagggaagggtgttctaggcagagggaacagcttatgcaaaggctcagtggtggggagggccccgcagtacaaggagctgaaagaaggtgataaaaggagtgtaggagctgaaagaagtagaagtaggagaggcagacagaagtcagaccaagcaggggtttgtaggccccgtgaaagacttgtatttgtatcataaaagcaatgggaagctattgaagagtccaaggaaaaggagggggtggtgacttggtcagtttacattctgaaagccgctctttagtgcaaggcatagaaagggaaagggtgctcgcttggatgctgctcttccccgcctcactcttagtcc

SEQ ID NO: 58752 - DNA, 623 bp, Homo sapiens
gttaaccttcaacacttgaaagcatggttgacaatgtctagaaacttaatcaccataagaaaaagcctacatgtgtatcagaaaacaagcctatttttccctctctttctgtctctttgaaattaaatcacagtgcagtaacacactgaacaaaacaaacaaaacagtgaattcaaggtaatgacattcggccgctttcacaaacctgccaacatcaaccatgttcttattttagtgtggcagattctcagctatttggcacaaataggctgcgttgggatatttttggtaggaaatggcagaagcccagtttaaactggcctaaacaaacaaacacaaaggaatttattggcatgtggagtggaaaagctccagggacttggctgtagtcacagctggatccaggtgatcaaacaacaggaagaaattctcttctctgctttcgtcttcattcttaggcagctttcctcaagtggtgacaaacaggaccagtttatatcttatcagcttcctaattcctgtggaaaaaagcagcttctttttccttgtagtttgatcaaaagtcctagggctgggctctcttggcccgttggggtcatgttcctatctcggaatcagtcagt

SEQ ID NO: 58753 - DNA, 1008 bp, Homo sapiens
gcttgatggcttcctgtgctgaaatgctcttgcatcatccattgaaaatgagagctgcttttcacttagggtgacctggggtcaggcactatgctaactgatgtacctgcattatcacatgcagccctctgtacacctgtgtagtaaacaccactactgtcattttgtaggtcgtgaagctgaggctgtgacaggtgaagtgatttgtctgaggtcatgtagttggtcagcgaatggacagagaactgacctcaggctggtggattccaaagctagtactttgaaccacagcatgacgaggccacccctacttggccataacctttttgctgggacaggaggtggaataccaaaagcaacagaacagagtccacctgctaactcgaggtgctgaacaccagcgtcagtcctcctggcaagactctcgccctccacacccattcataaagccgagtgtgggtgtgtgacatcaatgtgacatcctgtgagacacctgtgtttcactggctacagaatcatcctccattcagttccacttgtaattagctcaagaaacaaaattgtgaaaaggcacagggaacatatgtcagcccatttcctctttcccttggctggaaaatggtgattctggctgaacgacatcttaaaaatatttataaccatagaatgtgagtgctacaaaggcctttagcgcaaaccccattttgtagatgaagaaaactgaggcccagagaagggaaatatctgcgtgttatcagaagacactgcagtgtagtagtgacagctaatttgatcaaaatcccagttcttttacttactggctgcatgaccttgagcaagtcacagaatgtctctaactctcaatttcctcatctgtaaaatgggaatgataatatgacttggtgcaaaagtaattgcggtttttgccttttttttttttttttttttttttaatgcaaaaacttcaatgccaaaaccacattattaggttggtgaaaaaaaaaaatt

SEQ ID NO: 58754 - DNA, 1514 bp, Homo sapiens
caagcagcaagaaatctacctctcaattgttaaagatttgcccattctctccttcatgattgatttgcttaaaacatccaccttcctaatgatgatgatgctgatgatgataatgatgataaaaatagaggaaaaaatcaatttaataaaacaacagtgctctagcagaaacttgaatataaaatggcttttactgggaagttctgactttttaggttgcaaggaacaaaatatctttttttaaaagaaatcaagtctgagtcaatcatctttgccatctccccatccctgggattggctcagaaataggcacgtgtctaagtcaggccaatgagacctcaggggatgttttgttggggcttctgaggaagaaactgttttgctcctaaggaagagctcctgaaagagatgctctctggtcccctggggttattgtgtgtggactgaggcagtcatctttttcctagctggaccccagaggaggacaaagtccagtgaattgcaaagaaatgacccaagatcacattgggtcttgtgatatgacctcttcccccactcaagtgtcactcacagctgtctggcatagtatgcctggcacagagtctggcactgtgaaagtgactcagcccaggaacaagaggatgagcaaatagatgccagctgaacctgaagatttctcaatgattttagtttgaactggtttaacctggtgcaggtaatatgcttcccagactgaagttcagggaaatataaaccaaatttttgatgaagagacttgggtagcatgttggagagaagagtggcaagagagaatggagggaatgagtgcaacaggccctggtttggtacagtgcccagccagaatcacatgtgtgaggctgtccaggccacggacacagcgttgtcctccaggtttgtgcacactgagccagtgaggcgcttgcagggagtctggaggaagcgttagagctttattagcttaactactttaccacagcctagattgcatccaaacctgggttttcaacagcaagcttgcagtggctttccaaaagcttgaggcttgtgtttccttcagtcagaaggcaaactgtgccaggtacagctgagaaccagaaaacaaccatgtagattttgaaacttgcattggttgagaattttcatgactttctgctatatagacattcagccgcactgtagagataggttcaatccaacctgcaggaagcctggctctatctgaattagtggctgccttatcttaagggaacttcaaagtccaattgaaaaatgctgggctagattgaacttgagcactaatttagcttggactaagttgcttggcctttctgggcctatagacccctcatctacaaagcgaaagaaagaaaaaaaccaacactcagattctttgtgttgagaaatatcattacctgaaatgaaaatcccaacagcatttagagaacaaagagcatgggatccagggagagcctgggatctgagtcccagctctg

SEQ ID NO: 58755 - DNA, 1618 bp, Homo sapiens
ctgggagtgcccatccaagtacatccacatcatccagtaaaagaaacagaaccttgaagtcaaacagactggttagcacacacctcctccgtttgctagttgtgtgactaagggcagtttcttaactactctgtgcctcctctgtaaatatcaatgtgctaataatcccacctcgctggatcatttcaaaataaaatgcataacattgataagtgcctcggtcttgcctgacacacagtaagtgttcaataacggccagcctcctctgcaatttctccacacagtctctctttcacaaccaaatggaagatcaagcaaagatgtattggccaaataatcgactccatttgtctggcgtgcctcagccacttgcttcacatgactatttctatgaggctaatacctcgttacaataacattgtactctaacaccagtgggcccataaacagaggcccagctaaaataaaatcattgtaatcatggcccagatttaatctctggctagtgggctccccagtggtttcaccaagagccaggcaatagtcaaataatcaaactgcagatgctgggatagcaaatcggcttaaatttaaacagtggcagaaacccaaactacagcagggagaaaagagagatgaagagggggagatgtaaacttgcacaatattggaatttcccttccatggcctccctagttaatcggcccataaaataaccaggcttgttaatgaataatagcctcattcccgagaggcacctaggttaggcggtcgctctgggcctgcttactgtggaccctgctgtaagagctgaaagggatcccaagggcaacatgaaggcagaggcattatgatctccatcctactgagagctcacaggcacttagctacttagaaagaggatcctgagtcacagaatcaatagtgagagggaagcagaggcaggtcccttctagagggttgagggagctgaagcttatacaattgggggaccgtctttgagaaaaatcaaacaaaactgcatagaaaatatgctcagccatccagcaccaccttgtatgaaagcatggtcaaaccttcagaggagacctcagccctggctgacatgttgattacagccttgtgagagacacaagcagagaacccagctaaaccatgctcagattcctgacttcaaaaactgtgaataataaatgtgtgtttaagccactgtttgctgtaatttgttacgtggcagcagatgactggtagaaggaagaggataaaaaaggaagataccaaggtcattttgctaactgggtggggcaaacctagaaatgttattttattatgcactcaaatttttatagaattattggaaaggtaacttggaggtcatttcatcaaattctttgacttttaactaaaattgtaactagactaaaccaatctgcttcaatttttatgtaacaaagttgtgagtttttttacatgccatggactcccaggtggaaggtcatataaccacagcatgcccagatgaaccaagtgtacaaccatgaggggaacctaagtgcttaggcagaggagcagggactgaattaagaggtggacaccaatggcaggattcaatcagatc

SEQ ID NO: 58756 - DNA, 1748 bp, Homo sapiens
aggtgaaggaatggcagaaatagtgaatgaacacttaaagacatcagaggatttgagtgacccccagtaaaagctgaggtgaaggcaagcctagctctctttcattcttttggtccctagggctgttccaagcatgggtgtcaatctctgagccatacctaccagaggcacctgctgtcagaagtcatggtggggagcacaatcaaaaaaattcccagactcggcaggttaaaagttacagttcatctaatctgacccccctttcaatatccaaatccccactgttgtacatggccattgtggaggcccctcttctgtgctctgtgagccttcccaaatgcatgctggtgactgcctgcgcaaattaagaaagctatcccagttcattccgaaagaccccatagtaaagggcaatagagtcttttttttttctttaaaaattagtgtcaagtataagtgtcattatttaaggcactagaaaatattgaattccaggaaacccaggagggtgaggcaggacagcctgggagtagcattagtttgtagctgttttgtttctgatctccagcctctagaaaaatgacttgggtgtaatcaaaagaaaacaatgaaaataataacttgaaggtcaaatagctaacttaataggaaactcattagaaacgtggctggacaggctcacagctgaagcactcgttcacatgattacacgtgaagagaactctctggtgctgtgttacgaataagggcgagtcctcagtttggatccagtctgcagggacttcatgtggaacgtgtgaatctggcggcagagggagtgtgttaaaatgctcaactatttgccatgggttcaaaggagtaaacacaagcataatacactactttgccaagttcaacaaactgtttcacggggctctgagtctctgatgagggcagcaacccaacagctaagtaagtaaacccaagcccgaaggtatcattcactgctcactggtgaccgccgccagacacacgttcttccctggaattcactgatgacaaacgatcagaccaagacaagtttccagagcagggctcgttttctctttgttgcaggattaagcctgtatttctcagcctggtcaattaaactggaatttttgggggtgagacccaggcatcagcattttttacaaactcctcatgagattttaatgtgcctccatcattcagaatcactgataggcaagctggcctcaatcttctcttctccaatctcccgacagaagtttctactccagccagaaaggacatctcactgatccctagatatcacatcaggaataatcaattccatttcttgagcatggccctggcacggtacttagcaattttattcattagctcatttaatcctacattatctataaagcagctagctactggccccattttatagacaaggaaacagcctcagagagcttagtcactagcccaaggtcacactgcagtaactagcagtgcaattggctcactcaaatctcagcctacgtggatgacaaatttatactcttgccctactattaggttcatgcaaaactgattgtggttttcaccattactttaatgaatggtacctgaaacaaaagtgctaatagaatagtacctggaacaaaagtgctcaatacctttttgtaaaacacatgaatgattcaatgactaaataagcaaatgaatgaatgagaatagtggataatgttaaggatcat

SEQ ID NO: 58757 - DNA, 1287 bp, Homo sapiens
agacttattataacttatcttctcgtgggcagcatgcttaaggctcacagggtgggggcatcagattcaaatgcttatcaaaggacgtgtttgtctatttcgtttcttttcaagttggagaaacacttccaacggatgagagatcacagttaacaaatgccaaagaggcttcctactttgtcccagaaagccaggatcacccttatctaaaataggagaagtgatgaaagggttggccagttccagcacatcacaatgcaaagaacccataaagagatgcaatcttgcatggccaagaggagagatttccagaaaccaaaaccaagggtgtcaaagggaagtcacaggccgaatctcccccacccctccacccaccttttcaattttatatgccggactgttaccagatgggatgctaaagatgtttgttctcagtggttttgcagatcgggtctcctaggctttcaaaggggaagtgggggtgagacagtgcgcctttgatgtttgaacttcggtcctgaaatcagaacctcaggcaaaaactgtttttatctcttccatcctaggcaacccagttgaaagctccagtgggcacttccttttcagcttttttttccatattgtcaattacctccctgctgagagaatggaattcctttgactggaaacaggggtccctctttgagatggtgccagagatttctttcttttctcttgattaggctttccttagtatcacacactgaaaagtgtacgtctatcctcttttatttacttagcattagaagccagttacgtttgtatttacacagagttgacaaatttgagggttaatcaccttcacccatgggtcaataggagagttaaccccagggtttggttcaagaaagacacatttgaaaggaattatttttgagattgggtgaacagcagcatcacttcagtgaagtcacagattttatgggcctgggggtattgtgattatataaaaatcaaattttcatggtgttctgcagtttagaaaacacttgacctatgagtttaacagatttgaaccccaaccttcttccttggatgctggcagaagtattttctaaaatgcctacaaagctaggattgaatgctctcagatatgtaagacagtaacctctatgaagactgggaattctacatatcacagggtcaagaacaatacttccctccagttaggggtctctgcagaccaccaaatgacctggttagtatcaggagcaccgagttctgagtgttgctgcctgggttcacctc

SEQ ID NO: 58758 - DNA, 3050 bp, Homo sapiens
gagatgacagacacaaactataaatagcagacatgagaactccaaaacacagtacagaggaccattgaggagaattttctcaaactcatcaagaaaaagttttcactaccttcaaggaactttgttttaagaaggcaagaaagtgtgcatcccgatgagaaagatttcctgaagaaatgcctacaatgtttaagaggattggctcttaaatgggtgagcttcaattatctggaaaaaaatatatttagagctctctattataacttattagtatttccacttaaccaaagcatccgattaaccagcgttctccattcccttgactgaggctcatggcaggctgaacactaggggctgttgggctactctctgcttttcccacaccggtccacacaatgagccaactacccaccctcatctcagccaagtctaccacttccaatatcgcagtctctacagaccatggcctccaacaggaccagaaacttacagcaccactgcaactggccctttgctaaggataagaagtccaatttcagacttagatttgccctcatcattgccaagaaaaggcaaagtgatgtgagacggcatagagaaaatgcccaatattgtgcccaacatccagtatatgctccaaaaatgctggctgttcttatcatttttattattataataataacgaacagacgttatgcagaggcgtgtgcaaatacaaacaccacaatgagaacttcaaaatctgagactcagaggacgatgtcgggggcaaagtgagaagggggctgggagaaaaggagcagctgtcgcctcttctgagaagccatctcaggtcaccccactaacagaagtccctccaaatgtacttctgtagtccccagggaattgatttcgcaggatggaattatttccctgaaataaacagacagtcaaaggtcactacaactggggcctaaaaagcaaacaagccagctgctgatttacaggcagcctatgacgcaagatagcaagaggtctcggcccaggtccagtgcaatggcttcggacacaccggtcccacaggggcgaggatggaggagggggctcaccttcctgtaagcaaggtcccatcttgaccaggcatggatggggccaccttcaggagagcagacccttgaacttctgctgtcagcatgctctagccagtggctctcagccctagcagtgcattacagtgacctacgggtctgtttaaaaatactgatacctgagttccttccccaggcagcctcctttagttagcctggggtaaagtccagacatcagtgttttgaaaagatcccaggtgattctcatgctcagccaggcctgagaactagccacatagcggaaagaacccacagcggggtcaggcagacccgagcttttaactccaatgctctcttgctttcttgagcagatcagcccttctgtctgagcatcggtttctttaaccctaaagtgaggacgatcatcactccccgtcacagagttgctgtgaagacggtacaagataatgtatgtaaactgcatcacttagtgtatcttgcagaaggcacacacaaggtggtttctaaatgttaacccctcctcatttcacgcttctcttttcaaggttctcccacgtgggtcaggagttcgaagcagctctcagttctaaggggtctcctgtctttctaagtggttaaaaaagggtgggaggctgggcgtggtagcccacacctgtaatcccagcactttgggaggccaaggccagcagatcacttgaggccaagcattcaagaccaccctggccaacaaggcaaaaccccatctctactaaaaatacaaaaattagctgggcatggtggcgggtgcctgcaatcccagctacttgggtggctgaggcactggaagcacttgaactcaggaggcagaggttacagtgtgccgagactgtgccaccacattccagcctggggtacagagcgagaccctgtctcgggaaaaaaaaaggtgggggggtgtggggagggaggaacatccctcctgaaaagcaggtatgaacaagagtgctgacagaacgggttggtggatccctacacacacaaaacacacacacatgcacacacccctactgggtgaaacagcaaaactatgtaaaaactgagtcacaagtagcaaaagtgaggaaaacccaatcttaaagattttctttgcttttctcatctagaagaaaacctatcttgtgtgcgacactttctcagaaactctttgcctgtgcctctgtctcctccattagaccaagtgcaagtcttatgcctgggtgtactacacagggctggtgcacagtaggcccaagggaatgtccattgaacagttaagctccttgggggcaggggtggatatttgtagaccaacagtgctcataacatccacacgtggtaatcccctaaacaggcatttcataagtatactggaactttgattccaagcaactagcagaaaaggataaaaaggcacactgggcattcaggaggcagctgccccaagtccagtggccatgagcggcagtatcacagcagttcaggattttcagatcttacaaggagtgtaaacatgggcaagtgacttagttttctgtgcctgtttatccgcctgaaaaatggggatgataatggtgttcacctcttagggttaccatggggatgaattcaggtcagtgactgacatgcttagactatcgcctggcatgtaattgctgctatgtaattgtttgccattattattactccatgattggataacaagaaaagaaacctcaagtttcaggcccaaataggagccctccatttatcacaagagaaggtatagacgagagaaaatggtgtggtgtatccccaaatgaatacagcaactagcttcccattgtccagagctgtgttctcaaaataaagaccatggacttcccccatcacattcacttgagttgcttggttaaaatgcagaagatactcgggtgtccccaagtcccactccaaccctgttgaatc

SEQ ID NO: 58759 - DNA, 2656 bp, Homo sapiens
aggcactgaactaggcactgggagcatataaatgagtaagacatagaacgactgggatcatgaaattaagttcttcatattgctattttcccaagcacggaggcaacttctctgtgctttaagtccggctccaacagtggttgtaatcatgaaccctgaagtcagacggtccagccctacatcctgtgatcctggctctgtgactttgggcaagtcattggacttcctctaagcctctgcctcctcatctatgaaatgaatgtgataataatacaggttcaaaggcgaaaaagcacgtaaatagttagaatagtgcctggcacacactgatcactcaatgattcctgctatgagggttgttaagggaaaaatgctccctctgctctggaccttcctacacaaccaaataagtggagatttccacttcatttttctcctctccaggatctctactacctgcttcacgcccacacactcattcatttcctccctcagtgttccatttggtcctgcctgaaaaacagatacccactaaccatgaggatgatgaaaaatgaggttcttcccagagcagcaagcacatcactgccctgtctttccaggcaaacacgttcacggctgggctttgagctcaccagagacacagaccattagtctcccccctgcatgccttctgctaatggaagaaagagttcactatcaaatctactaagaatcacacaaggtaattatcttgcctcaaggaccactgagagcttctaaggtttgctggcatctgtcttaattgatactgagaaagccaaggctgcctaacggatgtgtttgatagaaagtaataaaattctgagagattaaagaagaaaaataaatacaacaagaaatcagtctccttaaaaggaccagcaaggagggataaatgtggaccacaaagactgaagatcttcaaatgtcagggttagatgcacattctagaatcaagaggtgggtgaactcaacggggcaatatcttactccctgttgcctcccccagtgcctagcacagtgctatttgaataaatatttttaaaccagctacctgggagaggcagaagggaacacctgccacaagaaaaaatgacagagatatttctactctttcttgggaagcagtctaggctcataatttcgagctcagacagacatgggttgtattcctgccatcatccccaagttacaaacagtggggccctgggcctcagttacctctgggcaaagtcaggtgacagcatctatctcatagaatggttctaagaattcagtgagatgacacaggcaaattactcagcacagagcctggcaaagtgctcagtaaaggttagctttatttgttcatcttcaaggatgaaatagtagtaaacatatgagtcaattcttccctctaagtgagactgcaaaaacagcccttcccctggggacagggctctcttaagtcttttcctcatccctggaatcttgcctctagcctacctgtcatccaggatcaagaagccaagctctcctgggtgctcaatgtgcccaatcactgctaaagccttgggaagaataagtggtgtccacagggagatcctgagagcagaggcagccaggagcctctggcctcactgggaccaaaagcaaagcccctttaaagtctaagcatctaaggaatgagcaaagattcctctgagctgcccagcagaacatgagcttaccctcctctgaatcacaaataataacaaataacactgcttgacaagtggcttcatgtcaggcactgttctcagagtgtgtgtggtccatgagtccttgtgacaacctaggagttaagttctattaccaacccattttacagatgagaaaactgagaggttctttgaggatgagcattttctttttattttcttttatttgagacaagttcttgctctgttgcccaggctggagtgcagtggtgtgatcgtagatcactgtggcctccaactcctgggctcaagcaatcctcccatcttggccccccaagtagccaggactacagacgcaggccactatgcccagctaacttttcaatttttttgtagagatgagggagtctcactgtgttgaccaggctgatctagagctcctggcctcaagtgatccccctgcctcccaaagtgtaggattacaggcagaagcaaccacacccagcatgggtgaacattttctgtctcacatagagtctagttcagaagccacctcatacacgtgtttcagaaagccttggctgccttgagctgaatagaatgtatttgcatcccacagaaccagagagcagggaaggcgagcagacctccctaaacataggctgacagtctacacagggagactctccgtacacttgcaaagtgtgtatgagaattgaagatacttcctgctttccccagcaaggagcccttctgccaaaaaacaagcaataggaaatgcagcctttcagtgaatcctaggattctcttcctacgagctggaagggacccttaaggacatttttgtctcaggccctcaatttacaagtgaagcaagtgtgctcgacacagcagcacctactgtgtgcaatgccccgtgcccaggctgctgcagggacagacaggaccaagacccc

SEQ ID NO: 58760 - DNA, 5243 bp, Homo sapiens
ccacaaatgaaatggatgtgccagcttttatttacccattcatcagttccttccactttggggctcttactaataataatgctctatagacatttgtgtagaagtttctgtgtggacatatgtttgcatttctcctgggtaaacctagaagtggaaatgcccagccctggttttcacatgcagttaaaagtttaccgaagagtttcgctgtaaagccaacatctggctgctcctgggctgtttccagggaattttatcaattcagccagactccattcacggtgggtcatcaggcccagcccctcctactctgaggcctgggatcctctcattcctgtgctctacaatgtcgtctgggccagcacgatgataaatgcattctgctttaaagcagatacttcacaaatcataacttacagatgctccaggactttcatgtgggaaagacaaatgagacttctgctgtctgactctggagccactgaggacaagaagccacggccagaaacctgacaaaccctggatatacgtctctccctaacaaatgcatgtgcaaacgtaacagaaggggaattcgtgcagaaaagggtctgcctgtcttttcagacattgctctgtaacctgccattcattttcaaccgttgtctttccttccccacaaatctaaagttccttgaggtcaggaaagataacgtacaacttcgacacctcccaagatattctctcgctcaatgtattcacttcagttccatcctacaagcctctgttgaggacctactatgtgcttggcaccatgtgaggcattgacaataagtatctttgcaggatggattcaagacacacaggacacagcgacagacaagataccttgactcaaacccttatctcctgctgcttcccaggaggaagcaagatcaacacacactggcatggtgtgggggcatttttgtctgcaggcagggaagtgaaccagcttacccctcaaagccccctagggactccagggtctgaggctgcttgggaaacaaaggactctgtatgtgtccaggtgaagagctccctgacctgattcattacaacaaactcctcgaggtccaacaaacagaccaacaaacagatggctcaccagaagcaggcacatctcttctccctaacttggctctgattcttatcttcccaacctcaactcttgcaaaaactccctgctccaagccagcacaccaaactgacgggctcaacaccccactgtgatcagaacccagctcagacccctctagaggaagagttaaggtcaaggtctctgcattcacattgcctgggtccaaacctggctctgctgctgcctgtgaccttgagcaagctagttaacctctctgtgagtcaggttcttcatctagaaaatgggatgatagcagaattgttataaggattaaatcagttaacatgcacctagcatgttataagcactcaagaagtattagttgctattatttgcattagcatcaattattattattacccccatcttaccttaccaatcctgccctcccattgtgtcccagcacaaaccctgcattccaagccacctggaatattcaccttcccccaaacacaagtgaatgaatgccttggaatgccccacattccaatcctctgaaacccaaatcaagggtcattttcaacagcacttgtcctcccattagctggagaacactttctaatcccacagtataccctggcccctcctctagatacccttccggaagggtgggcgatcaccccatggctgctcttctggcaccattagcaaagaaccacacccaaatccagaggtcaccagctgtgcaacattaaggaaggttctcaattcctctagcagcattgggtttccaaacaaactccatccaaacaaacaaacaccatccagctgtctgacccttggcaagttacctaacctccctatgtgtcattttccccatctgtaaaatgggtctcactattttacacctcacagggttgctgtgaaagttaagtgagggaaaatgtctctaaagcacttagcacagtgggatgcaccacaagctctcaaaaatatcagctggtagtaaataatggtagcagtagaaatatgattctgtccaggatcaaactcactttcatgagctaagcttcaatgaactgttgtccaacttgaaaatcacctgaaacaatcctctatggaagagttactcatgcctagtaactacttctgccttctctttcaccaggctggaagctccctgggtcttactcatttctatgtctcagcatttaacatggtgagtagcacatggcagatggcaataaatcttcatcgaactgaacagaattagtttgcaagtacatttcacctttgctactagattataagttctttaagagtgaggcccatgtctttctctagtaaagatttattaaatgagtgatggaaaaataccaaaccaagaatcgggtttctaagatccagctccgtcattcaagacctgtgcaacctcaacaaagtcacttaacacttctgcgccttactggtcccacctcgaagatgacaagtttgaaccacatgtttgccatggtcccttacactctaaaactgtatttgggccttagctgcaacatggcacttctgccaccgtgcatgtgacgtcaacacacctcctggcttggcaggccagtttgctaatttgcctccctgatttgcagttttccagcaggaggctatgaatagctttgggtgcttaaaacacccatttttggtcaaaacacttggcttgctaggtgaggatgccccatcacccaagctaatgctctagtggccaggggcaccagggcagactgtgggggaggggcacacattgcccaccagtcctgccactcccatcccagactcccccccagggaccctgcctccagctcacaccacaccacctactgctcactagagataacctggtacagtgaggaagttgaacttggccccttgacatcgaggtgatcacaggacataaaattgtgtggctttggttttgggatttttggcaacgctttgtgtggcctgtaggtccagggagcttagctcaaagaaaatgcatgccgaattatgacacagaggctcacccagtaggcctgcccaaaactgtatcaaaaccaaagttgtgcaataaacaaggcccaaattcaagacttgagaaatgtgttcagatcctatctgaatctggctaattatctcatcttcctatggacacacctccctaattaatttggtatttattttattactctgaaaagttgattatttcttctatctctctctgcatgatacaatgcattgtctctctgatggtcttaaaatctaatgaaatcctaaaatgagatgagaaaaaaaatctgctaaaaggaggaactaaattgattaatgtccccttttgaggttttatatagatcactgtattcagttctcacaagtctatgaagttggtactcttagtagctcattttaccgatgaagaagctgaggtttcaaaaagtcacatagcttgccaaaagacacaaagctagtaggggatagatcaaggatttgaatgtaagccagggctctttgcctttctgcaagagtgcctcatttttgagcttgttcatctctggaacaagccactctgagtcctggtctcacggacatgctttagcagaggctgcaagactgcaggagagtgcctggacgacacacagggtcgcaccagctgactccaagcatctcattctgcacttctcttcagaactgcctttcgcggcacatagaaaatgatgctgtgttgtgttttgttttattcagaaggtccttccaggtatgcaattaaaaaccatcacatcctcattttttagaaacttctctcctctctgagaagaacccctgctttcaacagggatgttgatttcacagcatttcatacaaccccatactcggcacctgtcttgggccactcacattagtaaaacacgttagaaccactgctcctcttgagagatgctgtaaaaggcactggtgcaaatgaaaataaaacatcacttcaaaattctacccaaagatcaaaaggctaaattaagatagtgccctttcagttctcctcaactgcaccttcaaagcatgttgtgaatgtttagcacatcgctggtaccagaagaaaactccaagttcatattttagatgaaaatgtcttactgctcttaacaggttctgagtcaccaggcactgtatgggcaagaacaactcgttgaccaattttttgtttgtttggtgttattttctgttcagccagtcacaggaaattttccacttgacaattcctgtttctcactaaagttcttaacaccatctgtgagcagtgtgctcagcagggggaggacggggggccaaggaggactttccttccccaaacctcagttttcccatctgttttatgcaaggtttttacccagggatctggctaacattctgtaagctcagctatcaaggagaaagcagccccatgaataaacgaagcattttagagactgtcagtttctgggcgtgggtctgctgccagatttaaaatctttacataattttggggtaaaacaagagatttagctgaaattaatagcacaatgggaaaatgaactagggctgaacaataacacagcgggacttcagatttgcggctggtaaagaagcctctctcgttctcagggcgccccctcgtggccgcttgactaaatcctgacggaatgttcagtttctgcaaatacagagaaagacatcccccaaaagagaaaggcggactcctgcctactgatgcaaatccctttcactctaacctagtctgtggatcagacagctcaagaacgcctgacaggaagtcccactgacgctcagaaaggcgtctgccataagacaagggttcgttcgttagaaaggtctgaggtagtgccccagcatttagactttggggtcccttcacagaccctagacacacccttaccacttcaacaacccctcatagcctcacattctcaacctgcagctcgaactgcgtctgtttttcattattctgcttcccaccttcccagtgcgattcttcagcagctattaagacaacatgagcagggatctaagcttagtttttgcttattcaacatccagcctggggaatatcacctcagaagaaaag

SEQ ID NO: 58761 - DNA, 3656 bp, Homo sapiens
ttttaaaataacgttatgggacgaagttatatagacccaaacatcaaatctgagaaatgggttgggagggcgttatccgggtatccagatatttgagaatttggggactgaactttgctgactggcacccccatgtttttttcacagaactgttcctgccgaaatgcaaaagaaacatgtcaatactaagctgctattttatttgacagctcattttcctttttccctgcagtcatttgttgtttataagcaaacctgagcctccaaaacacccccaaaagtgcacacaaggagtcccataatcagtttctgactttggccctaaatcgattagaatacatctgatctgcttcaaatcaaagaaccatgttaattttctgccacacaccacacaaaatctttctgcaacagtcagtcactttgaacccaactctctagccacaagcagtgtggatttcaagggcctgttctgcagaagtgaaaataacaacaaaccaaggctgggacaaggcagacagaccccaaggcactcaaagcactccttggagctgtgcaaatggtgccaggaccctggcagggtgtcagctgtcacaagagcagcggggccagaccccttcagcggtttggtagccctgcaaccaggagctgaaacacaactgagcctgctgcaactaagcacagctatctctgtagctacccatgccctggacatttcggtcctcccaaagccatgatgcaaactgttagaatcctcaggcttgcagtagtctttatttttgctccctaaccttgtctcaaaaacaggcaagagtcgccctcccttgcagtcacagcagtatcagggcgatgcagagtctgagtgggaggatgcagagcaaggagctgcgggcagatgggtggaagggggtagggacacctacaaaacaccggacttgaggggctagctcctagctgggaatgtggttctttggagagttgtggaaataagacgtttcggggcatggtctaaatgagtgcctgcgagggagagagaccccggccgtcccaacgctgcaaagtgtttgcaaatctaaaacattcctttgctgctaggattaaatttttaaaaacaaaccaaaaaataaaataaaatatgtgcagacaggatgtaacaagtgtttcaggacagagacacgcctgagtcacggggtgctggagaaagagtgaggagtctgtctcggggcttcccaatgagccccctctctgtcaagagagccccagggcgcacagacccccgcctcgcacgccctcagtccccggccgcgtccacccagcgccccccgcaccctccaggattgccccactcaccactcggccagaaaacctctcggtggcccgcttgactttgccgtaggtgcctttgcccagggtctcctgcagctcgtagcggtgcttcaagttgtgcttgtggtgatgccgcttcaccccgtgcggcttcctgggctccagggctgcagtcgcccccgccaccgcctctcggggagagcccggcgcccccagccccaagtcggggcggtcccccgccacaggcgcggcggccccttccatgtccaagcgcggggcgagccgggctacagagggcaagaccgggcacagcgctgggatgtcggggtccccaccgagggaagccgctgtacgctcaaggtcgcccccgcagcatcagggaggcggcccgataccgctcggactgcggctcggtcactggcggcggcggggactgcacatctggcgcccgcggcgcgcacggtccgcgcaccgccccccggccgcggcgagctgtggagcgtcgggcgaggtggcggcggtggcaggggaggcggtggtgtttgcaggagggaggggagagggtggctcgcagcgcaggagggggagtgttatgtggggcgccgcgccccccaacccctccccgggaggacgcgcagacggggcgggggcggcgctcgcgcggccccaggggagggggagcgaggggcggtgcagccagggcttcccccacctccctgcagccacccggggccggggccgccgtgagctgggagggggatgggagcgtgtcgcgactcgccctttgtgcggcgcggcgtaggccacggcggcggcggcggcggcggccaggagtgctttgtcctcgctgggccggaagggaccgggaaattccaagccgggcgccccctccccgggcgctctcgggctcgccagtcgcagctaccgcgggccctccgccgcctcgggctccggggccggtcgctcggcctggattcctgctggcgccggggcggcggttgcggctggccgagccccggggccggggaagaaagagcgccgcgagccgggggccgccgggacctgctcgcgatacggccggggccgccgcgggcctgggcgccccttcattttcttgtaggtgtcgccgcagcctggcggccggagctgggggagggggcagggaggcctggtgttcggttacaggcggtgactcacggaccttgcccgcccgaggctggcaccccgcggggcagagctgcgcccgcctggggcaactccgagtccaggagaaccccaagagcggcgctttggccccggcccccgcgccctctccgaagaaaggagagtcagggacggagggaggccgggaggctgaaccccgggcccgccgtcgaaccgccggccctccgacaccatctggaccccggcggggacagccgcctggaaggggaggaaggccagggacgtggaagagatggggctctaaaggcgccgggacggagctggctccccagaggcgcccaccctgccagcgaaggccgccatcggaggtgggcaaaccagggacctggggtggaccaggaccccgggcctgctgagcaacccgtttgctgagcaggaggcgatttgcaggcctcttgcctccttaggccttgggagatttcctttcactgaaagggccagatcctggcgatggtgacaggaacggtaccccgcacggtaagggtcaggcaggaagggcctcccaccgcggcgtggctgccgccgttctaagaagagaccatgaaaaataaggaagaaggctagagaaaaagaggtcttagggaaatttttttttttaacaagtggtgcaatgtaccagactagggtgggaagagtgaaggctgaagaaggtctggtgttctgcagatcgcatggcggttcttttccaccagtggacctcactggggcctcctctgcagctctcaggtgcagcccttcctctacattcccgccgccttcattcctgtctacccctggtcaccttaccccggactccagcaacagcccgctctccccaaccctccccgggagcctcctcactgctgccagagtaatggcctgaaacactgccctcatcctccacacgtgtctctgctgtactctgacgcgtgatattcttacctgtccaaactttccttctactgatatttcacacaaacttccctgccccttcttcccttccccaggagcaatgacagaacacagacacaaaggcgcatcatgcctattcaattcctattctgtccaccgcatttgcagggcctccctgccacccacccccatcctgaaactgttctgcttctatacag

SEQ ID NO: 58762 - DNA, 635 bp, Homo sapiens
tccccttgcttagcagctcatcaaaagcagggacctgcagggatttcagatatactagtctttggcatatgctttgcactacagagaaatgtactggagcagtgccttaggccagaatcaatttcctctcccctccaagaagccaggcaatgtacttgctgctccttaacgggagggtgtgggcagaaagtctgagatggttctagagaagtccagagatggctctgtagtcaattactgatggtgagtgaaaaatgaggtcagctccctgacagcaatgcctgagagaggcagcgaaataccacagaacccccattctctgtgggcccaaggacacacagctaaaaatagacatacaatatcacttggatctgccgaggatttcacaactgctggcccagcacaaaatgtgtggctttggccaagtcaagatgcaatgcaaaccagccgagaagcgcagcatgaccaagatcaacaatcaccaggacaacagccacccctctgtccagaaggccttgaccacggaagcacagttacccactgccccaagtccttgtttgacttgctgtgcaacttacagaaagtttgtcttgcatgccagggactttctaagacacttcatttcagggacattg

SEQ ID NO: 58763 - DNA, 1340 bp, Homo sapiens
aaaagattcatattaaacaaaaccctttattacctaagttttcaaaaggggctaattagtaggatagtatacacattacaaaagcattcatgtcacagagaaatacacacataggtcttttaaatagtggatttctctggtatttttaatggtacaattggattttatcccctttctggaacaagagcgaaaaatgaagaaatcattcctgtgatccctgactctgacactagatggcaataaattctcacttcaattatgttctctgggttcctactgccacagtcagctgatttggggctattccccagctgaaagttcaggggcttgagccgctctggattttttactggtgcatcccggcatcttctgaaagtgaatagtcttcacatgaggttatccaagatgtcagcccggcccggccaacattccccatttcaccccaataaatgagaaaacattaattgtgacccagtgtgtgccggcccccatgggagctacaaacagacccttggttaagacagaagccaccctggcccctagagatctgctcactgtctagtcctttttcccttaggcctcctcctgcccacccgaggctccaaaagactcttgtgcaatggttaaagtcaaggaaagttggatctggaagagaacatgaagattactttatctcccctcacttttcagatgggaaaacagatggaggcccagagaaggaaagtgaattatcctaggcagcacagcccggcaggccagcattcggaccagagtcctgattccaggtgacttcccccatccctgctgttcttgtcacaccatgtgagaactccgtcctggagtgcaaaccaagatcatacccgtgaatggaagaaaacaaaaagacctagccttctgagtttccatgaaggactctgtgggacaggatgtgtcctcacaccagcagccacacccagttggtaatgcctctttcaacacaacatcaccagctatttgaacacaggccgggatttccccacagccccattacccaacaggtattgctcctgagtgttcgctgccacacgcgggggcttgcacagcaaggccaggctgccacaccccttcctgccaagagtgggttttgctgcctgcagcaactcaactgccctgattcttcgcttacttctgagcattttgcatctgtgcttaggcctggagccaaaacaaattgtgggggataagagaagaaattaggccctgtcttcttagccagttagtgtatgagcttgggtgaacaacttctctgagactcagcctccccatctgtaaaacaacagaattagattagagccttctct

SEQ ID NO: 58764 - DNA, 2498 bp, Homo sapiens
tgggaggccgaggcaggcggatcacttgaggtcagaagttcgagaccagcctggccaatacggtgaaactttgtctctactactaataaaaaattagctgggtatggtggcacatgtctgtaatcccagctactcaggaggctgaggcaggagaatcgctggaacctgggaggcagaggttgcagtgagctgagatcgtaccactgcactccagcctgggcgacagagccagactccctctcaaaagaaaacccaaaaaagctgaagtaggactacgtcaaaggcccacctgggcaggctggtccaatacaggacaagggacctaaagatagatggtatttcatttggacctgcaaatgagtaagaatgccagctccgggtctattaaaaaccccgctcggatgtctcccacaggcagagctgaggtggggccttgcctgaggcttccagggatgcgctggcttcccttccaacctccttttcagacagctctgcccattcagcggttcctaatgcagaaagaatgggctccccggagcctgccggcttccttacaggtcaccgctaatgccctgtgacaggcccttggcccaccctgccaggcgggcctgggcatcctcgcggcggcccatccctcggggccgattcctccgcagccattaacaaagggggtctggggactgcctcggaactagggggccgcgtggagtgggatgtctaggccagggcccgccaaggaggagcggccggctcccgcctccgggcctgggcaggcagcgctaggggccggtcgggaagcacgaaggagcccggccgtgggtccggaggccgcagtcgatggggacagttgcggggccgggggtacccaccttctgctcgacgccctgcaagccctggcccagctcctccctctgccgggagaagtcctggtggctgcgccggacctgctggacctcctccaggacgtggtggacgcaccagcccgagaaagcggccgccgccaccagggcgaggtagaagagaaagttgagcgccctgccgagcctgcgcgagcaggacgccgaggacgaggcggcggcggcggcagcggcggcggaggcggaggaggaggaggaggacttgccgccgccgccgccgccgccgcggtggccgcccttgccgtgcgcctggttctgcgggtgctgctgcgggtgctgctgcgggtgcggcgcgggcggcggcggcggctgctgcggcgccggcggcggcttcttcgccacgtcatccgcgccgcccgacgggtgggcacccttctccgaggggctcgcggcgccgtggccgcccttggagcccctttgtttggccgagggcatggcgggcgcggcggcggctcgggccgcgggctgggaggcgagcgagcgcggcgcgcggcccgggaaacttgcaggggctcccccgggactgggcgagcggcacgcgggcgctgctggcgtcggagcggcgagaggacgcgcggccggggaaggaggccgggccgaggaggcgggaggagggggcctgcctccgccgccgcggcgccgaccccgcctcccggtaagggaggccgagcgagccgagccgggagagcttgccacgcacgccggcccggcggcccctcctccccgccgccacgaccccggagagggagggccgggcggggtctacgggggccgggaagccggcgcgggggtggctgggcgcggggcggggtcccggcggggtctgcggaggccggggtgggcaccgaggtggccgcgaggggaggggagaagagcggagcggaggggaggggacgcggccgaggtggggctggcggcccggcgggttccacgcaggctgggggcggagggccagatcgaccccagccggggcggccgagcagggtccacgggggtcggggatgggcggccaggcggggtcggagggacgaaagccggggtgaacctgcgccgcgggccaagcgcgaccccctcccttcccgacctgtgcggagaggagagaaatgaaggggggcgcccaaggagccctggccccgggagtgggagtcagcgggtgggaacagatcgcccttcctttccgctgggaattgggggactccccctgctttcactctcccagcccgccatggggttgggccttgtcctttgccttgggtttgaaggcggagacaaaaaaggctgtccaaaatccagccagcttgggaggcatggttgatgcgagttagcaaagattctcgactgtggtaagtctgttcaaggggacgcattcaccaagtgtccccgttagccaagttagcctgctgtggccagctctttactttttccccccgaagccccttcagctctgttttctctttcggggtcatgaagtttgtccacggcccctactcctgacagcctctgggatgggtgctgcggaggcagcagcagccacacagaaagaggcagatcagcgttgtcacccctacttttgtaaaagga

SEQ ID NO: 58765 - DNA, 1161 bp, Homo sapiens
tagattattatttttgcctgtgaaattagctgagatcaaacacaataaagaaaactcctgtaatcccagcactttgggaggcctgggtgggagaacggtttgagcccaggagttcaaggctatagtgagctatgatctcaccgcggcactccagcctgggtgacagagtgagactatcccaaaaaaaaaaagaaaagaaaactataaaatataatgccaaaacacgggtgaaacagcttcttcatgctatccttgattcggccactctggagactagcagaaatgggaacgaggttctgatggcattgagatggtcactgtaatgggattagtggtttttttttcctggccagcaaccctccctccccacctcctgacagaccccatgatcctcaggcagtgcacctaccctctgaccccaggggagagtacacaattaaagactggccaacctggcactgggatttttcaaaccagcaccgaagccctccttcttctctggttgggaattggtgaggctgtaactctggcagctgctggcatgacgtctcttgaaacacagagagagtggatctgtagttgggaaaaactaggttggtttgcagagagaaccctattggccttcgtttccctggttctcttccttcctgaggtcacgttctgtgtccctgctcttcccacatgttgcagaagtgagtgaatcattttgctcttttttacatttttcatttagtgtgctagagtgggattctctggcttgcaacagcctattgttaaatgttcaggaattttgtaaactggttgttaaatggttgggagcttgaaatcagccctggcggaagtatttactctcagtctaccgatgggagtttccagcccatggaactctgcaaacactaagcactacaaatcaggcctttttttttttcttttttttttttcctggcaagccagttgttaaacatttaccaactttccttgaggtaactgggctgcagttctgtcaccgacaatccagagtattttggacaatgcagccagagatcctgagaacacctaaatcccacctgagactttcattatcactagcttccacaaatgaagaaacttcccccaggcagtcccgaagggaggtgacacccagaaagagtcttattgtta

SEQ ID NO: 58766 - DNA, 1287 bp, Homo sapiens
cacacacacacacacacacacacacactgcaaaggactaaacgcttatgttctccgaaaatgcatatgttgaattcctaaccccctaggtgatatttggagttgggacctttgggaaataattaggtcaagaggatggagtcctcatgagtgggattagtgcccttataaaagagactcatcagcccttctgctatgtgaggacacgacaagcaggtgccctctatgaaccaggaagttgccctcaccggttgccaaatcttggacttctcagcctccagaactgtgacaaataagcttctagcatttataagtcactaattctctggtattttattctagtagcccaaacagaccaagacaaatacacacacacacacacacacacacacacactcaatagctccaaaatgctctccaaaagttaccactgatattaatgttatgatcatctttctagacatttacgcaacagggtcatagtgtacacagtattttataacttgcttttttcacctgggcttgttttcatgtgtatacgtacagatctacctcgctggagcctgggaattcagtgtgtgaatgctttgtgatatttagtgggtcctctatttgtggacatttaggtagcctcttgtttgtgcttcactacagatcttcccagagttatgaacacccaacttatgaatcagtcccatgctggcgctttctcctaccctatccttcctccttaccccagcagcctgcaaccgagctgtcctggcctacttgctccacctggtggtcaatgtgagatattacctaggtttagtatttttctctctagaatctcctggtctctagcttgcccttctcaaatccatcttgtccctggcagccagagtgatctttctaaatacaaatctgatcttctcactctcatgatgaaaacgcgtcacctaaaacaaacatagacctctaagcagagtatacaaagcaggaatactttgacccttgcccacctctccagcctcaattttctcctcctagcactttgtaccctagcaatacataaccaattgtagttcgttaaacacacagtgctgcttcccacatccatatatttgtacctgttgttttcttttctttagatttttctggtaaaaaccgggaaacctgccacacaaattgtaaaagagctgtaacactgccacctgctattttctctccctggagtatcactctgcccactcccattccatgtttgccaggcaaactcctattcagcttttagaaccctacttaacag

SEQ ID NO: 58767 - DNA, 3283 bp, Homo sapiens
cctcccaaagtgcttggattacaggcatgagccaccgtgcctggcccaaagtgcttttatacacaagtcaggccaagggcagttggtcaggtaattcacagaagggttttcagatagcaagttatttaacattaaagtaacagaagatagtatttccagcatcttttcttatctcagcttggttctctgatgttacagttgaacttgctttgacaaaagctgctttcctggtggctttgagagctacatatctgaactttaaaagaagtgtcatgcctaggatcaggcagctggtcactccagtataaaggacaactaccctgactcatggtcacctgctccaacttatgtcatagctcaaaacaatacttaaatccttacaaagctaacaaaggaagtaatgttgccatgtgtcattgtcacagaattaccagaagtttgggggatttgggtgttcatctttctattgtggagtttttagggtggtgatggcagttgtgtggtggttgtcatttggcaggaattgaaattggaggcttctgtcattctgattacttatccaacgaatgacacaaataagagcatgtttgtagggaagaactcaggtggggacagcaccttctatttaatctcttaacctgtattattaggttgtatattttaggagaagagaggaaagtggcaaaaggaggcacagatacaaatttatacagatcaccagctaagtttggccacagtggtttgccaaagaatttcaataactaatacttagagtgcttactgtgcaccctgctaagcacttcacatgctttatttcactttatcctcaaaataacccaaggaaatagctatcattgttatccccagagaccaagatctcatggatagtgaatgtcagagccaggactggaaccatagaggagtctgtgttgtaaccactgaacaactgactttctaccctgctttaaaatgttgcctgttgtttgttgttgttgtttttgaacggtggtggccaatctgcctccacaatccagacataatttcggcactaaacagaaatactttagtctatacaaacttcatgtaagtagttcctgcatgaaactatttcccaagtaatacagcaccgatttacacctggcagaaggcatagttttgatgtgaacagttgggggaagcttgtttctctacaccctcaagcacgcccacagcaggagctgagcagcaggccagacggcacagagccctcctgggactggttatttacattaaccaaggtggaaacttctcccggagataggtgctgccaagaaccctagaggaagtaagacgctttatcttttgcacgcacgccaagtcttcagagggcctggatgggtgtgactccaaggagctaatcgtcccgtgcaggtgcaaatctagacccgtgtttatgtggaggtgtagacgcaactggagatgacccggttagtggctgacgtgcgtgggaaagcccaccagcagcgttgttggttgggttgtctctgtaagtgtggacagtgtgttggtgggcacccagttccgattgccccgtctagacaggggtgtgcgggcactcaatgttccacgcgcggccgggagctcgcagtgtggtccacgccagtgcgcctggaagcccaggggatctgtccggcactccactggaggcttggcccgcggcttcgcccacctccccagagccccgctcagcccccgctccccccgctcagcccccgctcagcccccgctcagcccccgctcagcccccgctcagcccccgctcagcccccgctcagcccccgctcagcccccgctcccccactcggccccgcccccagtgccctggcaggccccgcccccaacgccgggcgctcccgtcggctcggcggcctcagttccgtaaacacttctcaccccgcccccggcagcccggaccgcaccactcgccgcgcgggggaaccgtgccctctcgcatccgaaacaccctcccatccgagctgttctcggcctctctggttcaaactgacgaagactgtttctctaataggttcagtctgtgagcgctcggctttcggagactgaagggccctggatccccttgccccgtcgcgccgtcgtccccccgctatccggttttgtgatggccgcgccgtggctgcctccctagagtccctcagggccctttaaataccgcgttgggggggacactggggctgggggggtttgttgggctggtgagttttcgaggtgactgtgctgtgctcggtgaggggacgcccagagagccctgacccggggtcactccgtcgccgttctcctcttgtctacgtgctggacccggtgcgtatccatcacgggggaggcgttgccggctcggaggtgaccggccaggtccaacggaggggacaccgctgcagcccgaaggctcccctgccctatctcggaactccatcctgggaaggcggggtcaggggccatcaagctcggctcctagttcatgtcttcccactccgcgtccccttgtttgacctcgaactgccgtcccgcgtgggagcggggagcggggcaccgagtggccgccccgcgtgtcggggtggacacggacttcgggcctcggaggccgcttcgccgctgtttaaatcctgctggacaggtaccagcggcatcccgccatcaggggcccagggcacccccttcccccacactcctcggccgggctggagtagggaactgagccagggtagaggcagggcgggcccggcagcgtgtgtttgggatttgttgccgtggtttccccggcactcagctctgcctccgccgtcccctcccccaagggtttgttttgacaggaaacctggtgctgctggaggggaggggcggccagaggacgtgggtgaggtcgtgcagactgctgctgcgtccccttgccgggacctttggttaaggggaagaggtggagaaaagccgattgggcctgggctcgaacgctgaaccctcaggtgttgcttgtgcttcccaaagctgctactgtaggtggcaccactgggggtaatagcaatgatttgaggtggcatatggatgaacatagttacttgttttcgttactattaagaaaatctgttccattaagtaagcagtttcacaatgatagagtttccttttaaaataaatatatttaaatgcaaaaatctagtcaagatagagacgcggttactaaattatagtaaaggtaaggagggagacgtagaaatagtcatgaagagtg

SEQ ID NO: 58768 - DNA, 674 bp, Homo sapiens
ccaatctcctctctatctgtagtgaaatacagcactagccccttcaagtccttgtacccattcacacctcttaaatgtcagtagtcttactaccattcatttattcaacaataaatatttgaataaatatttgaatgcttgctgcattccagtgatggtctcagaagaaatgacattatatttattatcacaaagtgatggaataatacaatcaaaaatgtgaatatgacagtacttttctttgaatagtgacctgctatcgtgttggaggctttgcttggagtcatcttcagtcttttctgttgactttacctttgaccagtgattaaatcctccaggtatgatgagatgtgatgtttctgaaaagttgtttgatttacttgtgagttgcagtggcaaaggttaggtagatctaagtttgcataaggagtattacctttcttaaagatacagcctggtttcattatcatcagtctaaaggataatccaaaatagtttttaaagcaatctaaatatcctcagtgccttttgaatcaagtaggtttgtccccaggtgacttacttggaaactcaagaccgagaaaggtaagagcaggtatgaaggaacttgcggaagaccattcacacagtgatgggccattcgcttttggtttttgtctgtcaaacaagtgcca

SEQ ID NO: 58769 - DNA, 698 bp, Homo sapiens
agcatactgccagatccccagtagtgtgcaggcctcatgaggacagcgtgcaggtttgttcactgctatattcttgtgcaatgctgcacgtgcacatatatttaataaatatttgtgaaatgggtaaatgcataggagacttggagaggttaaataactttcactcaaagtcccataacaagctgggggcagagtctgtcttccccagcctgtctgactccagagctcatgttcctaactgctctgactggcacgtcagtcagagctggagcgctgttgcttgctggcagagtggccagagtgtcagagtgtactctgtgacttttctttggataagggaaatgcttgcagtatcagaaggaagagggaagctgagggctaggagattcctcttaaaatctggtaaagcaacttttgtccacccagctttccccagtccaactttcctgtccttttgcaaattgaaagcatttttaatctcattcaaagtactgttgccctagcaacttaagtgactcacttgaacgtctcttcttcgactctggaagccaaggacacgcctttggcagggactccgtgtggctgctcctaactttacaaacactccggtcactttagcctttgcctaaaaacagactcatctgcaaaagaggcaaaagaggcagaaccacttgctgacataataaggattttgaaag

SEQ ID NO: 58770 - DNA, 2034 bp, Homo sapiens
ttaaatttctccatgcgctgggtatttactcctacatcttccatctagtgcttttgagaattttcaacactcttccattacacgcatgtaccatcatttatttaatcaatcttctattggtaggcatttgggacgtttcctgctcttccatactaaacaatgcatagaattttggactacattaaataattctctgcctcagtggttcaagttgcgtaaattatgcgtttacacttttcttcggattacttttaaaatgacaaccactatgttttgctggtctcaattaccagagaattggcaagaaacctgacagctggggcttaggattccctgcgccagacctccgagctacaccagagggcgtactttccttactcggcctcggccacatccgggttccaccgcagattcgggcagggagcgggcggaacctttctaccgcgtctctagctaacacgcacggcggggacagtttaggcctccgcgcaccgttcgccgggagtcttgcagtttgcttggtgcagggaaggcgggcgcggaggttctatctgtttcttcctccttcgtgagcagcatggacgtgctagcggaggagtttgggaacctgactccggagcagctggcggcgccgatcccgactgtagaggtcagtgccaggcacgcagggagcgtcagggacaaggatgcgccctgagggggcgttgcccggagtgctcgggccgccaagggggcgggctggcggtttgtgcgcatgcgccgggcttctgcgcatgcccagagcgtcgcgcttgcgagtcttttttccagagccggcctccgcgtgcgcgagtgaaggctgatcccagaggagctgtcagccgctgcgggggccgagaagccccgctgctggctctagggttggagctcttccagcataggtgtgcgtggggaggactgaccctcgcacttactgtgggggacgtattgcatgtttgcagtcttacagaggacacggggccagggagctcaggccatttgcatgaggcaccacagccggctgtgggggtaaaaccagatcgtctgaattccaagctagtcatctttccttttaacttgaagttccagtttgggttgcaggggaattttaaacgccctcaatatttactaaagaatttgcctgtgtgttttctgggggagagactccacagctttcatcagcttctcggaagttaaggacagctgccccacagcgagctgcccagtgaagtgcggctgtcgacatattttgttatctgataaggcacattttgtaatctctctgagcctcaaaatctacactgacgtggaatagggaagtggagacgtggccggagaagatagcaaaggagagatttcagggaaagagaacaggatacttgaaacctcctcggcaagaccattggatgtttttgaggaaggaaagtaaatccagtagtattagagtgaagaaaaatagaggagaagagataaaagacagggttaagtaagggtcttgattatgaaaagtttcaataaacatctgacagagcttggactttgtcttggagcagagcttttgaagggtttaagcaggaaagtgacatgatcagtaagtctatcggattataagaacctccttggctaggcgtggtggcctgtaataccagtagtttgggaggccaaggcgggcggatcacttgggctcaagagtttgagaacagcttgggcgacatggcaaaaccctgtttctacaaataatacaaaaattagctgggtgtggtggcgtgcacttgtcccagcaactcaggaggctgaggtggaaggatcacttgagcctggaaggtcgaggctgcagtgagccgtaattgtgctgctgcactccagcctgggtgactgagaccttgtctcaaggaaaacaaaacaaaacctctttataatagtttgacaagttaaggaagttgaattagcagttccaacagattcagtctataagtgcatgcaataggctgctgatcatcaggcaaaactattttt

SEQ ID NO: 58771 - DNA, 1137 bp, Homo sapiens
tctatgttgggcttcctgatgttgaagaaagcttcaatgtaactagaccagtgtcccctcatgaggtaattatgaaccttactttaattggacttgtttgctttaactcagagtctgcccttaatatatactcttaaaagatcatttaaaaatgggatggggggggacattctttggagaaaaagggattaaagttcaatgtggaccataattctactacagaaggagcactttgaagtggtcaggaccctgttgcagagaggagcagtaactgtcagattcctgattctctttcagtgccgtttgagagacatgacatactctgcccctattacagtggatattgaatatacccgaggcagccagaggatcatccgcaatgccttacctatcggcaggtgagaaatgaaatccgtattagagccacactgcctggattccagccccatgatgtgatcccatttcctcatctgaaaaatgcaggaaatgctgcctatttcataggtccaatgagtcagcatgtgtaaagcacttagaataatgtccagcacatagtcgtggttgttactatttattaattgtgaaaccttttctaagaagttgaggaaaatgtttccctttcctactataactctgagctgctagggaaccactagatacaatagcctttcagtgaactctcctggacaggtcttcttggtggataggtatattctgagattgagttttcctggaatttaactttttctcatctacaagtatttaagggagaagttacttatttgcctggtacaagtttggaaatgatagcatccacttgcgtttttgcaatctgcccttcctgattagggaaatatattgactctcctttagaaatggacaaaacccacaatattgtgtggtcaataatggtactagactttaaactcagtccacataatttctgttcaagtgtttttccccctctcaaaagtgctaagagcactttgaacaaacatccatttgttcaataaatatataccaactgcctatcacttcttatgtatgatgctgagtacttaggtgagtaaaagatatacaaaatacagttcctattggctaccttcattcacagctatcagggaagacaggcatatg

SEQ ID NO: 58772 - DNA, 1528 bp, Homo sapiens
tgtctccactggccaagcgggttcacagagctttccttcagtcttgatgccacaagagggttggcaggccagccgccagtagaggtgttagcaaaacctaccgatttcaggcttaatctttcacctaccttttctttttcggtaatgtgttcattatttgctgagcattactctattctttgtctgcaaattttttgtttctaatgcagcttgctttgtatgggtgagatatggaatggcaccaaaatccggcaccctggaaagccagggatttctaccctatgacaaaagaatgccgtcttgacttcagagattgcctaatcccagctgttctgataatgtaattaaggctgcctaatgtctttaattttgcaaccagtttgtgtgaaaaggagaatttggcactctgtaggcttaaacactaaatagcaatctcaagacgcctaattagaattctctgacattaagctaattggtgaaactgtatttcagcagcttaacttctttattaatttttttagcattttcattgaaaatcaattgatgagctgtcagcatttttccctgaaatatgatttgctctttactctcctgtcttaaacaggctgaaaggccttgtgctaccaaggtattgaatattatcaccagcattccttcccttttagtcattttacttttgacctaaataatgtggtgtattgtgtggatggccttgtggtttctcactgctctgtgaacttggacagcattttttcttttaaactgaaattttaggagtaggaaaatttaataatgaggcagtatttctgttgactgtgttcttactttttacttctttagtaccaaggacatttccttgtgtttgaatcaaggggctacaataaattcagctgggatccaaaaaaactttgtcataatttgagacaaaagtgtctaagtgtaagggactaattaaaatagagctgagcttttgttgtttaggttaagggcattcgattctgttcaggatgcttattcaagttccttttgccagtttccacaggaagttgctggaataggcttcttcatcccctctcacccctctgcacctgcttccattcccatattctttctttccaagagtgaaactgctgggtctcactgtaagaaaggattaagctctcagaggaggaagttttctttttagaacacttctgacatagtaaattcaaatccaagatccaggcttttctatctgaaaaggtggttttagtagaaaagtggaaggacatgtcttaactttaaagaaggaaaagcatgaaatccagttccacttaggaaattccttctttggcactagctagaggagaagattcatttgctttgaataccttcttcattctgagtcaaaaaactacctatcagaaacattcaggaatatagtcagtatggaatctggaaaatctttagcttaaacatacttcactgaacctcagaattctttaagaaattaattagtataaatatgccccccatattactttaatgt

SEQ ID NO: 58773 - DNA, 2510 bp, Homo sapiens
gcagggaacacttagatagcaagtcctttgaaccggaagtggttcaattaatactcatgacagctgtatgtgcttggtactattattatccctattttacagataatgaaactgaggaaccaaaatgttgttcaaggtcacgtggctaataagtagtggagctgggatttgagcctggaaatttggccccagagtttatgtcaggaggtagatgcagagaggagagcagagatgctcaccactgcaaactggactgagacctctgcaccgtgttaggaatcataactgccaagtgggagcagaacggagtggcaagaagaccaggcgctggggcagcatcttggcaggagttttttttttaaagcagaccactgctctccagccttggcaggaccatcagcggggcactgcaggtgtgcctgcgaatggctccaggaatcctgctggcctaaaatgatactttacaggatgaatcttgtttggttcaaggcatgtctcccagtgaaaacgaaaaggcatttggcaggaccagttcctaaagtctctatcaactatggctatttacctaaaatgtgttctcctactctctactctcttctcctaggtaaggttgctgctcctcctcagatgcccaagccaggctcataccccacacttggtgctgctatagcatcctggacctgcatttcacagctcttgcctaggacttaattttaaagtttggggtttctttttgttttgttttgttttaattttactttacttttgaaatggggtcttgccatgttgcccaggctggtctggagctcctgggcttaagtgatcctcccagctcagcctcctgagtagctgggactacaagtgcatgccaccgtatctggcactacaggtgcatgccaccgtatctggcactacaggtgcacgccaccgtatctggcactacaggtgcatgccaccgtatctggcttggacttacatttaattggctgataatttatggcctcaagagagcagtgactacgtctgttttttcttaccctttagcacctgtcatgggactggaatgtagcagacgctcaataaatatctgatgaatgagtaaataaatagccagcacttcaggagaactgagatagagagccatcaaataggagggtcaggcctgggtgtgacacacctcctactttagaagaaaagggcttgggcattcagaccctgggcacaaagtcaccagtgatctaaggaaaggagccagcagaggtggacagcacctgtttgctgactgagctggagggcccacattggctttggggtagaccagttctcttctaaacactatcagtagccactggattgctgagcacctagtgaggtcctgtttccattcaccagctacatggcctcatgcaattattcaccctcaccaaagatctgtttccttatttataaaatggggatataaaacttcttcatagcaatatttggaggaataaaatgaggtagcatatgaaaagtgatgtgtagtgcctggcttaagtacttgaccaatgaatgctattattagtatggcatttttaaaaactgtatctagttcttaacatattatatttaatcctcaaaacatccttgtgacagaagttatgattcacatttttttagataagggccttcaggcttggatgagtcaagttgctgctcaaagtccacacagttgggggcaatgctggaatttaaacccatgcctgcctgtcctcaaagccaagttatttttattcactgatactcagaaatggggccataacaaagtttagttgggaaaaaaacctgatataacaaaggcagtattgcttgagtgggagacactgcgatggaatcccagaacagggagcttccctggctccaccaatgggaccacatgcatcttccctgggccccaggtcccagttccttgcctttgctcctgctgcttctgcctcttggagtaccctctcccttggtggcctcctcccagagtctgacaggtcctcttcaaaatgaacagggcaggttacaaactaggatggactgtatgaccctcacatgttttaagtgtagatatgcatgtgcttgtgtgtgaaagaaccctgataaaagatgaggcaaataggataaaaagataacagttgttccctctgttgagaggagcttggattctcagatattttctccatactttcttaattttaaaaagatgaacatgcattacttttgtgaatataaagcaacgttattttttaaaaacctcaaccatcccttcagggctcagctcaagtgccgtctcctatatggagctgtgacgtcccctggtgtgtgtttgccttgtgaggtccttggtgatgccattgtctttgcccctgtaaatcttccaaagcagcagatcccagcagacagaattgctccaaaagcctcctggccggccaggcacagccaagggcaacctttccccgcagatggctgcagagggtgctttt

SEQ ID NO: 58774 - DNA, 1036 bp, Homo sapiens
cagttctcttcccgcctcagctcctttcatgagggacgaaaatgtgaaccagactcataaggaaaaatacaatcagtattgcttgcttaaaggaccaggctctgagcctttgctggagcaccatggaggtcactgctgcctctctcaagaaagaaccttctgtggctttctcttcaagttcctttaggtccagggcagaatggtgccctttaaagctgtgattgcattcttcttctggggaagtaaatgctgtggttcagttcaacccagctagtccttactgaatgcctgtcctaagtcaggtactgtattagatgctggccaaagggcagtgaataaaatggacacatcccttcccaacatggagcttacagttaatggtaaataagacctcaaacatgtatttacagatgtgttgcatcttaccaaagagaacaatgtcatgtaatacagtgctgtgaagggggaattgagagagggtaccaagcctcaaggcagtccagcacatgtgcgtcaaccctgtacctcctaaccagacagctgggaagtccctgacacacagggagttggaccaaaggtcagcttgagcagggctgggacaactgtgtgcagtgctcttctttcctcacagccagctgacaaatctgcaaactcttgcttagggggttaccatcacctctgtgatatagatctcagccggcaatgctcagcttaccttagattttaaaagtgcacattagtacttaagcaagctgattagaatgagttataattgtaactgcccaaggtctgctgggcatcccagacccatgtccaagttctgttggctgggatccctggggctgggatgcccaacagaccttggttcaaaccttgctcttacacagctcttacacagcatggggctggatgcccaaaagaccttgattcaaaccttggctccagtacactgtgaccttggtttccatttctgtaaaatgggactaaggtgaagggattaaatgagactatctgtgccacatgcttggtacacagt

SEQ ID NO: 58775 - DNA, 689 bp, Homo sapiens
atcctgctgtgtcctttgtcaggcctctagtacaccccagctctgggtagaaagagaatttgtggcccctctgagactgaaacccaggcacagaccaacccaaaatgtttgccatcgagtaagcccaacctaaatggcagtgggggggccagggggagttgtggaaactgccatgtgaccttgaatggttcacctccccactctggacctcaagcagttgtgttacatgattatgacattccaacttacagtctgcactgatggaccagggctggcagatctggatgaggaggatggacgggccgcttagggaaaacaaaaaacggagtagactggcagctgggcagtgattcaggcagggagccacaggagagaaggcactggctccaccagctggtgctataacacagagtgaggctcatgagtccaacccccatcctcccttacacaactctggatagtagtgtttggcaattttcctctctcttcaaaactggccttaatatttgctttaaagtaaagtcaaaatgtctgaagtgaatctagagaaggaaagacagcaaaaacagttattttgtcccaacctcttgcactgtttaaaggcagacttgcaagattagaaaaaattaaggctgggcatggtggctcacgcctgtaatcctagcattctgggaggctgaggtgggtag

SEQ ID NO: 58776 - DNA, 4520 bp, Homo sapiens
ccaggagtttgagaccaccctgggcaatatagtgagaccctatccctacaaaaaatttaaaaattagccagttgtggtgacatgcacctgcggtcctagctactcaggaggctaaagtgggaggaacacttgagaccgggtatttgggcttacagtgagctatgaatgggccactgcacttcaggctgggtgacagagacctgtctcaataaattagtaaagataaaaatactgatgcataggtcccacccacaataaataatgacttggaatgtgacccaggcatcagtatttttctaagctccccaggtgattcaatatgcagtcaaggttaagaaacgtgatcccttccaccctcaagttctaaacttcagggactactattccctgaacatgtggcccaggtttctctcttgcagtgttgtctgtccagagtggagaaccatgctctgtgcaagtagtgacactccacagtaacctacactgtgcatagttttcccttagctgacaaacctttccctaaactgcgctgttctgttcgcccttcagccacccccacctccctaccactttgctgcctgcccttctaacctggaacttctctgcttcagttccttggcagcctcccaagctaagccagcttggacacagtgcttggggcttcctcttgttccaaggaggtcagaaccttttgtgcttcaccagcctcctccctgaagctcttcccccaatccccctcctgtgtctcaacctcccccaaccccgccgccgccctctcacccccatattttgctgctgctggtgtaggtgggacggaagacgtgggccacaagagatgaagaaagagctgttgctaggaaaggagtgtgggtgaagagaattggtgggcgggagaaataggactccccagttatatgcctccctttctcatcataaatgcctcaagagctaaaaaccagctgtttaaaatctattatgaaaaataatgaggtctgaccgtgacagcaggggtaagagaatcagactcagaaagagctgaagtgctgatatttggtatttataagtctcctcctagaaaagaaaagcctctgagtgaagtttaaaagagtgaattcttaaggaactatcaaactgtgcccgtgagggacggtatctagaaggtcttggcatatgctacacctctcagaaacaataaactgcaagatgtcttaagaaccaaaatatagttgaggcagaaggatgatctttaaatgagaagtctgcaacactctttcctcctcacctcacactcaggggcatatttctgaaatagatctgccttaatccacggagtctcccatttattggagtcttctctgtatcaggcacattagactcaccatgtctgcttctcacaagttccctgcaataccagtggcataatcgcttctgtttacaggtgaagaaatggagactatgagcagcttaatgccttgctgatggttacagtttaagtggcagagctgggatctgaaaattactccaggcacagtggctcagacctacaatcacagcactttgggaggccaaggtggaaagatcacttgaggccaggagtttaagaccatggcaacatagtgagactctgtctctctctatatattaatttttaaaacacaataaaagaaatactactccagagcctgtctgtgctttttctactaaagcacactcttcctccttcctacttttcttcccaccttcccacccctatcctaacttccattcccctctcctaagcagttttgcagttttaaaaatcaaccttgactgtggtaatagaacctactggggtggaagagagtttcagaagttctggaaaatttttgtgctcacgaactgcaggcagtttctaagctgggcaccagatcttcccctaaaccagaggtggcattctgctcactgtaaataaatagcagactacctttccctctgtcatttcccaacgtacaaacaaaccagtgcattatctatgactgagatttggttattctatagagaaacaggaataaaagaaaatcaataataacgaaaaaaaaataccaggtcacagaggatttttattaccaggtcgaaaaaaaaagctctgcaggggggcgtgcaatgagccaagcattcactggaatgaagtcactggggtgggggaggagggagcacggaggagactggctacctcttgctgttaaggtcactaccctttgacagaggtggcctctgacctcaacagccctacaattctgttttgactgaccctgaaacccatgaaattcagatgtaggcactgcccaaaagttgagataaagctgactaatatgggaaaagctcccggtatgtgcccccagctgaaaggagctggcagttctttggcggtagacgcaatttattctgtcctcctcctttcagggaaatgctaatccttcataggcaactcaaggggaagactaaaatgtgttgatgatgaatgacaataatcctttgtccaccgccacctcctcctagggttgaaccttaagagtttaatcaaatgttggtaagtaaattaatgccttactgcaaaaggaggtggtgggaagaaaggttgtgagaatatatttcctctgacatgtgaatctcaataaacttaattgcaaaggcattgatatgggaagggggtgctgaaagagtgttttagattcctatttacacacacatacacataacagtcactacccgaaaactgtcttacagcatgtcagtgttaaaatgttaactttgaagtctaaagaccaaagcagcacaatggaatcactttgctgttgttaaaaacaacagcagcaacaacaaaactcatgcatttgtgcatccataggaacagcaagatgtttagccctgaatcttcacatctttctaaggaaggttgcatttttcattccagttcagctaacattttagtggctactccatgccaggtccgccttgctggccactttgacagccatctcttttaacccttccaactgactgcaaagtaggtataattatgctcattacagttgagaaaaatcggtgctcaaagacggcaagtgatttatccctgtacacccagagttaaaattcaaactagagtctttcagcttcgggttttcctgttagatacaaaaaattggttgccagaagggtttcaaggaatttgacaaatgatcagcttctgagactcacacagtgagtcagggctaaaaaccaggttttccgattctcagtccgggttctttcaccacattacaacattgccacccaaagcgctgggttttcccaagaggtgtttggatgggattccaagtcagcgagatgcaaataggtctgacccacattcctgctcttgggtaaataaaaactcctaaagggcagagcccattttgtgtgcttaatctaagagtcccactgtgggtagtcaatcaatattaaacaactagagggacatctgcctaggactaacggcatggactcaatttaagcaatcagaatacagtgaatattactgaggaacctcataaaggtgctgaaaggctgaatcaagtaaatttttaagagttggaaaaaaaacctttgaagtcatctagtccgactctaattttatgagatagagataaaataatgtgcataaagatctgaagacagtcagcaacagactctcccttcctgtctcccaattctatttaattttatgtcctacagcattgtaaggtaacgttttcaggaatgcaacatgttgtaagtcgaagttggactggctggttacagagtcgtcattgattatgaaacatctctcatacttaacttttcctttcccactgaccaaactgacctctaagaaatcgccattgctggctttcaagttcaaccaagttggtgtcatttctcaacaagagtctcattaattttggcctcctgaccttttcttacagcatttccccgttttggagccctctatgctctctccaccatccctctttacagatcacctccttcaagaaggctactctgactactatccttcccattaatgtttatcttgctttgatttacacagtactatgttcaatttgttttttcctatcagtaaaaaagattactttattgtttggttgtttcttatatccccaaaggatataagaaaaatttaaaaaatttttatggtatctaagacaatgctgtgctccagtgagcactacatatgtgttaaaagatcaaactatgttaagtaactttgctatcaaagggagactgcattctttttttttcttttccgagacagagtctcgttctgtcaccttggctgaagagcaatggcacaatcttggctcactgcgacttctgccttccaggttcaagagattctcctgcctcagcctcccaagtagctggggttacaggcatgcaccaccacgcccagctaatttttgtatttttagtagagatggggattcaccatgttggccagg

SEQ ID NO: 58777 - DNA, 1980 bp, Homo sapiens
cggctcactgcaacctccgcctcccaggttcaagctattctcctgcctcagcctcccaagtagctgggatataggcatgcaccaccaaactcagctaattttgtattttttttagtagagatggggtttctccatgttggtcaggctggtcttgaacttctgacctcaggtgatccacccgccttggccttctaaagtgctgggattacaggcatgagccaccgtgcccggccaaaaaaataactttcatattgtcaggttatttctcaaagactaatgagttacatgcacatgagtttgggggtctatcaaaaaaccagttcagtggtagatactctatcaaaatattgatccagtggttctcaatactagctgcttattcaaatcaactgagaagcttttaaaactaccagtatccagatttcaccacagatcaactgaatcagaatctttggaggtatgcccaaggaatgatttgcatatatcatattgatatttgatttgcacatattgattttcacatccccactcttcataataggtttttctaaagaattagcatatttaaaggtggttttgtttttccgagaatcacaaaattttagaactgaaaaatttagaactgaaataatatctggatcaatcccttagtttaacagctaaggacactgtgggacaatccagctattatttcagttctaaatttctaaacctcaagaaaggctgagtgagtggcctcacatagtgaggtggtggttgctgagtgacaagtcatatcttgaattagtggaattctctgaactccagttctggagctgtagccaatagaccaaactgccaaggctttaaattctgctttcttctaaagaaaatgtattcaaaatattataacagttgaattttaaaagctgttagcaccaggtactcattaaagaccttcagtttggcacattccaactagcccattgtcatggcaagaggaaatgccacagcaggatatatcaaagtccaaaataaatgactagtatctatttgcaggctttttcattggccctaacctgaaagtccataatattttatgttatcagagcccagggtgcttctagcccttaactataccacttattagcaaacttccttgcttatgagccagctaatcaatactctgaacttcccttttctctgtaaaaaagaaaatagtgcctcttattgatcttgcaatttcagctatagtaaggattaaatcaaataatctatgtggagatattttaagaatttaaaatctctatccatagatatatataggattactatattactgtttgtaagagcaacgacttgtgaaaaaatatttgttgctttgattaccaaggctctaaatattaattccttgctatcatgccactcaagcatcaccaggaagtgaagtcagaacaggactagagtctctagtccctgaaagtatcccgtaactaatattcaaggaggtaaagtgatgtagtgacctaggactcagctagtctaggctccattcccagagtctgctattgaccttggacaagccacttaatttttctggaaccagagtctcgtcagtggtcaaaagatgacttgaattagagtcaaagatccctttgagttacaaaatcagaatatgaacatttaattaaaattactaaagtacaacttcccaagtcattaattcatctcgttttacattttttaaatctctttttagaagtacagagttggagactaaaaacatagcctatttctggcaaacagacatttcaaagacatgtgtctgaaatgtcagagaccttctaaaagaattctaaagagaaacatctctacggaaataagatactttgtgctcgtttaatatcgtctctgggagacccttgctccaaaaataaatatatggatacccccaaagcacttaattctgtactggacacagagcaggcacccaaatacttt

SEQ ID NO: 58778 - DNA, 2860 bp, Homo sapiens
atccattgagattagaagtattaaaaagttctgtaaactgttaaaaacaattgcaagatgttactattagcttagaaaattagctaactattccatgaccttactaaaatgtgctttttggagagatggattaaaatctttctgacttaatttattacagagcacctaccccaatgcctgactcaaatatgctcaataaatgtttgctgcatggaaagtataatatacagaaagaccaaaagctccataaactcaggtcccatgttcgttcttatttccgaattcccagtatctagcagaatatctaccacagcatagaagaaattcaatcattagataaataaacttttgccccctctagttcctcttcagcacagctcaagagggagagactggtaggggagacatcaaggatgattatgggtaaaggctgcttggaatggaaaacttgaaattacttggagaattcatccactttccatcaaaaaaaagcttgggagagcagaaagagcacaggctctgagttcaaattcagtttccaaaaatctgcaattttgataaattaaccaactaacctctccaagactcagtttcctcatcttaaaatgagaataactcatatgggtgctcactagaatggaagctccatgaaggcagggactttactttgggcccactgtatccacactgcatttaacagcacctgggcacagcacaggctctcaaatatttgttgaatgaatgtgtatgaaattgattgagctaacacaggtgaagtattaacagagtgcctgacacgtaattaccaccggggcaatgggaatctttgtcatcaccaccaccgctactgtatcggtattattacagttcccggaggtcgtagagcggccgcttcggggggaaaggcctggtttcaaacctcgactttcccattctctggccgtgtgacttaggataaattactgaaactattcgggttcctttttatttccacaaaaatttgtgttgggagaattagaggatatagggaaattacctaagagagtctggagccccggtggcacgagatgcatgctagagattagtattaaggcagaaaatcgccgagtcctcttttatccagataactgccttcaattatttcccacattactgtagctgagtacataacaagaacgcaaataagggtggaaggaattcccgagaccgaaaccgctaaatgagaaaagggaattaaaccgtgcttgacagttcccaccaagggatggcagtttccgcgaccgtcggccagtccagccagcccagccagccgagactgaagcaggacagtcagcgacataacgaacaaaaccgaagcagacgcttagaccctccctctaacggtctccccgccgctggcctcaggcggccgccagactcccgtttccggccctcgcggtaccacagttcccagcatgcccttggcgggaattctttccggctggatgactaccaatcccagcatgccattcggcacgccagtaaattagatggaagagcgggatagccccattgcatgcagggaattgcagtccatttagcggctggttcatagatgggcggggaagagccgggttgctctagtcctttgagaatgattcatagaggagggtcaggaaagaagaacggttcagtctgtgaaagcccccttaaaagactggacagttctccgagggagggagaggcaggagagcaagcagggccttgggcctgactccgcctcggtccgctagccaggcctcgaccgagtcctgggccttgtcaggggcggccgtgaggcgccggttgctgggggagcggtgacgtcgcggggtgaaagttgaggggcggtgacgtcgggccggcccgggcggaggctggcgggttggaggcaggacggagggagggaaagagggaaggaaggaagctgggaaggagcgagcgggggcgcgaggcgtttacctggaggcagcggcttgggcgcgcagagcggccgcggctcccccgcacctgcggccatggatgaggagcgcgccctctacatcgtccgggccggcgaagcaggggctatcgagcgggtcctgagggattacagcgacaaggtaaagagtcctggccccgggcgtgcggtatcgcacccccgggccgccctccgtgcttgcacatcgcatccttccccacccccctcattccggggatgcgcattgctctcccccgaaaacgtttccggcttgggcatgcgtgtttgtgcccccagccttttccatccatgcatcctgcatcccactacccccactgtagcgcccactcctctgattcctggcccagcagcttgacctccggtcctcctctcaagcgtgcaagtcacacccccggaatccgtagatgtgcatctgtgccccgtgccccactcctggatgcataaatgcatgagaggcttcctcacctgtatagcataaaaatacgtgcttccctgcataaacacggcccttgacatgcatcaaatgtatcagcaacgatggcagtttctatacgtttagcactgtacggttttcaaggcattgatgtctcatctatggtctcctttgatcctcagagtgtttatagggtagatggtatcatcctccccattttatagatgaggaaaccgaggtgcaaagagctgaaatcacgcccaaggtcatggacatataatgttgtaagtgggtggagaatgtaactcctaatgatacctgttatttgtatcgcattaacagctttcctatccattatcttatttaatcttacagcaatcctgtgaggtattatctgcattttgcaattgagactctagattggttaa

SEQ ID NO: 58779 - DNA, 754 bp, Homo sapiens
ttgaccagcaagatttattaacagctatggatctacgtgtgccatatcatgttcttcagtgtaatttcatgtttttgtccagcgattcacagaggactagattttagattgcctttcctctcccacaactgacaaggctttaatcagggcattaaggagttctaaataggtcttgcttttgaatctgcatatcaggagggggctgggagcatgagcgggaggatgtcatgtctcagtgattaatgatctctaggaagctgaaaaggggagtgtaatatacacagtatttctaccccctggagtaggaatgcaaacactattgtgcagatctgtgcatagtcactgacttcctggtagctggagaatttcatacactcttctaccacaaataaaactgtcagagaagtgacagagctcaaaaagctggccttccttacttaaaaagaatagctcaaacacagtgagccagaaaaattaattttgtagttgtttggaaaccaagttgttaaataagaaataagaaaatgggaacttttcttgaaaagcctaaaacctccaaatatttgttgaatcaaactctacatttggtttcttaaatttactgaattcctggaaactgcttactttaaacgaatttaaaggggaaacattcctttgtaatgaaatgacccatctgaaacttttcaatctggtctctggtaggttcagagcatcatacggtcagtgtatttaagagcctattgcctgatgttta

SEQ ID NO: 58780 - DNA, 2360 bp, Homo sapiens
acgggtgaggagagctgctgccccggcggggaccacgtggaggggcctggtcagcaagtggcaaggacgcggcgcaaagccaggctttctaatgtacaatccgcggctctttcgatactgaacacccacctcttcaacaaattcgagcgcctggcaggccctgcaccaagcctagggtgatggcgacccaggcgggtttttactctcaaggagctcaattctagggcagggagaagtaaaattaaaaaaaaaaaaatcataacaaactgaaaaacacataaataagccacgtctctcctcacccctagcacttaatcacaaaggcctgtagagagtcccgacgagaacttctgagcaggccccgctgtcagtccctgaggacagcatgcaagggaggttgacgtccctggacgaagaaagtgctggagaaactggcgaccgtcccaccttccctaaggcgaaggctctgaattccgaagaccgttactcggcgcggaacgcgggcaccgccgacgtcaaaacaccgggcctgggggccgcggcctacgcgtctcccgggcttcgcgcccctcgcccgatttgattggatggtggcgggaagaaggcggggagacccccggaggaggggcgcgcaggccggccgggggttcccacggaggcgtccagggggcgaaggggcgggagcgggcctcggagcgtcgcgcgtgcgcaattgggacacagccggctggggactgctgggagggccggaccctgcgagaacgggtgggcgtgtgcccggtgggcgcgggaggggcccgggctgcacgagcgcgcgtgcgcgtcggaactggagccgcgggaggaggcgggagctgaggaggcggcggagggggcgggtcgcgtcgggcgccacgtccgcagccagaggcctccgcctccaccaccgccgccacagtcttccagctccacatcctgagaggacgcctctggagccgcgactgcccggggttgtgccggccgccgctgccgcccaggccgcctcagctctcctctgcgccggcccgctcactccgcccggccccagccctagcgctggccgcgaccccggcggtgagtgagtcgggatgcgagggcaggggcgcagtcccggcttcctgccctcctccgtcgccctctgccgtcggcgcccctgcccctcacctcccagtgcccggcctggctgcccagcggggccttggcgaggccccagcgggaaagggggaggggcgggacgaagttgggggcggatggaggttcgcttctggggctactcctccttatacgtcgctgactgccccgccgcgattggagcttgcgcacccctggaaagcctccgcctgacttcttagcatctgggggttcggggttgggggcggaggaggaaggtgaggggcatcagcagcctgggagagggatgcagcggaggggcttgggtaccgggcttcctcgccctgccaactcctgacctgttgctaaacctcccttttgggttcaggcacacaagactttttcccagtggacacccccatagctcttcctgggtaggaaggctgtatctccacgcctaacctaaagtaaaagtgggaatggagagggtgctggccgcgcccaggggtgacagggagggctggagcacccatccgtgccgtcactgcctcccagtctaaataaaaactgcctgctctgcacacgcagcttcaagaccgaccccccagctcccacttccaatcagatcgcctgtcctaaacccttcttacatagaaattctggagcccttcgggagtggggggagtgctgggtgtacaacgtggagcggagggaggaggtgccaagctcagtgctagccacggcgcctccagggtcattttctgcctcctgccacgtcactcactgctaaagaaaaaaaaaagatttgctagtgcctaaagggatcagtagggagagaaggggccacccggaagggtttagaaacacctagagaaaagggaagggttcttaatttgatttttgcgtccttgtgaacactgtgctaattccaaatgaaaatatttgctatatgtgattatttgctgtatgctattgtttagcctttgaaacttctgctggtgtgagtgccctcaggggttccccaggaatatcgatacaacaccaacaggtaaacgcgcgcgcccgtgtgtgtgtgtgtgtgtgtgtgtgtgtgtgtgtgtgtgtgtgtgtatgtgtgtgcgcgctcgcgcccatgcttaactttttaaaaagaaagggagaagtagcctttgataaacccatatgcatcctgttttgctttttccactttcatttctttagtctttgttaga

SEQ ID NO: 58781 - DNA, 1063 bp, Homo sapiens
acacttcagagtgaaagagcaagagcgcccctgatactttgtcaggacaagaagcataaactgaaaactccaagcgtttcctatcacacttcaaatgagattctgctccttagatggacctgtgctgcctctttcctcttgtgccactctcccaatcactcaaccctgctccaactgtactggctgctattcttcttgaacaaaccttcctgcatgaccttgggtaagtgacttaccctgagtctcctcatccatagaagagtgaacaatggtactttagaatcgtaaagcacttatatacagagctccctataggaagtgaacagatttggatagtaagggttacttgcatttgctgaaggagtgaagagtgaggatactgcctgcattttccataattttttcattatacttaagccatgtacaaatagtgcacagatgttgtcagtcaattgtttggctgtgcatttgttacaaagttcagacttcacagctgaaagtgagtcagttctttatctgggtatgtttatcttggaacaaggttcagaaatggaaacttgaaacaccacccctaaaattagtactaaccatcacccactttcccttacaggcagacctggatcttcagaaagttttctaaaaagctccatttatttcaaatgtatataaattagataattttgaattagaacactttatagagaggttttcataaatgtccccgaatttgttgttagtacttattccttttggcctgtcaggtaggggtgacttctcttatgccaattcataagtaatccttccagttcacaaggtttaaacagaagtcagagcccagttaataaacccagactctgccatttggcagctgagtggcctctcagcttcagtttcctcatgtgtaaaatgaggaaagtaatgaatgcacatggtgttttataagagttataataatggtcaattctaagcaaactgaccacacaagtaggctccaactcttctttttggatgagtaatacttgattctcaaagacagtaatttattccaaacacaagatgaaat

SEQ ID NO: 58782 - DNA, 1334 bp, Homo sapiens
atatgcagaaaactcttcacatatactaaatcattaaatcatcacaacaactcattttaaaatgaggaaacagacgcaggtaaaggaacttgcccaaggttactcagctaaaaaaaaaaacaaaaaacaaaaaaccggcagaatttggactcaaaccccacaggttggctccagagtcctgcctgctcttagccctgtgcccccacatatagcaatgcttttggtaaatgtttgttaaatcacaatgtgggctgttctaggatgcttgtttcttaagcatttttggggagtgaaattcacttctgtaatacacagttatggttagtatggtcttctctacaccaccactggtttcaataaagttcttctttcgtaacacatatgccctgctgccagtttcaaattgaccaacgtttataagcaaggaaaaacgagggtccacggaagatctccaggaccgatcaaaaggccgcacattcactgtggggcctccgcttttccagagaaacccggcaggctgagctgagcgtctggcgaggcgtggggttttgcgggccctgaccgctgcggcgccgctggtgaggaacacgcccaggagcagaggaagggggcgactcacccgtcggcgtcagctccaagcaaggcacagggagtcccgggggccaggccccgtccttccctctctctccggccagcctccccacagtccgcagtccccgaggcctggagccgggatttcggtcctcggtctcaagaagctcccgacagttctcagcagcgccaaccaggccatcagtcccttcgcccatggccaatcagggctcgggagatgaccgccaacccccgcccccccaagacacgcccccgcgtcccaacgcagccagtcagagcgcgggacacaactacgcgtccctccccgcaccacgagggcgagtcggagtgggaatcggctttccaggcagcccagcctgtgctggcgggggcatctggcattttcacaccctttccttcccagcattttaggaagcggagttccagtagctttgacgcttagaaaatataagaaaaaaaagaagtaacagaaaccgctatatctttaagatagagccaatcactgttcccaaaataattcagttaggtaaagaaccaacttacaaaagaaatgtttaaaaaacccccaaagttctttgaaacacatctgaactcttccccgcccccaccctaccccagcagttagcgactgtctttaaaagccattctcctttctctccctccttgccaccttcacctaaatactccccttttctgataaactgccaagtggtttccattct

SEQ ID NO: 58783 - DNA, 2993 bp, Homo sapiens
gcacgatctcagctcactgcagcctccacctcccaggttcaggcaattcttgcgcctcagcctcccaagcagctgggattacaggagtgtgctaccaccctggctaattatttttgtatttttagtagagatagggtttcaccatgttggccaggctggtcttgaactcctgacctcaggtgatccacctgcctcagcctccccaagtgctgggattacaggcatgagccatcaggcctggccctaactacagttttcttaatctatattttggtttctatatttggcaaacaaatctcattatgtgccttgtataatttgttgaaaagattagaaacaggatcaaatgacctagtaggggtgtcttgtgtaactgttgaaaggattaggagcctcataaaatcacctagtagagtctctagcacatggtagatatgtatcaaacagaagttgttattttcccttgagaataattcctgtttttttttttttttttttttaaagaaaacaccccatgcatttctatatgtaaatacttgggcatgacaaaagaaaacgtgaattagttggatgcctacacctgtatacagaattactttgaattcacaacttcatctgaatgtgactttgaactatgatttgaaggaaacctttcccagtagcaaggtcaatgtgactataaatattataaaacaaggtacaacgcaattaagactcaactaatctctaagcatataatttttccttgataatacctctaacagcccaggttcaaagtatcaactcagtgatgtgtgtgatttctctttaatgctgaacgaataatgttacttcaaaactatacaaaatctaatgctcaatcctttacccttaactgggaaaggattagatctgttagagttcagattcagtgtgttccaaagaacacaccaagttcaactttaatgtaatagaaatgcatgtgctctgggacactcaatattgaatgaaatgaatgatttatttttaatatattccactgaaaatacatatgatatcatcttaacaggaacatactttcagaccttctccaatttggcatatatattattttcttgaactacacccatttgatggctccgttattactgctattaactacatacaacaggttgctttttaaataggccaaatgatagtaaaactcactatatcccttcatataattgtactgcctacatagaagcacagtcctcatattatttaattacaatactgaacacaccactttaaattgaagaggcattaggtgacaaaatatatatttcttcactttaaacattttaaggatttttttcctccagagatcactatctattgctgttattttaaaaattatatgcagtaagcttccttataccacttccaaaagatgacttcaacatgaatcaacagaaatattttcctaaagtaggtcattgctatagcaaccagtggacggtttagtatactccgtcacaatgacctacttaccagtctgtgctagaacagctttatataactagaatttctagttctgtctatgaaatagtccaaaaaaggcaatggtaagatacaacataatcctattgctgctgaacacaaggcattaagaacatgtaccatgccagaataaagccatgtggttctgtatgctagtttgtaaaatatatcttacacactcagcaataaaaactacacttacaatatctaaacaggaacaactcattgctgaccccaaagaactgattcaaagaatataaactaaaatcactaaaactacaaggagaataaccttattatccacataaaacaagagttaaatgtagaaaaaactaaagttctgtatacaccatcataaagaaaaaaaatggagattctcagtcattaaccaaagtctattatattttattagagatttaaaaaatataacaatttgtgtgtgtgtaaatttaataaaatttacatatgctcttttttctggtttgttacaaatttttagtgctttcatctaacttaattttacctaaattgtctggatatttgtgatacacactttccctgaagataagagtttaatgttcaataaagatgaaatatatattttaaaagcaaactttgcatttgccacactctaaaagccataaaccagtagacctatatcactttttataactaatattttgcaatgccctcttttaaatcctgaaataaaagacctagataatataacatttccatacacacaattttaaagcattaatatcatgctctaattgaaacatataggagaaattaaaggaaagtcattaatattttaaaaagaagtaacatgtacttctagaggtaaatatgtgggcatgatataaggagacaatgaattaaaactcagtgtccacacctacatacagaatcatttaaaatttaacagctacaaaacagactaacacagttgtgttactggcgactcaaacatcatacaccatgagtgatattgcctttggtgatgtgattttctgaaatattgaccaagacaggaaagttcagaaaaaaaagcaaagtacaatctttcctttatttatataggtgataaatacattccagggaaactcagtgtatattaaaattgtgtaaaaaatacctactgtttatacataaagatttaggctctaggttcagacaattatgaataagtttttcacttacattaaacatctggaagaacatttgaaatttatgtgtaactcagaaaaactattttatttacttatttactttagagacagggtctcgttatgttgcccaggctggcctcaaattcctggactcaagtgatcctcccatctcggttcctgaatagtcaggactacgtgcatgcacactatggcacctagagacaactatttattttgagggattactctgagtactgaaagaaatcttccattcttggcttctccttactaattccacta

SEQ ID NO: 58784 - DNA, 3418 bp, Homo sapiens
aaaacccaaatcttgaaaactgcttataaggctctcttcaatctggccctaagtcaactctgacctcatcgtctactatttttccctcacttattctgctccagacatactggattcttctgctgttccttccaaaggtcaagcatatttctgccttttcccttactcttccctttgcctggaatggtcttcccttagatatctgcatcccaccacctccttcaggtctgctcaagtgtcaccttctctgtgacttttcccccgatcatacttaaaattgcaaccccatccctacccttgtattctttatccctttactctgctctatttttttccacaatacttatcaccacctaaaatactacatattttactttctgcttgaagacatgactttctgtctttcactcactgctatatccctagcatttaaatcagtgcctggcacatgctaagtgatcaagagtctatctgttgagctatgcttttatttccaccagggggcctaacaatcatgtagcctggtgtttcaggaaaagatcataaagcatctctaagatttctttcagtgctctgatccctagaaggactacaacttgcctagaaagaaaaactgtgctttgtctcggcaaccacaaggaggagttgagaaaaagaaccgagcagagaaaccagataatgctgtttcccttgcttttcccacagtaacctcaaggtggaagaacactggatctggagcctgctgtactgaatgaatgatttttctccatactatgagttacctagacacaaacgtaaacaggaaacatcacaatccttccgaatgccacaaaaaggccaagggaatccatatacaatggccactaaggacaggaaaggtgtttctttaactccagcactaagaattctccacaaattcaggggaggagctccagttagcacagaaagacacataactcactgatgaagaccgagtgtttcaggtcgtcagtactctttggccagagaagtattaagtcaattctatttaatacttagggcacctaaaattcgtaagcggtataagcaagacagtcccacgtctaaattcacagatttggcggatcgcatggaattcattaacatcagactcattaaacacccaaatccatttcccacgggcttgtgactcaccgccacctgttgatgcccacattggaggagccggcgaaccaggggtccaggatgtagacgcagcggatggtgtcggcgccctgaatgcactccttcagggcggggttgtcgtggagccggagcccctttcggaaccagtgcacggcgttcacccccatgccggggggcgcggcgggtcctccacggagaaattcaaggaaggaggctccggctcatagccgacaccttcgcttccaagagaattgcctcacccggggcgtgaggaaagggcggcagagggggaacaggaaaaaatgactccgaggaggggaccggagaaggcgggggcgccggaggcgcagtggaaagatgaatggaggttgcctagtcggcggagtccgggtgtgacgccctttaggagcccgcgcccgccgcaaccgcctggaggcgacgcataacttcgagggcctcggacctccggagcctgagcaagttccaggagctcgagccgccacgacggcccgagccggcacggacggccccaggagattcgtcacggaaacctcgccccaccaaggcggcccctaaagacaaaacggcccgcccgaggtgagtcaccgaggagaaccggaggggaatgagcccctgtcggcgacgctgtctctcggcccgggagaaaggaccgggaacggaggctagaggcggtggtcgaggccgctggacggttgccggccggtgaccggtcccgaggctgcccgggtgactctgccgccgccgccgcgtcagcggcctcggccccgcccccggctcctcattggagggcgcgctcccctcgtgaccaccggcacctcacgtttctgaagtgtgtttactacactggctcggaggggtaatctgctcgcgcttcggtcgcttttggaggagcggcagccgcttgatcccaaacttgttgaccctcgtccacacgctgaactcactgcctctgcccctttcctgtgccgactggtggccgtcccttggaagcaaatcgcgttgaccacaggccccttgtgagggaaggcttagccccgcccccaagggccatgagcggccaccattggccgaggctcgctgagacccggatgagcacggggatgcggggagcttgcgggcgcgcgcgctgctccgttaggcgcgcgtgcgctctcgctgcgttccagagggtaagggggcggggccggcgggcaggagcgcgctcggcgattcctcccgtgggatttggggagggcctggaaattgtccggtttccttcaggagccagtggtggagtcgggcggagagtgaggggaggatggagtggaaggaggagagtgggaggctccacgtacatttcaagtccaaaccatgtgcttcaatcctgctttggccagagaaccctactttggagattgtggagctgtgcccctccactctcctggcccttgggtgcctcctcccccttgtacatactctggggaaaagggtaattggcaggacggatgccaggcattcctggacttcctggaatttttttaatactagcgatatatatcatcaacctttcacccctcgtctcttacatttaatgtagtttaccggtctctttgaaactggacgtttgtctacttttccagcgacagtgaactgcaggccatggcatcccttagatatatgatgcccttaaattcattcaatgattactttttgaatgaactaggcactgttcaaagcactagagatacaggagatacttaataaaacagactaaaaccccacccctcctggggtttacaatttgtctcttaacctttgctgttttttcctctataaaatactcttctttggaatccagtactcaatattaccacctttgagctacctaggatatttctacgcatccctttagactcagatgaaataataactaatttctgaaagtattcctgatccctagggcaaatttaggacctccctgggttctccaagtatgtttctgttacatcacttttcacactaccgtgaaaattagttgaaaagtgcccattcctagcaataccaactcagtaatagtacttattatcataataatgtgcctctgattccctctgaagtgtgatttctcaaggactgggtctgtattcagttttcttttgtttttattttttgcatcaacaccagaacagagcctgacataggcaaatgcttatttaatgaatgaatgagtgagtgagtgagtgctgttggccac

SEQ ID NO: 58785 - DNA, 574 bp, Homo sapiens
ctgtttgatttactgtgtggtttctgtgtctgattggacactgattgatatagtccatgaactgacctagtccaccagaatgtacttgtgaacagttctcttgttcttaccctttttcttgaccaggtacttttagaaagtgtaaatagttacaaatgtggcaatatgatattgtgaaatattagccaatgttttttccccacagatctttttctgtcctgtgaccatccccatgcaggtcattggatgggagtcttttcacctcagaggggcagaactagaggacaaaggtagtccagcatttttttgttctaaattcaagagccttggtccggatgtaaatcagaaaagatttgctgcttcccactccttctcataacactgtataaaaatcctccaggctggggtggaatatgagggcaaggaaaataagattaaaattatctatcttaactaaagtaagaacaaaatatctcatctgcctttatctaggattagctccagatgtctagataagtttagggtgatctgagggtagaggagatttgtgccagcttcccatctgaaatctgga

SEQ ID NO: 58786 - DNA, 2765 bp, Homo sapiens
gccaatccgatgccacaatgtgtttgactgctagtgtcagagaccaaactaacagtggcttaaacaaggtagggagttggttttctcttttacaacagtccaaggcaggtaggcagtccaaagctgggatggttattatattagtccattttcacaccactataaagaaatgcctgagactgagacatatataaaggaaagaggtttaattgacttatagttctgcatggctcgggaggcctcaggaacttatagtcatggcagaagacgaaggggaagcaggcaccgtcttcacaggcagcaggaaggagagagaagtgtgagcgcaggaaaaagtgccacttttaaaaccatcagattttgtgagaattcactcactatcatgagaacagcatgggggacaccacccccatgatccaatcacctcccaacaggtgcctcccttgactcctggggattacaatttggattacaattcaagagagatttgggtggggacagagagctaaaccttatctgtagttctgcatcaactcaggctccttctgtctttctgccctgccagccttaacacatggattccagtctcaaggtagcctcatggtcccaatatggctgctacagcttcagtcatcacatgtgcattttaagcagaatgaagagtgacaaagggtaggaaaaagggtacctaccagtggagtcagtctttcttttaagcagcgtcactggatgtccacctaataattcttcttatatctctttggccagcacttagtcccccagcacccatatccccaagggaggctaagaagtttagttctttacccaaacagtgttcccaccactaccacccaatcatgttagtgaagaagagggagagaagggaaattggttgggttgccaaccaatagtacttatcgtagctagttaatgacctattgtgtttcaggcagagtaagtgcctgtcagagaaggcagtggatatttccagccccagctttgcagttttctgccagtgaatcccaggacatcagaggtcaggtttctctaagacctcatccccagtcaagtgtttgttgaatgattcaccttgagtccctcaaatcactgaactacaattgacctcgtggagggatgatggctgacacctttgtcatggccagctcatcacctcccactgaggaatgttcttggcattttccagatcacattaagatttgttaaagcagaggtagagccagaacagcctctgtattaaattcattgtccctagtgcatgataataaacataatcttgagtccatgcaactttgagctttaacacagacttaatttaatatttctgtaggttttaatatagtgccttgattaataagagtgaattctgatttttaaaaatgattgatttgcttttaaaatcaccctggtgggtaaaagggctctaaaagaaattagccttggattagaaagcactcaacctcataactttatggccagaccttgtttatttccagtggaagataaccattttccagcctagtccttcatccaggcttgtgagatatggagctggataccacccttgcttttcctgttgctcaggaggttcttcctacctggaaggagagccccttttcacccacctgaaagtgttctcttttcagggtatttagtgcatagagataaacatgaaatataagatcatgggctacctctgggttgaatagatgggcaaaaaaagagtgataaaggcagaagactctttacaaataagtagacaccttgatgggcctgaaaaatggatctccaaggctattcataaggcaagtggatgctccattctctggctttggagctctctatgaagggagagttttataggatttgcccagcaaagagaattggaaggaggtttgttttttctttggataaaatgggtgtggtatctttggattcttttcagttgcaagtgataaaaaaaaaaatccaacccaaactcacttaagcagaagggggggattattggttcatgtacaagagaagcccagggacagggttggcatcaggggctgcccatgctgactggcttgggccagataggacacccccaaccctggagctggggctagatcagctgctcccagaccacactagagtggaggagggactgaattccccaaaggaaaacaaggaaacctagggagacaaaaaaaaatgcccattctgcaatgtatttttccccaaaatttgaactgactgtgggcaggtgttggcagtagggcttggtgggtggggaggtgggacaaagcctgggatcttaagaggaaacagtgggtagaaggaaatgaatgacgagctagagaagctacttggacgtaaggagatggctgctcttttcgttcaatagttactggattccaaaagttttacaagacattatctcaattaatcttcataatggtctcatgaggtatgaactcattttagccttgttgcaccagtgaggaagcagacccaggaaggtccatggatttgtccaaggtctctttgtcattaagtagcacaatcagggctcacacctggggctgttgagagtggcgtggagcggagcttgtgctcattcccatccagctgccctgcacactggaaggaatctggtagtgaaaacagcatgctcctgattagggattcttttgggggctgctgaaataggtagtcctcaagtccctgttgcttctgagtttgtgatgtgggggaagatggaa

SEQ ID NO: 58787 - DNA, 5028 bp, Homo sapiens
cagttggccacaaaggacatccagatgtgcagtttagtaaagtataatgcagggtggtaaccacaacaatgaaataccagcaagctgaaggaggagcccagagatggaggaacaggcttgccagtgggctggggtggggagaaggtacagaaggcttcaaaagaaagagcaaccaggggttgaaagatgggttttgaaagatgaatagtttgtgcactttagggagagagaattgcaggtgggaaggcgtggtggtggggtcctcatgaaggccttactcagaaagtctccccatacttcactacttttatttatatgtactaatatgtgcatgcgtgtgtgtatatatgatgtgggtatctatgcatatgtatgtatttacatatgtatatagaaatatatatatacacacatatacatatatgtatatactcatatctacacacacacacgcacacacacacacatacatattttaacagagacttccattcagtctttcattcagtaaatgtgtcctgaccacctaatgtatatgccagacagtattctaggtgctgaggatgtggtggtgaagaaaacagaagcagtcagaagagacctgttcacgcctggtgcagtggctcatgcctccaatcccaggccaaggcagaagagcatttgagcccaggagtttgagaccaaactgggcaacatagtgagaccctatctctacaaagaaaattaaaaaattatgccagtgtgatggtgtgcccctgtagtcccagctactcgagaggctgaggtgggaagattgcttgagactgggaggttgaggctgcagtgagccttgattgtgccactgcactccagcctgggtgacagagtgagaccctgtctcataaaaaagagaaatctgttcaaggtcctatgttctgtgacagagaccagcaataaacattgaaatatggaaggcgatttcaggtagtactgagtgataaggtagagcttagtcagggatgctattttagacagggcacctgggaaagcctcccttgggaggtgacacttgagcagcagtgagggggggaccctaggcagagttccaggcaaagggaacagcttgtgagaagaccttgggcatgagcatatttgaactgtcttggcacttagcttccatcttgcactgtggttctctctgtacctgtaaacctgccttgtcacgctgaaggctttctgaggtcacacagctagagttcagtgccctctactcactcatagccaaagaggagggcagctgcaggtggtgactggtcagcttccatgccttgagctctggagaggtagcttctcaggatgagcagcctgttctgtcctgacgcctcagccccagctgttcctggcattgggagatttgttttcacttagggagagcctggcctcatctataacatcattgttctctggaagctggccctttcccaagaggaggaatgtggggcggcatcatcacagtgagcaatttcactaataaggaagtgtgctgggattccagacggggaatgatgactcagagtaaggtgcataacaggttctccagttgctcatcttctgaattcgttcattcatttattcattcattccccagacattgagcatgcagatggaaaggcagaggttcaaattcagctctgccatgtactgtgtaatctcagcaggttatttaacctctctgagtctttgtttcttcagctgtaaaatgggtacaatctctatttttaagagttgtgaggatttgatgagaagttatggagataggattgccagatttagcaaataaagacaggacagcaattaaatttgaatgtcagataaatgaggaattttattttagtatgtcccaagtattgcatgtttatctgatattcaactttaactgtgcatcctatattttaactgcaactctacccagggataaggattaatttaaaaaatgcctttcttggaggagcacaggctaatcaaacactgaagggcaatttgactgatggcagaggcacagacagagtgctgtggaaacatagacatctccatttgagctcctaagaatccagacccatgcttgctgatttctagcaggcttgtcaaataccccggtgactgtgagattgacaatgcgagagcacaaaatgctagcacattaagtaatacagatggttcaagtttgcttttccactgagtaatccaggaggctgaactctgtttccttccctctcaaggcaaaggataacctttgttgtagaggaaacagacagttcattatttctaattttctataagccatttaaaaataaaatgaaactaatttaggggggaaaaatcatattgttccctgactttatggaatgtgcatttctcagataaaatggtaagagttcattattctggctgggcgcagtggctcacacctgtaatcccagcactttgggaggccgaggcgagggatcacgaggtcaggagattgagaccatcctggctaacacggtgaaaccccgtctctactaaaaatacaaaaagaaatgggctgggcgtggtggggggcgccggtagtcccagctactggggagtctgaggcaggagaatggcatgaacccaggaggcggagcttgcagtgggccaagatctgcactccagcctgggcaatagagcgagagtccgtctcaaaaaaaaaaaaaaattattattctgcttccccagagacctaggggtaaatttcccatgtgccacccagggatctaataggaggcacacaattggtgtctctggcttcacactaaaaaatttccaaagcatctctttgggtaaagctccaagcatcaaaatgctggaggagattggggacatttttaaaaaggtgatatcttccagacacattcttgtcttctcttgtaagtgagtggcctggtattgaacatggtctaacagcattactgaagggtctctcttctttcccagagatggcaagggaatattttagatggagagggttgttttaaaaagcctgaaagcctaaagtctatcctggagtcctcttggttgcttttagccacctcgagaaaccaactcccagtgaggtttgagttttccattgtgccatagtgctggatgggaaggagtcagcactaaggtctttgctagtaagattggaaaccggaaaaaaaaaccaagcctggggctgaaagggaggatgaaaggggtcctacaaggttattaaaggcatttattcaattacaggatttgcagcaaattttaattgattagttagtgccaggcactctgccaaggggcttttcataccttttcagggtgttttgatcctcattcctacctcatgcagttggtatccgggtggccattttacatattgtagacccagagggtttgagttatttgctgagggcactggcttatgagtagccccaggtcttctgattgcaaaacgcttgagccttaccattgtgttccactgcactttgccatcagactttctcctgagggagtgtccccattggctacaggtatttctgctccttctgcctgctgtggcggatggaggaatggcctggcttctaatgccctactatgatttgaatgcatcccccaaggttcatgtattggcaacttaatcctcagtgcaccagtgttgagaggtgagacctttaagagataattagaatgcaaggactctgctctcatgaatggattaacgctgttatcttgggagtgggttcctgataaaaggttgagtttggccccttctctctcttgcactgtctctcctgatgttaggatgcagcaagagggccctcaccagatgcagccccttgatcttggacttcccagcctcaagaacaatgagccaaataaatttctgtttgttataaatgacacagtctcagatattctgttatagcaacacaaaacagactaagacacaccctctcccaattaatatctgtttgtgtgtgacctgaggcaaatcatgggacttctctaaggcatcattttcctcagtaaaatgatgagtcaggctgaggtaggaagagtctttaactgatatgaaatcctgtgtgtctaccaatggcatgccattctgtttcattcactcactcctttactaactaattaattaattcacttaataaatacctatgttgtgtcaagtatgtgccccagatattggtgactaagcagacagttctgccctttcagagcttggagtctaggggagagataccccagtcaacaggctgttatgacactgggtgaagagggctgttaggaggcaggtgcagggtgctgtgggtaccttgtctaggactttgtggggtcaggcgaggctctggtgatgggagggacatccaaggtaagagccaaatgatgttcaggagttgtccagacttagagggaacagtttgtgcaaagggagggcacgcatggagcacttggggaattgagcgctgtgccaactgtctggatggaggctagagtgcagtggggagggaatagtctggaggaaaaagaggatgcagaaataaacaggaaccacattgtgcaagacctcagagacctctgggaggaaactgatgtttgttttcagggcagtgggcaggcatcaaagggcagggctgtgctagctgttacccagattgtgtcttgcacaagagtgtccaactaagggggcccttccacataccaagccatgggccccagtgcagagcctggggctacctgtgagagcgtgcctttttctaattcttatcagggagccttaagagctggtgctatccttgatatcaggagaatgatgtgatcatatctgtgtttttcagcctcttctctggctgctgggtttgttggaggaaggagtaggaggggatgtagagtcagggctgtgggcagagaagagatggggggtacctggggaggcagtggggttggagagaatgagtgggtttgagtactgaggatgccactggcctatatgaa

SEQ ID NO: 58788 - DNA, 1185 bp, Homo sapiens
catagcagtatgaaaatggaccaatacaccagccacaaattgagtatcccccacatcccatcctctctcattccttttcttccttcctcaatattaatcattacccactaccagcaaagcctagtgctgggacagttggaaacagagagatgacaaagactgactcagccttgaggagcttacagagccctctagaagaacaagggtcagttggacaagctgccaggaagccttagctttgaatctcggctccactccttgctccatgtccttggatcaggttgatttatctgggctcaagttccttaactgaacgatgggcttatattcaccccaacacctcacagtgttgtgtctggctgcagttcagaaggaaagcagacctgcagccatctatccaccttccagcggaacagattctcaggccccttgcagccctggcattgcgcgatgctgtgattcgtctgtgacccttaaaagacctgcccttaactcccggggtgcagtacagcagtagaggttctcagcaccagcaaacgtgttctgaactgagcgctggtaaacagaaccagtgtttacgaatgggtgtcactggcctgctgctttgcgttttatcaccgaagattatggaagattgggagctcttatttcagagcatgctttatggttttcattactctcctgaatctctgtataatttgctgggattagggacggagtgcctttgtttctttgtttgcattcttttccttccatgtaaaccagtaaaaatcaataaaaagccagcagatgaaagccccgcccacaccagaacttggctgcgtgtcccaacatgactgagttggccccttcttggtcagggaacaggctgagtgaacctgaacctaggtttttgtttctgtgtggtctgaaagaggaccacgccctgtatttacagatggggaaactgacaccaagaattaggaaatgacctgtctaaggctgatttacctagcatctactgaaccccatgccgagtcatttgacaaattattttggggtgcctgctgagtgtaattagcaaggatcagggagtggctttgtttctttgtctgcatttttctttttaaccctgagctgagctgccattctgtcacaatagtctctaaaacagggtacatgcgtgaatgtgcacgaaagggcaag

SEQ ID NO: 58789 - DNA, 1168 bp, Homo sapiens
cttttaataagggacaaagtagtcgaaagctgggttagtgcacgttaactgactttcctctcagttaacatatgttgggaacctactgtttgcttagcacatgcaaaatactttgatacacatgatctcatttcgctctcatacctcactcccatccccagaagtccgatgaggaaaacaaggtcattactatcacccccatttcacagaagaggaaactgaggtccagagagattctatgacctgccgaaagtcaaacacagtgagaagtggcagagctaagactgaagctctggattccagtctccaagtcccatttgctcaggcctccaagtcccagttgctcaatatgtgaagcaacattttaaaacaaagatctgggttgttgacttgctgcaaatagtgcaaatactaagaaagcaatcccgttgagaatatgtgagtcatctgtactattaattagacaaccttctccccaacattcagggcccaggtctcgagtctcctttgctgtgaagtcccctctgaccatcatcccctttccctaactagagggtctccttaccctgaaaattgggtcacatgttggagtgggtcatgattatatggcactttttgcagtgaactctttaaggggtggtaagttcctgaattagtcagagacaccaggaccatcagatgaggaattggcccaagattcattgccgtggcaacagctacttgacttagcctctgacttaatgtcttggcaggtgggcaaaccagaggaagtaaggatgactcagtgtgttcctgcctgagctgaacaggagaatgacatggctgtcaagggagaggcaggaggctgggcttggatggtgagcatttctgggaaggtcttttcttccctgaaagctgagggttcctaaagtacagcactaggtagtgcccaggaaatggtgaatctgtgtcatagcccacagtgttttcagactgcccatgtcgacccattagtggatcatgatgtcacttttgttgctgcagtcagcattttttattactaagatggaagagaagtgaaaaggaaaacaaatgagagtgcctcacatgtagtaagggtcactgttattttccattaatattttaatggaaattatgaagagtgtgtgtgtgcatgtgtgtgtgtgtg

SEQ ID NO: 58790 - DNA, 1096 bp, Homo sapiens
actgaaaaataacaatctgttttcctttcattctctgtctcccttctgactgcaggggtgctgtgcctaccagacagcctgaatcttcacagagacccacagcggtcaaacaagccaggggaactgcccatgttcagccagtcggagctgaggaccatcgagcagtctttgctggccacgcgcgtaggcagcatcgccgaattgagtaagtagatgttggttctccagctctcatgcctcaagacatatcctgtctgtgcccgaagtgacacaatgtcctcatgccaacccctcagggcactattttgtaatcagcggggtgacaccttttattgactgcctgctgtgtacactaaacaatgccagtggcgtggggaaggtaagagctctgaagctggcacatttcctggttccgccataaatgcaggtcaggttcctaagcttttctgaacctcagtttccttttctataaactagagaaaatatcaatgcctacccagagtgtagttgcggtgattcaatgagctcacatccataaaggtgtctacctaaataacaaacagagaaggagattctctaaaacaaaatcatgtttatctgggaataggccttgccgtgagaatgtgcatgccagagtatattctcagagaaatattacgtgtgtattcagggggctaaaggaggacaatggtctttaatggaaaagtgaggaggaggattacaaaattgtttttgagataattatcgttggctacaaggatcaataaatgacaagggtggcaccagtccgagtttggactggcagtcgctggtcacatgtcttcatataagttgtgtgtgtgtgtgtgtgtgtgtgtgtgtgtgtgtgtgtgtataaggttaccatggccttcgtgcaaggctgtgatttttgcagaggtgttctgtgatagttcttgttatcaggcatttgtgcatggaaatcttcccttcatggcctttgctgactctcttcatcagggattttaacacaaatgattccattttaattctgacagctttcacaagagggtttgccaaggtgcctggcacatggtaaatactctataaatggctg

SEQ ID NO: 58791 - DNA, 882 bp, Homo sapiens
accacattacacttcattgtcatatctcttaggctcctctcgatagaggcagtttctcagactttccttgtttggggtgaccttgaaagttttgaggagcactggtcaagcatgtgtaggctgcccctctagtggaatatgcctgatgtttttctcatgattagactggggttatggatttttcagagggaaaccctggagagaaagacaccttatcaagggcacattccatcaaggtgagttatcactattgatgttgacctgagccacctggctgaggcagtgtttgtcgagtttctctactgtaaacttcctctcttcccctttttccataccgtcctctttggaatgcagtgagcatgcactgccctcacctaaaaagtggggagttgcacctccccctgaccattgttacgtatttgaagattgtccatttggaacaagcatggccagcccttatatttacattctcagatgatagagtacacactgaagttagaaagagaggtcaactgtgagttccagcagaggaggggtcttgccttgcctgcttctgtggccccaaaagagtgcctttcacactgcaggacacctcttccatgtttaatcaatacctcctgaatcgagttaaaccaccaccgctgtccgccaaaaaagaaaaactcgcaaaagagtctacagactgtacatgcctctctcaagggcacaagagtccaggaaatgggttcttattgcttcactcggagttgattagaaggaagctgattcaccagcaagatgcacgagacacaccctggtgtagatgagtgagacctcatccctaaccttcataatacagtctgtacaaagcatttttgcagataacaggtcttatctttttta

SEQ ID NO: 58792 - DNA, 2343 bp, Homo sapiens
attgttgcagccatccttgaaaaatattatctgccatatggtctttctaaaatgggttaaaagcaaagaaaccacagaagaatcatcttacagaaacagagcagggggagaagtcttaatggacaaataatctgcctacacaaacaatgagcaatttacttctgggaggatctctcctcaggcagggagattgccaagcgcattaggctgagtagagttggtgacagaactcatagttgtatcagctcctctgtgtgtgatctgagtaggaaagtatttgactactggggactctagcttcatctttaaaacaaagtgttgtgagaaccaagtaaaatactgtatagaaagataaatgtgttgcaaaaaggtccccgaatagagcccacaggtggacaccccccgtttgacaatgccactgggaaagaccatgtgtactgccagtttatccttgccactgtttccccatagcagccaccttcctgtttcttttgcttgcctctctcagaggtagatgcattgagggtaaatgaccaggacagggccacacagccaagagatcaaaacccagatttttctgggatgctagtttgagattttccattctacaaacgtccagccactcacgagttctaacagatgactgatcttagctgagaagcatgacatagatacaagggagtcacactgcccgggttcatatcccagctgcaccgcttactagcagtgtgacctttggaaggatcgctgttttcccaggtgtaaaacggaaataagacctcccacaaaggggtaagtaatcacgtgatacggcactcaaaacagcgccttcaacataagtaagccctttgtgtttgccaagactaaatcactactgcatagttagtatataattggtgctaaatgtttttttctcacttttttttttggtgctaaatgttttaaggtgagaaagtaacatttagggatgtaatgagatgtaatggtgggatctccgtgaaacgacaaattcattttggagaaagctttttaaaaaacgcaaaccacaaacctctgccatttgtcagcttgaagtctacggaactgcaagcaaaataaagattggtgaaactttgcttctgactgacccctacagtcccaaatattttcttggcctttacaaagcccgcaggcatcgtcacatgcagtcctgaaaagccttttctctatacttcacacagcccagaccagcccacgtggattcctcgcccggctgcttccgcttccattttgtcccctcctatttctcattcggcgcctcagaatgacgtctgaaatgagcgccgacgctgcccaaacaggagcctgcgcatgcgctctgccctggcagcggccctgtgcagatccctgagcgtgtggcagcagtgcggtcgtggtccctccctatgcagcctggtttctagcgtgacacgcccttgacttgaggaccatgaaccgcagccgccaggtgacgtgcgtggcctgggtccgctgcggcgtggccaaagagacaccagacaaggtgaggcctggtcgctgggagacaaggggagcagcgtctttacggcactgggggtccgcccagctgggggaacgtggacccggaactcggggcgttggctggtgcgactggctggggtgagggcggctttgcccggattgtcgcgactagagctgcagttcagaaggtctggttcgcctgagcctggagagtcaagggccgcgccttctcactgttcccaccctcaagcccaaccccactcccaaattcgcacgcacatggacttagcgggccggaaaggggtgggctgctgtttttggtgggtaataccccaaaaggctttttgacaacaccactagcttcactagcacccaagtgcattttcaagcataactgggaagagagcatgaaaactccactttccactcttgtgctccgtgtctgaaggagtgaggatgaatgtggtgtagaaaaactggtgtggaggctaagatgtcgtgaggctgggagatgaatagggaatttcttgcagtaatccaagtgagatgttgatggtagcagggaggatgagaggtaaatgtctaacacatgaaaaacctacaagagttggagactgagactgtagcagaggtgacgattacttaagtaatttcctcattggatactaagtgctttctgtaggccaggcattgttcagggtcctgggataggcatgaacaaaatagaaaaagtcccgccgggcgcggtggctcacgcctgtaatcccagcactttgggaggccaaggcgggcggatcacgaggtcaggagatcgagagcatcctg

SEQ ID NO: 58793 - DNA, 2976 bp, Homo sapiens
gccatggatcccataaaactaagctctaagacatcaataaaatgtaaaaggccaacctagtaccttgtatagaacagacattctgaattttcttattttatcggatggagctatgcaaactcatcacccttaccagaaagacagctagaagcacctggcaaatgaggtacaccttatgaagaacagcatgctaataacagtttttattatgctataaaataaagcagcccaggtgtggtgatttacacctgtaatcccacactttgggaggccaaggcagaaggatcgcttgagcccaggacttggagacgtccctaggcaacacagtgagacccctgtctctactaaacattttttttaacttagccaggcatggtggttcgtgcttgtggttccaactacaggggaggctgaagtggggaggtcggggctacagtgagctctgcctgtacctctacacgccagctggggtgacagagtgagactgtgtcttaaaaacaaaaaaagcaaaaaatccctgtagcctaaagaaaacatatctaccttaattttgaaagttgctgggcttgagttggtttaaaacagacttttccctaactctttatagctacaaccataattaaaacactacaatcactacagctgtaacagcctacttaacaaattggttacaatatttttttaaaagtacaactacaagtctgcaccttcaactctcattctgaaaattcctgaatatttatttaatttcaagataaaaatcagcatggtgtttctaggttgactcctaggccttctcaaaccagttcaaaccagagtttaatgcgagaggctcagcagatttctgctttgttgtgagtcactaaaacgtgatgacctcagcagccataaaccaaaggtaatgagtatcccacagagagaaggcagatgaagggaatgtacaatatgatcctcataagactttctcattctaaaatgcagttctattctcattttctttctcctatgagattctaagaagcaatcccggaagaaggcaagaatcaagatactaagctctatcttccctactcatttagggtaaaataatttcctacacagttctacagtttatgtgtgtgtttctaactgacctatgcaaccatctgccagttgctgattttacacctttttcttcgcataaaatataataaactaactgaaatgcagccactttgaaaaatgcagtggggcttcaataatttcaatgaatttgtgccttatcttccttattctaaacatacggcctttgaaagggccttgaaaaaacagccaaatgcaacaatttctgtggcctgcttctgtacttaaacatcagcatgaagcttgcagaattaagaacttaattccctcactatcgtccctgccataccagcaaaactcaaggtgaagcataataagataacaatacacgttggaatccggaaaaatatattaaacgctcaaataactgaaagacacaggaaaaggtgtcaacaagccaacaataaacgtgtggctactgggaacaactttccacatgtggagtaaattaggatgcatgagattacattccacccaacactagtttctggatttgtttcctttgcaaatcacacctgtaaccttctcaatggcaccaaaaacaacggcactgaccctggacactcactcgccagagtttccaacgatgtcaccagtgctgaagcccacctccctactcacctgtgatgcatcggcttggggccaaatatcagagaaaggagcgctcgggtggtggggaacaggcatcagggtttgcgttccagggtcacgtgctaccacatcttgctcacaaccgctgcaccgacgcggccactcgtccccggggtcgcccggggccgcccaacttctcccgagggccggtggccgtgcaccccgccacgggttggggcatctcggggaacacctggggccttccgtccagaagcttcgggaagggggctgcccaacctgggggagtggggacaagagcggtcaccaaaaccacaacaaggtcgcagcccccatcccagctacccgaaagccccaggcgctgccgacaccgccacccaagggctgtggattagcccgcccgcggcccgcaggccgggccgccgcgccccgccccgctccggccgggcccgcgcgcagcccacctgccagctgcgctgggggcgcacgcgcctgccccactgctttgttcctcatccgggcagagttcgcctcggggccctgcccgtccgctcggccccctcaccccgggggccgctgccctaacgtttcccgtcccgcccggcccttcccggcccgcggcctcctctgggccgcaccctctgcggcgcgtttccggatcctcagccactctcagcgcccgccgctccgcccctcgtgcgtgcgccctccccgccgcggcccgcaagcggcgcccgcgcaccgcgtcgcccttctcccagcccaggcccctccgcgcgtgcgcacggcagaggcactggccgcgagaggctcggccgggagttccgcgtctccatccggccgggtagaatcgagcgccgagcgatcggcccatggttgctaggcgaccagggctgctgttcctgcagggattgagttttgaatcccctaaatcccgcagactcaggatttcgtcttcatgacattcccctactagagaagcatgggtccacacaaagcccccaaaattcgaagtatgggatttggccccgagggttgcctctgctgcccaggaggaattgggattctatcctgaatattttcggccgtctgctacacctgaaggctgcccagtttccctgcttcccgtcgtaaatgctggggtttgggattttaaacaaaatttccttccccttttctctgccctcagttctctactgcgcgccaggcactgtgcctaacgctaggagtaccgagatggcttta

SEQ ID NO: 58794 - DNA, 1738 bp, Homo sapiens
gccccaaatccgcacgcccatcgggtttccagcacctgctcctcctgcctgtggcctaggccccgcccctcccgctgcttattggctgctacgtgaacgagacaaacgcaagcaacaaccaatgggagtggcccacggcgcgtctttcccggggaagccgacgcggacgcgggaacccggaaatgcgagggaaggacaagtggggaaagccaatccgccgcgacgagggctgcgggcggttcaatggcaagtcgccgggggcggggccagaggccggcggagaaggaggacccgggagccggcggcccggagctgggagcgcggggaaggcggttggggttctgacagctgcgcgcggtgagaaggggaaaagccctaggggctcgagaggatgaagccgggaagggtgcgacggggccgcgagccctgggcggggttcgggaagggaggctctgcagtcttggaggggactcagaccggtcccctcccctctccgggcctcagttctccctttctagggaagtgtgggggagagattcgcgcctcccagaacgcactccttccctgcacacacccctggcaccggcgaactgccccctttcctgtaccgccccgcccaggagcctgtcccctcgggaagcccgcccagacccctggacccgcgcagcactccaggcgcacccctattaaagcgcaccccaagccatttcacatgttctgtggcaatgggccaggatccccatgagactcagaaccccgtgatccatcagtcattcccgggtcaggaccagcccagagcaggtgcacaggccctgcttagtaataaggtagaaatcgagacctggggaccgggttcagaggccctggggtttccttccggatgcctctgtttacctcctgtgggccttctggaatttaacttatgctctctgtgtcttggtttcccttgtctgtaaaatggagctagcggtagctcttccttcatagggtggcatgagggtgaaacgaggcaatgcgtggccagtacactgctcagcacctaggacaccatagttgcttaataagtgcttattgttagcatagtgtttgcatgcctggccccacctccactcccactgccagccccaagcacatacaagccatgttgtcactgaggccaagcactgtggcccacagcctgagttcctttcgagatgctcgaactgctcatcttcttgatggggtcccttctggacaggccagaaatggaaggccagagaggggaagggcactgtgggagctgtggctgaatatcagggtgagggcaataaatgaggccacccaacaattgtgcttatcaaagattgggcgtcagaactgctgtggctgatctgcctgggtgtctgtcagtcatttatgtcccaaatgtttgacatatgtccacaaatccagtgtttgtggtcagaagccacagggatatatgggaaggggggacactttagagccgtggggttcctgagttcaagtcctaaggctgtcacttgctcccggcgagactttcggcaagggacttcacctctctgaacctcagttccctcacctggagaagggtgaaaacatcagctcaagtcgttgaagattgcaggaggtgacccatgtgaggcatttggtgcttagcacacggcctggattatggcaagtgctcattaattgttggaccacagcagtgttttcacattcatactgcccaggaggtggc

SEQ ID NO: 58795 - DNA, 4259 bp, Homo sapiens
cctccctgccctgtgtccccgagtatagacctcatgcacaggtttcctggctctccagcttccagatgggtctgcccagcaggaggcaccagcagaagtttggtgggaggaagaaagagaggtcagggtatttcttcccccacctcaatccttgacaggaaactggggctgcttcccttgaacaaagttatcagcaggtctcaggtgccctctccacacaattcagatcacacccttcaccccttccggcccaaagatggacaccaggttctggagttaccagctatgggatactaaaccttcactcccgatttccctacccacacctttattgagtttctctcagatcatcctaatttaaatgtgccacctatttcctgctgagatcctggattatacagtagatatcaccacctcataaggttacaagtgagagaccatgttatgactagatgctaggcactgagctatagttactgttacaacaattatattatgcagaaattgttgctcccaatctgcagataaggaagtcgagagggtgagagaaattaagaaattcttacaagcacatacaagagttgaacagctagaactgaggccttaacctccagaaccagaaacctttccatttctattatcaccatcgcggtcaatatttttcttaccacaagtttcatcatcgccgtcattcctacataacaaaataacactctcttgcgaatgagtttatttctactgttggacgtgtggttaagagtgggagttctggaatgggatcaaagtacaaggcctgacttgcaggaagtgttatcttgagcaagaaactttcctccacgagcctcagtttcctccagtaaaatggggatagataacagggcttccttcacagggtcgtggcgaggattcaatgagataacgtttgcaaggcaatgggcaggcagtaagcactcaaatccgacaggagctactgtcacgaaaagcgggtttgcagccttggcggctttatcgccgccgaggactagggaggcgggccaggacatggggacccgaggacctgaaagactggaagatgcccgctgcccacccccgggcccacctgctcctccagtctctcaatctccagctggtttttctcctcctcttcgtcatattcccactcgtactccccgggggagctctccgcggaggaagccatggcgtactcatccccatcgctctcgctcacgccttcctcctgctgatcccacgctggccccatggtcttgtatgtcgcagcggccacagcccgcgataacaccttcctccttgtcctagccgccttaacctcatcctcctctccgtcagccttgggcccagccttggactcagcctcgggttctgaagccgaggtttcggccgcagtcgccatcttgcgcttctaatgactctcgggtcttcccgcggccgccgaagacccgctgaggcagaagctgcccgcggcgcgcgccttatcaaaaacccgttttcttgccattgaaagagaaactgggaacttagataacaggaaaatctccacatacactaaattcacattattttataccctgtaaaagctcccaccagatataaaaactcattataatggcatgcgttccgtcacaacttcggacagaagttgggtctttgggcaggaagtggaagccatagaggaagtcatggagcgagagtgatgtctgtagtgaagaatttggcgccatcttgagaaggtcaaagtgattcttcgattaaatgccttacttatcgcctagtgtgacctggcgcttgggtttactctccccagcaactgcgcctcaaacgcaaagaaaactgcaggtcctcggggaaggatcgatttcaccattcaagagaaaaatccatttcccagattcctcccctttatgtaaacgtctggtacctagtagacgttaaatacacgtgagttttccggttttataagatcacatactgcaaaccaacagtaaattacattaatacgcatttctttagaaattcttaattgctaggcactgacatataaattgagtttgctgttgttttagagagaaaaatagacatattcattttttttcaatcaggacatggtattcgtttccttcttaagcttcccatttttgaggtaggaaagtattggtgtgtgtctctatctctaccttgctccctcattagcaggcttaatgggcaggaattatgtctgttttgctttccgttggatccccgggtctagtagagcgccttgacacatagtaggtactcgacacagatgctggcttcatgatgaagcaattgtcctcgaattaatacaaaagggaagattcagactcagcgagccggtaccattcgtctagggacacacagccaggaaggaaccgaaccaggattctaacccaggattacccaagttcgaattctaattgaacataagtccttagcgaccttggacggacttactaaactgccctgaatctcggcttccttagctgcaaaatagggttaggaaaagtggactcggtgctcctctgcgccgcattcccgcagcgggatttgtgaaagcgaacttgagccccacactgcagaagccctgaggtcctgtctcaaccagaatccagcacccaggacaagccctccagcgacttcagaccttcccgctcccgaccccgcccgcccccgagaggcgtggtcaaggcggggccagaaggcggacgcgtgcacggagcggtaaagcgcaggcgcaaagcttcggtgacgtcagagaggcgcgctcccagctcggagccgactcgcagacgcgccccgcccctcggcgtcgctctggactggcgcaggcgcaagccggcaagatggcggcggctggggctttccgtctgaggcgggcggcatcggctctgctgctgcggagcccccgcctgcccgcccgggagctgtcggccccggcccgactctatcacaagaaggtagggacaaaagagggacgcgcggaatgccgactcagcggaggcctgggctggaggggcggccgcggggttctgcgcagctaggactgggagctgtcccctcccacgtctttgccctgactcgctttcccttgctgcgcagtgaggctcactgcaactgataaacaacagttaccgctcatcgggcggcgacttccagggggccccgccgctggccgcgacttcgtgcgtcccaattttaaattcgccaacagcccaggaggcagggtcctgttgggacttgtctttctgagtccagggacagacacacccccggagcgggctccggcttcagccactccgctgccctggccagatgaccttgggctagtcactgcgcctctctgaacctgtttccccaggtgtaaatggggggctctcagctgtcccttacaaaggatactgtgcgtggagtcctggcatggttcctggcacataggccccagcacgaggagaccgtttctgttactgctttaggagtgcataggggagtcaggcttgtaaccaacatgcgtaatgtttttgttttgtttggggggttttttggcggggaaggagggatagattcatagtctgcagccccttgctgtctggtggcacaaagtcccccagacgtgagactcccactcgagaaacaactaaagaatgccataaatcaacgtggcacaaaaggcccctacattagatactatcctgaggtcccttttacttggagtcaaaatccttagtcagatggggggaaaaggggactggaagatcggcgtgcttactactaaccagtaaccaaacctcaaggttattaaggccttctgtgtgccagttcgaatggatgtttattgtgatctggcttctgccctttctccaagggcttcttcactcctccccctcccgggggtgtgttttgttgagggtacaccctgaagaaacttggactagcagcctttcagcagccagggtgcgctgctgcaccagggtgatgacaggctgtgaaatacggtaatggcactgtttttattttaaaagacacataaacgtacacattccatagcattgttccctgtgtaacagtcaccttaaggcttctaagaaagctttccctccctgggccatggttatttttagaatttttaaatagtaatcatcctttgaggatggattttatttgaaaataacaaaactgctgtttgagcccaagtctggtgatgtaggtgggtgaaagtcaagtat

SEQ ID NO: 58796 - DNA, 1101 bp, Homo sapiens
agaacagtgatccaggtggctgatcgcaagccctctaaaggcagagataataaagagctagaacttctttttcatccctttgtctcccaagtgtctttccctggtagctgcagaggtcaaaggtcccaaacacagtgaagagctggactttctaaaatccagttgctgtcaaaacctctcagaaaagccaaccagcaaggcactcatctttgctgccccaagggaccaggttcagggagctgagtcacagaggagcatgcttggaagctggccagctccacagcagagcagtttgccaggccacgtgccacctgcttcctgtggctcacggccttctggctggcaagcccctgtgggccaggaagctcagacctaacctgctgtggcaggaggtagctctgaagtgatttgtcaggaactgtcctcaggtgaagggagaaatgagacaaggcacttttgctcccagaacctggcccttaggggactgtgaattgtgatcagaaaatgggagagaggacatttctttaaccttgagatctcccatctgagtttcaggagcagaacctgaatcaaccaagaagggttagcagaattgggaaactgaatgatagacatagtcaaagagtctggctgttgggaaatctggttttctgtaaggcagtggggcactgttctacatgggcaaggatctgcctgcctcacattatcccccagggctgtcaaccagaccccaggcatcctctttagttgatctggaggagatgctcctataggcaaaggggacaccaaagagagcattcggcctgactcggctgtgccactgccactgtgctacttacctgaaatcttcccaacctctctgatgccattcggcacttctagtcaaaaggatttaggctaacatttggtatgaggacatcggagaagctgatattcacaaaaccagcataggaaatcactaccttttaaggaagagattcctgttacaggccacaagcagatccctaagagacttctcacaggttccactcctgacttagagaagtgtctgggctgtctttgcttacccaagccaggcagtgcagctgtgtatacttcatg

SEQ ID NO: 58797 - DNA, 605 bp, Homo sapiens
aggacttaaccttctagcgactatttacggaggacttactttctgcaaggcatcatgctaagtactttccatgccagtctcattaaatccccacaacacccctgcaagatgatactattattatcccatttcacagatgaaaaaactaaggctcagagttcatttaacatcatgtcaagggcatttttccatattatccttcaaaaacatcattttcaattgctgaatcatgtttgattgatcatacacctggggctgccttattttctttacctcttccaagttgctggaatattccacaaacatttctgagtcacctactctgggctaggatcacactagaggctgagggcaaagatgagtcacaattccttcccacaagcacacagcattttatgcccagggactgtgtgggcgagtgcatgagtgaggggtcgagagaccttgtgcccctaaatgctcagcaatcaggtctctgtccacttctgcccccagggggcggtacagcatgatcaccacaaaagtcctcaaggctaaccatgtttcgaccctaattcacacgacacctcaaacacagaggtttgatcttttgtcgactgtctcta

SEQ ID NO: 58798 - DNA, 845 bp, Homo sapiens
cttctaattcctgaatatacctcccactagttccctgggacaaaatttccaaaggtgagaatcttgggtcttaagaaaacctttaaggcttttgatccacttgccagactgccctctggaaaggctgtccaccccgcacatacccgcttttcgcaggagaggactgccacccctacattctttggcaagggacttctttttaacgaataaaagagcacaaagggcactgtccggcctggacatcaagggttgcccgtctgaagcaggaaaggcgtgcccttgacggtgactcatgtccgtgacccactgccagcactgggatacttaatgtgcccgcagaaagagaagggcccacttagagttaacagattcttaagagccaacaaagagtttttctgggtgtagaataccaagtacagcaagggaagtgaccttgaaaaaaaaaatggaagttccccccagacgaggtctggctggctgtctggggccagcatgctgaccttcaggtcttctggcaaagaatcaaggtggcccgagtgagaaaacaagttagtcataaacagaccaccacgcgtctcctggctgactgcgggcacctcgggtctacagagagccctgccaacttctacttcctgcagccacgagtggaccaagaacatggcagccattcttctcatagactaaagcaactttaagataaggcatttgaggaaggggagctttatgctgaccattcatcatattcagaaaaagcaaacagtgggaaattctttgctacaatcactgaaatgtcacgagacaatgtcatagtgcgaaagggaagccctgcaattcaactgaccctg

SEQ ID NO: 58799 - DNA, 1879 bp, Homo sapiens
ttcaacactagaacacgtgagaaaaagaattttcctttgtgggaactttaaagaaggagacaaacaattgtctgttttcaattgcttagtggaaggcagagatctagactggatgagtgtttagggttcagctcagttctactgtcctgcaaaaaatgagaacaaaaagtttgccattctgaagagtgggaaaaagtcatgagttgagtgatttgttcatttttacagctaaattctgcccaggctaaatataaccccttatgcaaatcataacaaaaataaacctgcattttgagggcccaagcttagaacatcacctaatttccccagagccaaattttaagcaaggcaggtgtgaacaagcatagaaggaaaaggaagacctaccctgccctctccctccctctgcggaagagaccttgacccaggcctctttcccctgcggagaacatgggcatctgctctcctccattactgcatgttagctttcatcctgacatgcactatttttattcaagaatttatgattagtgaaacaactccacattgaacttgactatctgaatataaagcaggactgacattttgaacagaacaaacagaaaacagtgactactaatttgatcaaagcatgaagtcgacagaaaaacaattatgaaatgggacttcagtgactcaacaggaaaagcattttgcaagatgcactgtgaccccacttagaactgacagagtggtaataccaccttcaatctccagatggcaccccaaccatggcctgctgggtttccttgcaaggactgaaaacgcctctgtgtctcactctgagcacagctagtgcattttccaaatcactaatgagacgtggagtgatgggagactttgtttataatcagcatttccaaccttaaaatatgagggcagaagcagagctcataatggggacttaaccttttcctttctctagcttctccccatcatcttttcctggattaaaagaaaattttaatgatgaagcaacatttattaatttttaaaataaggaaactctgtgtgttccttctttacctcacctccagctggtttaacggttccctcagctgggtttattcacataagacaagcacctaagccattttactaccttggttaactctttcttgtaacacatttattgagttacaataaattgtattgtaacccatctagtactgggtaactaaatacaggccctgctcttgagaagttgatggtctaacagaaagcagagacttctatcagactgaaaatcaaagacaacaaatccaagtggtgtgatacagacagttagagagtgagcaccagagtcaggcagagtctggttcaaatcctgcctgggccactacctgtgatgatcctggcaaacatcactgcatagagaaaacattagtacctatgcctgcgaggtgtgctaagagaattaaggaattaattaaccctcagcacagagccagacacacacatagtgcctccagaatgcagagacagtacacagcagggctgagattatgggctctggccagactgatgtgactgaattcctgattcagtcacatagtggtgtgaccttgaggacattcacctaacctttccaggacttaatattgaacctgccttctgtgaggcggtttgaagactaacatggtaacatgaaactgacacatttagaagaatgcctggcataaggcagacactgagtgttagttggtattattgcacagtgcaaccaatgctatgctggcataagccgaccgcactactacgaaattagcttcctgctaaccaagcttggtccacccaggagggctccctgaggaggtgacctctaaggatgaacaagact

SEQ ID NO: 58800 - DNA, 554 bp, Homo sapiens
tatccagtctcaaaataaaacacgcagatgtgtagagcaattttctaaaaagtgcatgcagcatttaaacaatgccataaagaagctggctcaggagctgctagggaaaaagcaccagagtgaaaaagctaatactataagcacaaggactgcaatgcgagaagaaagtgagtgaaaaagtctctgaaatgaaataagaagacaacagaattcttgtgtccactggtaaagagggggtggtgttctctacggtggactgtggaaagagcttgggggttgggggcggtctgtaggtctttccacactcagcatacacatgctctggctggcacccaaaggccatgctcacaggcctgtcattatgtggctctctgccctcttcagggttgtctgctactctgggtgatggcctgctcggtttggactgatgttcctgcagctcagggacaacaacaaacagaagcaccacttggtacatgtttggtcctcttgtgtgtaatatgggatgctggcctgggtgtcagaagacacaggctcctgtcagagctgggaca

SEQ ID NO: 58801 - DNA, 2386 bp, Homo sapiens
attttattatcagaaagcaaaaacacggaaaagttaacatttccttactcaaccttgcccaaatatgcgatagcaaccagagtagctgtatttcctaacttcctgacttaaagaatttataaagtgaaaacctaatgctttctgctcattattgcagacaagtaattccatatgatgcttctgggctgagaacaaataaaaacttggaacccaagatgaggtagaatctagttaaaataaaattgagctagaaagcaaaagctgaaaagcagaagaactacagatgtaaatgcaatatggaaaattaaagcattcaatatcaaatcagaaaatagagaaactggttgtctaagccctcgtagtaagcaaatgacattggagattgatctactgaaaccctctgtgaacgctgaagagctccagggctaacccttcccattgcagctctgcattggtttaatccacaggtctcagaatgaaaatccaccctccttggatggtggagatgataaatagaaaaatattacaactttttttggggggtgggaggggctaatgccttgggctccatggctgagtcagttccacacaagcaagaggactgcagtatagactcaattcagtcagccagaaatgaaacccaagtcaccgttcctccaagaaagcagacatgtgtcccatcacatgccctctcagctcattcttccccagactcaactcaggtcccacccctaatgggcgaagatattcaacttggcaggagcagatgatttgctacatgtggttataaggtggcttctgggcaaaaccgtgactccagaaatgtgttcatgacaccttgagtttatttcagagtaatgtgtgttcagatacctttctttaccggagatacagcagctttcccagactggggttaccatgtttacacactgagggcttctgctggcagcaattgtcagcctgcttagcacagactggcacgctccacaaacccagtaaagagttaaacgttctttgcacttgactcagtggcttctcttcaccacacactcccagatcccaccattctctgagccacccgtgcagccaatcaaagcaaaggaaggaaattatcctggccggctgacagccacagcgctctgatggccatatatggtaaaaaccactgtcagagccctgtcaggcctgcgggccggctgctgtggacatatcagtgaactgcagcagcaggagaagctggccaaggaaacgcacaaaggctgcctgctcatctccaggggagggggtggggtggaaaccatcatctgccagggcacacattcagtgagtcacagccactcactgtcatcaaaaatagccccggggtacattgggaagttccttctgccaggactttgtgctccattgttaactgggggtgagcagggtgcccaccccacccctcccagcaaaactgtggataacacagtcactaggagaaaatgaaaaggcccttctgtggcacttcatgtggtaatgaggccaggccgtgctcgtgtggctggcagctcgtgacataatttggaagtcattgttctgcacctggtgccctccccctgcatcctccacccctcccagtcctgtcccccagcttttcacggcccatacacttggcagttgaaggtgctccaggcatcagacaatctatttcaggaggcagtgaatgggcatcccacgacatgtcaggacactggctggctctgaacaaaatcctctgcccctaacaccaaagctaccaagtgccaaatgtccacatctgtacaaagggctaccggcactgccactgttgtctaaaacagagtaccacaatgtgtagaaatggaaattgcctgtcagcaatgcacagtaaggcagacatgcagccaatgcaaatccagcaggtgctggcaaagactgtggatcacacagaaaagcactgtcaggagactgccattccctctcaagtagcccatgaaagaaggcacttatcagcacggcgcctggcacttaaaggaagccctcaacaaatgtgaactgctgcgatttcatcactgtcactgtgtcctcacaaggcatggtatagaccaagtactttccaaacctaagacaattctctgagctgacagaatgaaagccctgtcaagttactgtttttgttattaaactctctaatcccagagaaagaatgcaaaggattcagtgtccattagaccacagctttttttttttttttttttttgagacagagtcttgctctgtcgcccaggctggagtgcaatggtgctatctcagctcactgcaacctctgcctcctgtgttcaagccattctcctgtctcagcctcccgattagctgcgataacaggcgt

SEQ ID NO: 58802 - DNA, 4323 bp, Homo sapiens
actaggtcatactgaaatattcatgaagaattctgttttaatacagaaaaggtatcttaagtttaaaaagacatacaagtgtcagaaaagagttttcataattcaaggagacagtaacacagagaagtcataaatggaaaacaagcttaagaggttttatcacatggatttgtaccttgaaaatgcaagtagctctcaaatttattattgccccacccctggaaaagaggtcaaaggtaaaacagaccaattaataatatgtttctaaagtaccagtttgtgacaaatcaaaatatgagaaattaaaattttgccatcataaagaagagactcgtcgacatacccacttatataactaagaattgatattcatccttttgaacattccatctcatagtcgttagagtgactctcttcctcatggttggagtggatcccagaagtgacagataagttaaacataaaacttttatcaaaaaatccaacggtgtttaaaaaaatgctattcactgacaccgaatctaatcctaaactatatataaataagtataaatgctgattagcacaatctgcaggcaaagtaacaaaggatcatgaaaaagtcaatattgtgtgcagttatgtttcatcggtatgtatctattaaaattcatcaggctttaatgtaccttccacaagtaatcaaaataaatatggacaagataggttctatatttgtcaaaaatgtgtgctcctgacgtttataccaaatctttgtccaatcctcagtacacacgactaacctccaccacgaaacactgcacttcaagacctaaggtacaacacaattctcagttttatttcacttttttccctacttatttatgcgatttctcagatccaatgtttactattatgcttcatagccaaacattatgactgtgaaacatacctccaaaccaaaaatactagtttccttaaatcatctgaaatgtatagaaccaagtccaaaatagattttgcacatttcttcagttttacagggaatgcagaaagtgaattaatattaaacaggtatctatttgccttcacaactgaacagacggtacaaagcaactgcttatacttaatcatgtttctgtctattccagcaggccctggtgtcaggagaacgttctgccagataaggacaatgagatgcattattatatagagtgactaagagccctacaagtactgttttagaatgtaatcccaggcagaaaggctgcggtaagagggcctaatattttgtggtaactatttccaaaagtaaatatattcgccacccaggaccagtttattaaacgcgcactacattcaattcttttcaaatgtcttataggagggaaaagcctttgtatcttaccatgccgggggaaatgaacaacttgcaatttgcttcgcactctgaatcccacgtttgcaacatgtagagcaagcactttagacaccacaaaacaagggcagcctacattacggccaaatataggatgtgtttctaaatcgtgatgcagtaaagcctacgattccttttccagcgttcaaaatcctttgaacactcccaaaaaaggatgccagggccagcgcctccctccaagaggaagcccctttcttctcagctctcaccgcagcctgccacttcccccaacacattcaaatcatttgagagacggagagctggggagcgtgcgccggtggggacaggcgggagagctcggtttctgcattcccaccctccacgtctgacctcatcctcagtcatttcggcgcagcggggccccacctgcacctcgctcctttttactgcgtccctcgccagctgccccgctattagggaaacacacctctgaatcacccagttcactcggacaccctgggcccccgatccgacagccttcctgcttcgttcctcccctcccaacccccagccagtcccagccctctgctcccttggccgggctcagcctcttcccaagccgcccccacccacattactccagctccagctctgccccgccccgcctgacccccaaccgagatctgcagggcccagagctggtctcgcacccaaagccaggaaacccgcaggccaggcggccgccctcgcccctcccgacgcagggcccagctcgccccggccccacgtgagcccggcccctacccgcccccacccactcgttccctggggcggcccaaacccagtccccaggcctggagcccccgggctctacgcctcgcccgaagcagcccttccctcccagcacctcgcccaagcaggcgatccctgacccctaaaagccttccctgggcagcctcgtcccacctcggcccgcggctccgcacccggccaggagcgttccggacctcgaaagcctcctccccacagggaccctgcttcacgctccccacgccacctggttcggtccccaactccctttccccgagcccccgacagcagcccccggccctaaccccttgcaacccagcccgtgaacccgcgccccgcgcgcccacccagcactgtcccctccacctagccctgcccctcgccccgccggctcctgtcaggcggcgcaggcacatgctcagaggacaggtccgcccgcccgactcgctctcaggctgcccccgccgggcgcgagccgctcacccgggccgaggtgcctgaggcgccgccgccgaagtccccgctgcaaagccgggcgaagcctccaaccgctgccgcctccagcctggcactgagcgccgtgcgggggaggggcgcgggcagccgccaccgcccccgccaccgcgcgtaggccccgcccccgcgccgcgcgggacccaaccagggctgccgggccgctgtgcgccacgcccacttccggaggggaagcccgcttcccaccccacgttccacgcctcgctacgccccctctggtcgcaccgagggatgcaggcggtgcccaagcgcacgccccgctctccagtcatctgagtggtagagggccacgcccacaggcgcctccgagcaacgcccactgctccttagaccccggagcggggttcttagagccccgcccactgacccgctaggctctgcaaggccacgtcccctggctcctcaaagattcccccagagcccctcaatacaggaacattagctcctctgagccccgcgcactgcctatccgagtccttaaaccagcctcctgcttccctaagcccggctcccctcccactgcttcagaactcgcccagcggcctcacaaagccccgccccgtcttccagaagccccgcccaaggaccgcaaccctattcctagcatctcaagccccgcccactaccccatctcaacgtttaaaccccaagccccgccccgaattcgcgaatccacgcctctggctcccgaggctccgccctggctccgtcacaccctaccaccacctcccttgaggactgccgacgttccagccctccctgaaccgtccattgtcacattcctagtgcagagtggccgcccctgggctgggccacacccacgtaaccccaaagagggcccgtgattgaccccatttcgcaggtgagggaatggaaacttcagggttcctcccttcctttccctggccagagtcccttaataactcggcggcccaggcctgaaagtcggagcacgggaatttgagcctcagctctgcggccgtcagactgtgtgacctgggacagttctcttacctctttgggcctgagtcccctaatcttcagcatgaagaagttgtcctgttaatagctaaagtccctttctgaaacaccaagctctgaaataccgagatttgaggaaacagagcctggggaaccgaaccgactgtggggtagggctatttacttcccaaagcaaggcatctttgccattcacagggggattttttattttaagcgtcagcctcagaaacgtgtgttatttaaatcaagcttgacctgaactaagacagctatcacagcaaattatttatcctctctaagggtcagtttctttatctgtaaaatggggataacagcccctccctcacagggttccatgagatcatattagcagccatgatcgtggcattactttttgccattaaaaggaatggcaaaaaccgcgattacttttgcaccaggataatagtaatatacttagaagagttcctggcttgtgataaacgctcgacagtacctgttgctgctactgctgggactcaacaaaatgaaaggatgggttttattttgccttcaagcagccactcctaataggaggaattcagcacccttcctgcagt

SEQ ID NO: 58803 - DNA, 1811 bp, Homo sapiens
caagctccgcctcccaggttcacgccattctcctgcctcagcctcccgagtagctgggactacaggcacccgccaccacgcccggcttattttttgtatttttagtagagacggggtttcaccatgttagccaggatggtctcgatctcctgaccttgtaatccacccgcctcggcctcccaaagtgctgggattacaggcgtgagccaccgcgtccggccgagttccaactggaaaccacggagtaagctagcttattctttggaaacagattattgctaacatttatccatcacttagacatgctaggcactatctgagtgctttacatgcagaatcttctgaaattgctcaacaatcctatggccacagaaataattcttttttttttttctttttgagacggggtctcactcttttgcccaggctggagagcagtggctccatctggctcactgcagcctcgaactaccaggctcaagcaatccttccacctcagccttccaagcagctaaaactgcaggtgcacaccactttgctcactaatatttttactttttgtacagatggggtcttgttttgttgcccaggctagtctcaaattcctggcctcccaaaggtgttgaaattacaagcatgagccaccacacccagcccagaagggactcctaatccccacctataaaggtgaggaaactgaagactcagagaagttaaattccttgtccaagtcacatggcttgaaccacgtagaacccacatccatctaaatgcagagcctgcacccttagccagttagtcattacactaaactgcctctgtggcagcatgacagaacagaaaaaccgtggactttggattctggccggtttaggtttaaattcaggctccacctattactcattgtgtgacgttcagcaagtcacttcccctctgagctgagccctattcttctgcctatatatcactgggaatcatgtaaatgcttcaggaagtggttttgaatattcaggagtttagattcaatgaattaggacgtggcaaagcacccaacacagtgcccagcacaaaatagttgttttaaaacatgttgatgtttaaaaatcacagggttccggccaggagtggtggctcacacctgtaatcccagcacttgggaggctgaggcaggcggattgtttgaggtcaggagttcgagaccagcctgggcaatatgatgaaaccccgtctctactaaaaatacaaaaattagccaggcatggtggcacgcgtctgtaatcccagctacttgggaggctgaggcagaagaattgcttgaactcgagtttggaggtggaggttgcagtaagcctagatagcgccactgcactccagcctgggcgagagtgagactctgaaaaaaaaaatagaaataaataaaaataaaaaaatcttggggttccatgagatcatagataaatgatgaagttagaagtgatgaaatgataatgatgaaattagaagaattccccccgccagatgataccgccaaaaagcagccatggaatatgctacgaaagatcccaaggccttcatcttctgactgcctctttcagttcctggtttgagccctgcatttgaggaggtgattcttgcacaggaagcacccaatgccagaagcaatgccacctcactttcactccatgcctatcccaaatgtggtcagctgagagctgcttacttccagaaacaggaaaactgcataactctgctgggagaaagccccatcatctcattgttcttgaacctacagcaattgctttgtgggcctg

SEQ ID NO: 58804 - DNA, 749 bp, Homo sapiens
ggggcattgtcccagatcactgcccagctcctggccttgctcagtcttgcacgctttccagcccagcccatccaagccctgctgccaaccgccagtcccagctgtctgttgtggcagatgtttttggctgtgccatagcaacgccagaacaggatgtaacttggatcacagcagggacaagcccacgcgcacaggccgcccatgcctttcccctccctgaaggcctgttgggaaagactggtcaggtccaggtcgaggacaaatggtgtttgttgtctggagagaggcagacctcatgtcctcttggggtcagtggcaggggagtgggaggacatagtgcaaatcctagctgagcgcctccttcaatgagctcaggtttgcatccattggctcttccaggagatgctaagggagttgccaggtaggacgagaaaccacctgtcagcaaggcctggcctgtgggggccggcctgtcttccccacgattatagcaactactcattgagggattactttgtgctacttatgctaaatactttctataaacaaagaatataaagattcaggggcatttactttgtgttaattacacagtgctaccctgttttttttaaggagcgaaggtttaataggcaaaagaaaaagaaagagaaaggaaaactgctctgtctctctagtgagagaggggagacttctaagaggaaaagagccaccagcggaggatgcactggattttatagtcaggtttg

SEQ ID NO: 58805 - DNA, 1706 bp, Homo sapiens
ggcctagcaaagtgaagttgataaagatgtaaaggagatcgaaaattcaccatttggagagagattagctaaagactgcaggtcggatggaaaattctttccatggttctcccacaggttcttccctcatttggaactcgtgtttaaaagtcacaaagaccctgagttgggccaaggtctcgttcttcttcactgtgggccttgcagtgcaacatggcagggcctcgttccaaatgtcactcttcagagcctaagaaaacaagtaactttagggacacacctgtcaaccggagctcccaaattgtacccccctaaacacataatgctgagcatagaaaaattccagctctgcagagcgttatacttagggaaaggggtcacagacaaggaatgctggcagggctcattacaaatatctttgctgctggaacatgtattgtttggctagaaggcgtaggcttctctcagagagaaggaatgtccaaaagtatttcagacagtaagagacattctctgagccagctacacagctctccttcaaaccaacgggtagcggcaagcagctgaactgaccagcgagctcgcaaaagcaagcttttttttttttttctccctaaataagacagcaagtgatgtgtcttggcttggtttagcaaattttaagatagttccctgatgaccccaagagccctcaggccccatggaagctggagctaatgcatcttcctccaagcatcatctgctctaccaggatctaagccccttcacgagggcagaaggtataaaggctgcactgtgcgggaaatgctatggcagcaaagacagccaaacacgccagaaataacaggcacatgaaggaaatgtttctgagacagctcaaaaattccgagaagagattatcccgactgtcccaggttctcagccctgtctatggtatgcagccccataccacagtcatttgtcaccgagtcctaactttgtcagaggcccctcctttcaggtctctcaggcaccacccagttctggccctcctcacccccgtgagccaggcgacatccaagcagccccacggtgcacccggctctgtgctgcattctctgaatgtccctgaaggccagggctgttgtattctctacccactctctgtctagtatgggagccactggccagatgtgttgactgaacacttaagatgcagtaagtgtgaccaagaaactgggtttgtcattttatttcattttagttaatttaaatttaagtttaattagctacatgaggctatcagctgtggtataggacagcagagctccggaagcttttggcctggtgagaagaatcaggacaagcgcctccctggcctctcgcccactctgcacagccgctaaccattgctctcatgacattctttcccagccccagaacttttagccatgtgacatcatctattgattagagtccaaacttcttgtgctaactctctatgggttgccacaattagccattgtatgtcgttaacctaaatttcattcatctgctatgtcctgaccttaggggcttagaatatagttagaaaacagtatttcagaataaaaaaccattcttgtattacctctcgcactattccccctgttctccatgcttcgcattctctgttctatccccagctatagcactgtccccataaagcctactgtggttctcggctc

SEQ ID NO: 58806 - DNA, 1825 bp, Homo sapiens
gggacgaccacggctcacgcagcacagcctccacctcccaggctcaagcgatccttccacctcaaccacccaagtagctgggactacaggtgtgtgctgccacccccagctaattttttaatttttttgtagagacagggtctcactatgctgccagggctggtactgaactcctaggctcaagagatcctcccacctcggtctcccaaagtgctgggatcataggcatgagccaccatacccagccaaattttttaaagttattttttaaatctccacttaattcgattttggtaaaacacgacctgtaatttttctttatcggtaggtaataaaagcttcagatgattttactgatcactggtatgggcatatttcatgactttgccctttcatctcttgcatagttttaccctcaccaagcaagaccttccctgcctcagcactgtttgccctcttcgtgttttccagaacagaagtggccctgtttcgtgcccagagcagaagagaacgatgaagagctctgctctcccaggtcttcctggtctgtgtgtgtccaggttttgagggcctctcacatacacggctctggaccacgtaagatctaattttagcattttcctgctcggagaccacatgtttggaacagcaggggctgacctgcccgtgcaggcctcctattgtgaagggcacgcgaagccaggataccgcagccctgcaggatgtgactcagcatcctgtctcagtgctggggcggccagcagctctggcaccaagtgctgctgctgacctcacctcttaagaccacaaatacccagggtaattggtgggataggcatgcagcatcagctctccctgttaagacaacttgcttgtccatccattatgctgggcttccttgtgaacaccacaggtatctatcaggaagagttcttccgaggaactgatctgctggtattttcaggacaccaagaatcaagagattggtcttgtttctctctttgctttgactaccaggaaactcaaagtcagatctgtggccaaattctggtaaccataccaatgctatgtcatgtattacatgtacaaaccttccccttacttcatcttattttcttctgctttcttcgtgtcccgattttctcactaatgttacattctattgttctctatgaatgttgtaaggtgtttcaaatcctttttggagggcactactgtagatacaacacacattacccctgagggataaggactctttttgactccacacagaatccctggcatttggcaaagaacccatatttaggcactaaatacacatgggctgaatggaaaaagccaatagctaagtaaaaaccacctccattaccatattgtttcacaagaggttcttttcccttccatctcatgaggtggggcctggtcaggagtccccagggcctgggaattaggttccttagggagccttcttgctgtaggggcagccaacaggtcagtggccttgactccagacctaaagagccactcctagactcccagctgcaacagacacagcgtggcacgggtgggcctggccactggggaagtgacaagtgatttccagatgctgcagccagcctggctctttccagaccacactgaaggccccttcctgtgggaattctgatggggcccagatttggggaaacacgcctcgaggactcttggcaagtgcgtgccaggcctggaccaggaatgacttctgtgggcacagggagagaccaggcatttcctaacacaggaccttgaacagccttctctgaaacaaagtctttctaaaaatagc

SEQ ID NO: 58807 - DNA, 2734 bp, Homo sapiens
cataaattgccagacagcagtgaccggaacagaaaacagcccctcctcgctgtgggaaggaaaggcgctcctgcaacctaacttctcagtagcaggctattgatcgccagtgttcttttgcctctaatcagcgtgtagagggggattactagaaccttctgtgtatagataactcatgaatggcctctcctctccaaggagggggctgtgaaggttcaacttcccagccactctgaaaatgtccctgccaatcccagcaaaacaaggctgaagaactaccctaccaggagacagggctgtcaagccaaatgcaaacattattctcttgtctctctcagacacacaaacctcccccgtgttatcagtcaacttcccccactccctcccacaaagaaaggggctgaagagcccagatgctggctgcggaacttcctgggcctgggaccgcagggccgctcctccagtcttctctaaacacagctaagggtctgcaggcggacactcagccttgttataggtaagagtttagaccagaggccttgacgggttcttcaagagatggtgggcaagattgcgcgaccagagggtcatccctgcagctacagagggctgacctgctcagaggcccaaggccccagcctaggacaagccaggccaaccctgcaggctaagagggcaacagtgccctcaatcaaccccagaggaaaaagtggccaggcaaacggacctgggccacacacagacccacaaaaacgcgcacagtgccaggacacgcaacccaggaatgcacctatgcaatcacccagaatgggtcacagccacacagaaagatagatgcacataaacacacaggcctgagtgatgttacagaaaggaaaagccagactaaggctgcacgcacagacgtgaaacacagccacacagagcccacagcacgctcggtcaccgtcacacagtgacacgggcacgcctacagacagaactccagaggcggcaggcggggaaacaatctcacacgtttgtaggggcactcccagatgcctgtctcacgctggcacagtccccggacggcaggtcagcaacagtcacatctcacatcgcacagccaggcatacaggcaaagggcctagaactaccccggccacaggtctcagaaccagcggctcacgcagtcacccaatcaagggtcccagttgcacatccagtcacccctggaccctggtcacactgcagagtcactcacaaatgggagtcccgacagacgcacagtcctccccagacagaggtcaacccaagatgggggtcacacctgaaatcacagtccccacacaatcacgaggtcacatctgcacacacagtctctgcacagtcacccttaggggtcacaacgcacacagtctccgcctaacaggggtcaccccaagatgggggtaaccccctgatgtgggtcacagcgcacacacagtatcctgcagacactcccagaggggtcgcactgcatacacagtccctgcaaagtcgccccccgataggggtcacaccgcacacaaagtccccgcacagctccccaagacagggtcacatcgcacacagtcctcgcacggtcaccccggtccggctgcccggctctgttcctacggcggggccccgaggagcccgcgcagccgcccccctgccccgcacgcgcggccccagctccggcggcctcggcgcggcgtccggcggcccaggccgggcgcggcgagcccggggctcacctcgctgttgctggccgaggaggaggcggcgctgggcgtgggcgagcgctgcagggtcaccagggccatggctgcggcgcggtgcgagggcgccacagacgtctcgagctagagccgccaccgccaccgccgcccgggccgggcccggggcctcctggagccgcgcgcgggcggccgggccgagccgggccgggcccgcccctccccctcggcgtcgccaccgcccccgcccccagctcccgcctcccgcgccggcgcgcgcaggcctcagtgcgcggagtgggcggggaagcgggcagggcgggacgaggaggcgcgcgtgcgcgggggccctgagggctgcccgaggcctcggctggtcgatcacgtccctcgcgcgcccgacacacgcgcccccgcccgcgcgccccgctatcaggcctgggactcgggggcgcgcgcgccgcccggagcccgtacgccccaggggccctgcccgctgctctgcctggggaaactgaggcccggcgaccgtgcagacaggactgtacagcgaccaggaaataaaagacgtcctggggccgggcgcggtggctcacgcctgtaatcccagcactttgggaggctgaggcgggcggattacgaggtcaagagatcgagaccatcctggccaacatggtgaaaccccgtctctactaaaaagacaaaaattagctgggcgcagtggtgcgcgcctgtagtcccagctactcgggaggctgaggcaagagaatcgcttgaatctgggaggcggaggttgcaatgagctgagatcgcgccactgcactccagcctgggcgacagagcgagactcggtctcaaaaaaacaaaaaacaaaaaacaaaaacagtaagcaaaatagattcgcctgattttgcagaggttaatcaagttattaggcacgtttttaaaaaagtattttgctaatctttttcaatgaattctttctgggtgttctg

SEQ ID NO: 58808 - DNA, 1239 bp, Homo sapiens
attttcttatttcatcttcgtctttttatttgatgatactaaaggcaggtgttagaggctggattgctaaagctgacccaaagaatgcctccctcagggctggttggtccctctctctcaggcctcagtcttcccatctgtacagtgaggtgcctgcagatctctgggctctaaaaatcacagctccatgtttatccctggcagaggaagggcctggagtcctgctgcttgcgtctctgggatacgggagcaaagagccacgcatcctcatggcccacacaggcgtcacctccagtctctccttggcctcatctccccagcgtcctggaatggcatcgggctggcccagggagcccctgtcctgtgcctctcctttcccctcaggggctgccaggctgaccacccccaccgcaggccaggcctacagtgccccatggaacgtcctgaccctcccccagggtggcagcaggaagaaggaagaaaggggatcctctccagctggccagagagacagaccttcttgtgctcatcaaccctccaagaatgcctgccctccctccttcccccaaggcctgtccacaggggcttgagatcagccagaaaagtcaggcaacttttcagggactgggagcgaggtctcccggccgggcctgggtccagtctctgtgggcagtgcagtgccgagccccacccctcaagccgtgccctgtccatagctccagactttgaccctgcactccagtccgggctggcggacagagggctggaaacaagacgctccagaatcaggagcttcccctcaggaaatagcatcctgtgtccccgcactgcagttgtctggtctctccagcagtttggtacttccggtgagtggcagatgcacctttgagctggggacaggggttgggagaggggagaggcaaaggatttcatgtcctcccaatgtcaaagacagggctcaacattacagcctaaggcaggtgacaggaaaggagagatccagcctctcaaacatccagcagagagaccataggtaagtgatttttccctccccaagcctcagtttcttcacctggaacatggggatcataactcccctcttacagcgtgagtctgagtgttaaaagaggtggtgcatgtaaagtgcttagagcagatctaggcacatagcaagtactcaaatggtagttattattatttttggtgggggagttggtaggctggttctcaaacttttat

SEQ ID NO: 58809 - DNA, 1026 bp, Homo sapiens
tcccaaagtgctggaattaaagacgtgagccactgtgcccggcctttttgattttccattctattcctaccaacactctaaaaattcctacaggcattttattttattttattttatcttattttatattatattttatgtttgaaatgcaggactctgaagcttcagctgttcctatttaccggcttgattctcagatttttcaaaccatgtgatttactggcaagcatggcatttaagcacctaggcttatgagtcaggctggcctgggctctgcctctcaccacctgggtgtccaggagctgatattccagtgaggagacaataaggcaaggagctttgtcagctctcataaaagtttatagatgaggtcgggcatggtggctcacgcctgtaatcctagcactttgagagtctgaggccagcaaatcacctgaggtcagaagtttgagaccagcctggccaacatggtgaaaccttgtctctactaaaaatacaaaaattagccaggcatgttggtgcatgcctgtaatcccagctactcaggaggctgaggcaggagaatcacctgaacccgggaggcagagtctgcagtgagccaagattgtaccattgcactccagcctgggcgacaagagtgaaactctgtctcgaaaaaataaagtttatagatgaggaaactgaggttcgattaggattaaccaactcatcctggtttgcctgggactctgatgcactgacttttagtctgaaagtctgcatcctgggaggaccctcagccctgggcaagctggggaggttggtcaccctcactcagtcaagttgagcaacttgcccagggttacatggctggtgtgtgcccaagtcaggctgcgaacctgggtctgtctgactctcagcctgggccatactgtctcttagattcttcatggagaattaggaaaaatacagaaagccctttattcctctgccttctcattgttaacatataaaaatggtcaagcgggcgggtgcagtggcacacac

SEQ ID NO: 58810 - DNA, 1543 bp, Homo sapiens
aaacttctaagtgggtgaacatctaagtgggtggatggatgcacagatttatcaaataaattgcaaaggtcattatggtagtttagaaactgccagatggttcagcaaatggaacacccaatgaatagcagctcaaacagattaaaaaaaaatttttaagaggcatcctgtcacccaggctgaagtgcagtgacatgatcatagctcattgcagccttgacctcctgggctcaagtgatcctcccacctcagcctcccaagtagcgaggacacacatgcatgctatcatgcctggataattttctttattttttgtagagccagggtcttcctatgttacccaggcttgtctcaaactcctgacctcaagtgaccctcctgcctcagcctcctgaagagctgggattataggcatgagccactgcaaccagccagaattttaattcacacagctgtaaaaaaccaatgattctgatcagtgggcagtgattcggggcccaggctccttccatctaatggctctgccgtttttccacgtgcttttgaggtcacctcaatgtcaccattcacatgggctggtgactgcagaaggatcatgcaggaccacacgtgcagagtctttagagtcccttggccagaaacaagtcacacagtcacatttagctgcgagagggtctaggaaatgtaggtgagctgtgtgcccagggggaggaggaaaagttgtaggagcggcaagtcgatgtctgccaccagtgtttacaaggaggggtgcttgcagccagactgaacagtgtggctcataatccccaaagccaggtcaaggacttcactgaaactcatcagccatgtaatcccatgctggaggtgcactccatatggttatgatggggcatccttcattccctctcttctttattctattaatggggaaatattggaaaatttaggagggagaagacccaaggcatttggggagttgcaggagtgaacgtggtggatttctgggttttggacacaccccaagctcctgatcatgccacagccccatgccagctgacctaaggttttttgcccagctcagggcattgggtgatcgaactcttcatgacccttccagggactggagccaacagacctttgactatctcctgagccatgtccattctcccaacgctgaaaacctgggcctgttcctaatctcgggctacaacctcttccatgaagccattccggtgggtgaacagttcttgaccatgagggatgagcacccagggctggggtagtgagggtgggtgcagcagagccttaatcacagatgagggcggggtgctttgagtctcgtaggcaacagactcctgggttcaaaacaggtttggtttaaattctatttttgctttgaaaattatttttgttttacattttgctgttaaattggcagaggacaaagaatcttctgatgcccaggggaaactagcctttgattagcatggctaaaatacaaacatgttctgcagtgacgggcacttggtgctgaagccaaaag

SEQ ID NO: 58811 - DNA, 1867 bp, Homo sapiens
taagcaaatctgaaaaccaagcagccccaggcaactgagcccagcgtagcaaccgacgccggggcctgttgctaagggaaaagaaagaaaggacgtggtccgtcagctattgctctccgggggcagctacttccggtccccctgggagctgtcctgcggtctacgttcccccgaggtgctgggactgcggccgcaggttccgctgtctcgggaaccgtcgtatccctcggtccggcggcggcggcggcggtagcggaggagacggtttcaggcctccggtgcggctgcaatgctgagctcccgggccgaggcggcgatgaccgcggccgacagggccatccagcgcttcctgcggaccggggcggccgtcaggtgagattttggggggcggggctgccgaagaggccgggaccagggtccccagcttgggcccgtgacggctttttcatgccctagttggggtctccagggcccgcgcgggcattctggaaggttctgcgtcctttagggttggaggcctgggcccgtaggtgggaggactgacgggctccagtccttcggcaacaccaattctgtctgcactccccaggtctgtcagtccctccccctcctgtcattgttcccaggacacccggggcactccagtcttgtcaaggcccctaattctgtcagtgccctcagtcctttcagtgcctcctaggcctgccaagacccctcaatccttctagtatacccccagtccttctgggtcccccaatcatatcagtttctggactgccagggttccccaaccttggcacggttcttctagtcctataagtgccccgggcctgcgagccccgcgttttgttagtaccgccccctattcctgttagcccgccctctagtctaatatggatcgccacttctgtctgggtccctgatgttgttagtgtgagtaaaggcccttgttttgcaagggtctctaaattggtcagggcccctttaacctgttaaggttgcttggtcctgttaaagccctccgttcttgttaggactcctcgattgcctgggtccccaatcctgtcagggcccccatttccctcttattcaccctcccaagggctccaggcttcagaactgagtaccccctcccccactgctgaccccaaatgactgagacctgttgctcaggtcggcttcctctggaactggagcaggtttaaagagcttattatcccagggctgaaagtcctcgatacttatcctgtccagtgcccccattccgtagataggaagtgtggccccatagctgacctcatagcagagttgggaggagaagccagatcttttcatccgcaggccccaccactctcctcgtgatgtcattttgcagaggaatggagtttccaaagtcgccacttgtccctgggtattttttccttatgctgccaaagtcatggacaagtcctctctcccatccccttgacactcttcccttcagtttccatcttgaacttcgtggttttaagcacagacctggggagacagacaggcatgattcagagccatgttccttcactcactgtgaccaagttgggctcttagtttcttctgctataaaaatgaaagtgatagtagaacctgcatctgtggggttgttttaaaaatgaggtaagattgtcacagggcctggcagagagtatgtacccttaaatattagtgtttgattaggggattttaaagcactggtaaagcaccttagcacttccatgacagtcctttataatctttccaggcacttttgtgaactcacgtatcgtgtaaaagcacagtgatgtattaagaaacttcaagaatacctttcaccagctgggcatggtggctc

SEQ ID NO: 58812 - DNA, 678 bp, Homo sapiens
agtctgcacctgatggctcatgggccaaatccagcccaccacctgtttttgtcaataaagttttattggaacacagtcatgtccatttgtttaggtactgcctatgtcagcctcaaataatcaaagagttcgagatccagctaaaagggtttattgaagcacaaagtgtgaaggcggctgtctggggacacacaaatcccaggaaatggtgatcagtgctcccagtgtggggaaaagtggggatcatttatatgacaaaaacggaggtactgaacagaattataacattttccatacaatggctaacatacagatgtaagatttgattggctactatggattacactcttagggggttgcctaccattctgttgtaaagaggtaataatcacaaggatctctatctccagtccattcagcctaggtttgagggaagaacagggagtctggttaacgtgtaacatctcaacacaaaggtcaggaagcagtggccatgcgccagagaagaaaagcagctgtgttacatgactgtttccagcactttttcccttggcataatgcatttagaaggtcctgaaatgttattttctttttacatctatggctgcttttgtgctgcagtggcagagttgagtagttgcaacagagaccatgtggtccacaaagcctaagatgtgg

SEQ ID NO: 58813 - DNA, 741 bp, Homo sapiens
cccaaaaatgacacttgaaaggaaaagacatgtaaatatggccttaattatgttgtctacccataaacatgtatgaatgctattacacgttggtattccttagaagctgacagaattaaagcaaatagaatgcttagatcagtggttctcaacttggaggagttttgcctcccaagggacattgggcagtgtctggtaacatttttggttatcactactgggggaggggtgctactggtgtctagtgggtagaggccagggatgctgttcaacatcctctaatgcacaggacagcccccgcaacaaagaatgatccagccaaaaccatcatggtgctgctgttgagaaaccttggtttaggtcaaaagccagtaaattagctactgattaactttgatacatggcattagcaaacagggctaggaagctcaaagatcccaggctagccgtaaagctggagctagatacacttttcctatttgggattaagacagattatccctatttgagattaaggataaagggcagattattttatgaatctatataataccaaatgaaatagatttttttctttgtagcattatggggagttaactttcaaggtaatcaaaaccaggttttgtttacagagccactgctaattttcattgactcgggcctttttctcttgcagttctgaatcagccaggggcccccaaaacacagatttttatgaatggcgcctgctccccatcttta

SEQ ID NO: 58814 - DNA, 820 bp, Homo sapiens
gaaaaggagaaagcagcttttgactttttaaaaaacatataactacagctggcatctagtattgtcatgttgctctaggtccatattctgaatttattcatttccaatagcctaatacaaaaagtatatattgagcactttcttcccttttcaggtaagtctctgaatgcagcccagggccaaaggaattttgatgacacagtagtacctatgttttaagctatatttttaatttagaaaaatggataccaaattcaaaccgactcatcagaggtaagatttggaatcagacctttccaaaaggtcatctgaggtaaggctaagaccgcacttcctctgctgggggtgagctggcagacacaccaaacagtgccttggcagcagctcacagtgcaggaagcccaggtgatcactcttctgctgggcccaggctgcaccctgaggactcagtaactcactctcaacagaatattctgtgcaggctctccaggctctgggcgtcagggtgcaaggggcagcttgaactgtacggtccgtcctgcactcacccgatgcagaccttgactttgatgttgaaatgaacacacttgttttacccaagtctggtggaacaaatgcccaatcatgtgaccttaaagtgtactgcaaagctgtagctttaagtaattgctgttctgccactgcttactctgaaatctaccatcaaagaaagatagagaaaaggggctgagccttggaatatatggttataagcagatctttctttggtcagagaccagggtttgagccaaggctgtaaatgtgaacaatagctgtgcaa

SEQ ID NO: 58815 - DNA, 1408 bp, Homo sapiens
cattaattgcaccaaacaagccctcaatgcacacacacacacacacacacccctctgcttacctgtaaaatattctacttctttctccaactcttggaaaatctcatctgcctcagctttgccaaacaggactgtgtaactgcagtccaggccctcagcccgaatgtgccgccagctagggcctgctgagtggcctccattccctggggcctctctcctgggcctcttccttgtgctttctttgtctcctcccaacacagctggctcttctccagttggctcttgctcctcctgcttcctcaaaaggcccccttgagcccctttcaccaggaatctgtccatcctgtccccacaggaaagaagggacgtcagtggcgaggccaagacagaaattgctcaagttctatccccagtgcaaaaatctgtttgtccaaggggtctcacagcaacattcctagtttcacattttcattttaaagtttaaaaccatgtcctagaaaggaaacagaagatgttaaagccggaagggaccctagggacaatctgatccagggtctcccacgtccacctgtgcatcagaatcagctggctagcttgcaaaaacccagaggtctgcactccacgcctgagcacctgaatttttaaagaactacctcctgggaattcgcacgccacagctaaacttagaaactacaatccaaaccctcattttgcagaaggggaaactgttgcccacagaggcgaagaggtttgcccaaagtcaactgtccacccctttaaggaggaaggacccataactgacctcgctgccccccaccagtgttaaaatagatcagtctagtgatgctcaagtggatacgattcagaagcgagacgcaaagaggttaaacacgggtaaaccgcacgcaaaattctgatatcactgcaacacgtccgtggggtgggggtggcaagagtgctctagcatcgcagctccggcgcagatcggaatcccgcagtcaccctggtggcctcgtggtgggaaagacgcgccccagcgaatcggtcgcgtcacttccggagcacgctgggaactacggcaggctagggcgcaaagagagcagccgggcggccccctggtgccacctgctggcctcccgtgtgtggcaagcactgccgctttcccgttgatcacctgttgggccactgtcgagaatcacggctggggtgagaactgtggcttggcgtcacttctcagtgagggttactttggtgtccggaaagggcgttgggccaccagtatattgtcacgagtgggagcaggagttctgcagtcggatatcgtggattctgtttctgtctcctccgccctggctgtgtggcctcccacaggtcacttaacctctctggggttaagttgcctcatctg

SEQ ID NO: 58816 - DNA, 725 bp, Homo sapiens
gcgcggcttgggccggggctagggggtgaagggggaggaaggcggtgggccccgcctgacggagggcgtgcaggatcgcgcctctgactcggtaaacccgggctccgctttccaaatagcctccacgtgttcaaaatagccgccgctgtcccccatgggccgccatgctaaagggccagccaatgggaacgcgtctcggggcccatggcgccaatccgcgcgccgcaggccctcctggctcggtgcgctgtccaatcagaggggagagggggcgggacccagagggaggttttttgccgcgaaaagaccacgtggggacgcggtggggcgggtctggcgggggcggggcacctctgtgcagggttcccagtcaccgcgacgctcctcgggaagccatagggcgcctcccagcccgtctccccgctccagtttagaacctaattcccaattcccggaccgggcccagccctgggctcttactgtccgcttttgctgggacctgttccacaaatgggcgtcttctgccttgggccgtgggggttgggccggaagctgcggacgcctgggaaggggccgctgcagctcttgagccgcctctgcggggaccacttgcaggccatcccagccaagaaggccccggctgggcaggaggagcctgggacgccgccctcctcgccgctgagtgccgagcagttggaccggatccagaggaacaaggccgcggc

SEQ ID NO: 58817 - DNA, 1632 bp, Homo sapiens
atattttttcctgcaacactggaaagttttagttttttaagaagtactcatgcagatatatatatatatatttttcccagtcctttttttaagagacggtctttattgggtctgcacctccatccttgatcttgttagcaatgctgtttttgctgttagtcgggttagagttggctctacgcgaggtttgttaataaaagtttgttaaaagtttgttttgtgcaagtgtcctttgtgcgtccaggccagggcatccatggacgtccttgggctgccctttcccttggcgcctcccagggttcccatagcaaccaccgtctgcaggaggggccgcccttgcccctcctccccgccctgccgctcagtggaacggcccaaccctcccctggctgcggtgagcgctgggcccaacccccggcctggagcagcgccccaactccgagcaccgtggagcaccggctgccagctgagaccccagaggggtaactaacggcctgaggaaggcatttcttcggggaacatggcgtgcccgtcgtggctacgttctgccaagccctgtgacgttggaggggagccgcctgcatcccccgctcagccagtgtttctagactccgagacatctggaactcggaagtgaggccagggctccaggaagactccctgatgacgcactggcccgcagcccaggctcaggtagtgggggctgtcaggatgatctgtgggatcccccagtgtccgaagaaagaagccacaattgtgtttttttttctttctttctttttctttttttttttttgagcgagtctcactctgtcgctcaggctgaagtacagtggcgcgatctcggctcactgcaacctctgcctccaggggtcaagcaatcctcccacctcagcctcccaagtagctgggattacgagcatgcactaccacgcccggctaatttttgtacttttagtagagaaacttttaactaaatgggcaagaaagaatgcatccagccagaacctcgagactagcaaatgcatttcttaaaagggcagggagggagaccagagtttgcttgaaaatactgcttcctttccttatctatgtagggaagggtttatcattctacattttgtggtcagcaagctggctttcacgggaggaggatgcatggtcgatttgccctctggtaactttgggatcttcctctaaacaacagtggactcccttagccaaggaagaagtgaagggataattgtgcttacaccagttagcttttcacacttctctctctcccggtgcagcactgccggtagggggagcagtgagctccaagtttccaggaataattcaaaacacaattattttatattttaaaatataaaatgtatattttaaatatatatacatacatttctatataatatatacaaaagttcaatatacgtatattgaatatatatgtatataagttcaatatatatgtatgtatattcaatatatatgtatgtatatatgtatatatattcaatatatatgtgtatatattgaactttagtcatgtggtgacactttaaacagtacacagagcagcttctgggtccatgaccctccaaaaatttaattactgattctttagaaact

SEQ ID NO: 58818 - DNA, 1820 bp, Homo sapiens
gttagaagcctaagaatttttttcaatggaattttataaaaatgtccttgaatcacagatggctctccctggaaacataggtttgtttgagagtcacctcttttattgtcttaataaatagactaagagccatcacaagggctactgtggctagagaacatatgactcgggccgggcattgtgcaggcatttgacctgcattccttcaccccggttcctgtaacatgtacctggtgctgtggggttacagctgataatgctgaggtttccagagcacatgcttccaagtccagtggagaaaatcccaagaagtccaatattcaatgactgttccttattgcaaaataagcccagaaacaaagtagctgtgaacaggctgcaccagccccagcagcaatttccatttaaaccattttgcacagatcccgtgctcagcgctctcgccagtttctccacttgctgtttagtaaggccatcattgttggcaggaagtgggttccaccttccctgttgcctgagcacaatgtgctcctatgtggtctccactttcctgctgcctagttggctgggcttctccagctgggccttggaggcgacctttgtcccacatgccagccctccccacgttgcagaacactatgtaactgcagcgtgtgctgaatttcctcttctgtgctcaaccctagcaagagccagtcaaccctgaatgagaatgtggcaatggagctgtttttttcttttatccccaagtcacaagaaattggaaacattccattaagtggcgtgatttgagagggtttcgccaaatcttttcaggggagagaagccaggtgacctgatagcgatcaccttcccattcacggttttcaatgggggcttgtttctcaaatgaccaacacctgtaggcagttaattttcagcatgtcacaggagggcccagatgactttctgcctactgcttacgacaacatggactttagatgcctcatggcttcaacagctaagaattatgaaataaagcgagttatgggattaaaaggcagatagcagaactctcccaggagtagccagggctgcacaagtggtttgacgtgggatctttctcatctttgccccgggttgttgctgctttgaaggttaagtgctccagggatatttttaaacagcaggggctgattaatctaaaagtgacatttgcagtccccagagtaagcagctagcaggcttagattcaggccctcagcaaacaaggaacctggaaaatgtaaccctgaatgcacggtggggaggacatggcaagagaaaagcggcaggaataaagtggtaagtcagctcgcccctccccggggtccggaccattctgccaacgtccaggtaaattcgaacccaatgtatagtgagagcagaccctgtctgaaggcatgcacttggggtccccggggaaaaacgactcccgtcatgtttgaaggaagctaatcagaagagctcgaaatgtaacgcagatgaaagagaagggcctttctttgcttctataaatggtggtgtggatccctggacatgctcccatataagttccacaacgttttataaacaattctgttttttgcctccaaagctactgtcttaaggaatagtattctgtttctgtttcctcaaatggttgttctttttttttttttttttttttttaaagcagactaaggctgggcacggtggctcatgccacccagcaccttgggaggcagaggcaggtggatcacttgaggtcaggagttcgagaccagcctggccaacatggcgaaaccccatctgtactaaac

SEQ ID NO: 58819 - DNA, 1774 bp, Homo sapiens
gcattcagctgtaggttgcagcaggtggcttttgagaaacactctgatctgtgacaccccagatctacaggccgagtgcaggtgaaggtgtccaccagtcagcctcttacgccccagcagccacacttggcctgtccccatcagtttaattatctctgaatttgcaaaaggacattgcgccacttgctgaagggcccctgaccaccccctctttgtcccgatactgttgcttctctttcctgcctgggctgacctgtgtgtccagctggccattcgtgcccagtatagccaaacacaagttgtgctgagtctcaccctcccttctggacaggcgtctgacagatgaaccccttggaacatctgtcgatgctgttttcctgtctacccagggctgttgtgattacaggactgtttaaagcctgtaccagagatggagagttgggcaagagggcaattgcatgagcagtgaagtagggctaagtacagaaatgtggcaagctggagggaggtggtcctcaagcccacgaagcccctgggagcacagatagcctcttaactacctaagcttgaggtcaggagaaggctgagtgaggacctttgaaatggcttaaatttatgggtgacagataaaggcatgctgcactgccaacttgggggaacgctcacccatgtcggagtgctggccggtccaagccccacccccatggcctgatgcacgccaccagcctcccgctgaaaggtgacactctgccagctgggttcccttagtcaccctgtgggcgcctgtcagcctcactcaagaatggagctggtggctgcatccccagtgacggtaagtggcaacaagtgctggggagttaatcttggtgggaggaaaaatccaagcatggatggggattgctggatgctgacattctgtcccctctgtcctttaaaaacctcaccaggcatggggatgagtgtgctgtgggttgtggagggactggaaaacagactcctgactcccgtccttgccctgcccttgcctggtgactggccagcacttaccaggactgagcagtttctcgtgttcattgtggtgaaggccacgatcactctttcaacaggcagctgttgcttgggttaggtttgcaagacataaaaatagctttgtctggcatctggttttcgggtccgctgggttatttcagcgaagggcagcagcttgtcatgatagcgtccacagaggttcactggaagggctcgtctggccttccctgctcatggaatcaaactgcgtgatcggtgctcattcttgaccacggcccccccacgccaccgtctggcaccgttagtttgcatgtcgatctgcggctgtgtcttaaaggtacacagccaggtgtctgtctgtttttaggatcatatctacgcactccttgtaccacctgctgccttatggaatttacttatctccactgcagtggtgggacagtggaaaaggtatgagcaagggaaagttactgatccacagtttaccaagctgtaaaatggaagtcaaatagtgacaatgacaataataacatccattgggttgttcctttttttttttgagatggagtctcactctgtcacccaggctggagtgcagtggtatgatctcagctcactgcaacctctgcctcctgggtttaggtgattctcctgcctcagcctcccaagtagctgggattacaggcgtgcaccaccacgcccagctaatttttgtattttttagtagaatgaggtttcaccttgt

SEQ ID NO: 58820 - DNA, 746 bp, Homo sapiens
aaagtgttgggattacagacgtagccattgcccccagcttacacacagtttttgagctcttactctgtgccaagcaccaagctgggtacaaggatccaaaatgaatgacacttggtctatgtccccaagcaccacccagtcggtcagggagaacagacaaccgaacaagccacttccatgccatgttttctgtgtcatcatgatggaagtctgtacccaggcctcccaggccaggatggactgggcaaagagccccaagggagtggactgccgaatttctaaagcatttggccactgtggccagcagagggcatgagagggagtggccattcagcaggggtcaggtttagagggccccgtatgccctcctttcctggggaggatgtaggatttaatctgttgggcctctggggaagccgggatagcttttgcaacatttttggcaatgttctctggctgttgttaatttcaaaatttttcctgagggcatgtgtgagccagctgtttcaggactcggacctttcttgcagacaattttaaagattttcttgagaatttactatgcacaagagaaatagtaatagtatgaaatagactttgtccccagaggttcctagctcaccattcagaggcaaaaggagacgggaaggcaaggactaggcagaggagttgagaccagagattcacaaccaaagggcagttttgcctcccatgggacatttgtcaatgtctggagatgttttggt

SEQ ID NO: 58821 - DNA, 2686 bp, Homo sapiens
tggattgcctgagctcaggagttcaagaccagcctgggcaacatggtgaaaccccatctctattaaactacaaaaaattagccaggcatggtggtgcacgcctgtagtcccagctactcaggaggctgaagtgggagaatcgcctgaactcaggaggtggaggttgcagtgagctgagatcacgccactacactccagcatgggcaacagagtgagactctgtctcaataaataaataaataaataaaatgaggctgagcattttattatcttgtagagcttttggctttggattttggcatctttgggatccgtggtagcctggtgtttgctggttacccattgactcttttgcacacatacaggcagggtagtaatacctcttccctggtgttcacaggtcaacacccaagcagttttgggtgtaggccatggaaggtggtgtcaaaagacaaaatcacagcaaatttgatttaaaactcgaattggcttttatttacaattctaggatcatgcagcacctcattctgtaaaatagaatgggtcttccgaagagctgagcagagaggagcttggctttataggcagaacagggctgaagaaagcagaaacaagggacaaaggggagcttcatagtttctttctttttctttttctttctttctttcttttttttttttttttttgagacagagtcttgctctgtcacccaggctggaggctggagtgcaatggcacaatctcggctcactgcaacctctgcctcccgggttcaagtgattcttctgcttcagcctcctgagtatctgggactacaggcacatgccaccatgcctggctaattttttatatttttagtagagatggggtttcaccatattagctaggctggtctccatctcctgacgtcgtgatccacctgtctaggcctcccaaagtgctgggattacaggcgtgagccactgcgcccggcccgcttcatagtttcaaaatgactttcccttcagggttaaaacaaatgcaactttcttatcatgttggctcaggtacactggaccccttctgattggttgctattgttttttggaaaactggtcagtttcaaagttcagactgattgcgaggcagttggccaggagtgatccgtcgttttggtttggtctgtaggggctaagcacaggagctcagctcaaaatcatggcctcccatatattaaaattttgttttaattttttagatttggggggtacaagttcagttttgtcacttggatataattcccagtggtgaagcctgggcttttacgagccattgcttgcatagtgtacattgtatctattaggtaatttgtcattccttaccccttcccaccatgccacctttccaaatctccagtatctattattctactctttaggtccatgtgtacactttatttagctccacttataagtgagaacaagcataaattatatttaagggtggtgcatgcaggccagccagccagttgcctgtaaccagctggagcactgaggaaaggaagcctgacccaaaaaggcaaatacagtgagcaagaatccctgttagctgaatccaggaactccttctgaaaaaaaatattatttttcttgaggccaggcacggcaggtcatgcctgtaatcccagcactttgggaggccgaggggggcggatcacaaggtcaggagtttgagaccagcctggccaacacggcaaaaccccatctctactaaaaaaaaaaaaaaatagaaaaattagctgggcgtggtggcaggtgcctgtaatcccagctcttcaggaggctgagttaggagaatcacttgaacctgggaggcagaggttgcagtgagccaagaccacgccactgcactccagcctgggcaacagagtgagactctgactcgaaaaaaaaattattattattttttcttgataagttgctaaataatctgtatcctctggcaaatcttctaaccgtttgaggtcctgtttctgcaaaatggaagcaggggctagaggtttaagctagtccttccagacaggatccaacccttgccccatttccaagacaaacaactaaggcctgggagaagaggccaggggtatttatttgagggttctgactcacgtggaagccacagtgaagaagtgacttgtatttgtggatctgcttctgctctctgcagtttccttgggcagtcacttcactgctgctctgccctggaaggccacttcctacattcacctcttcctgccaggccagtagctgggagactggcaaggcaaggatggaaaatgcttgtgttaagtctgtgatttgggaggaagctctttctgaagcagtcttcaaggggctgtctccttcctgcagtgcccagagcatcccagagttctcacaactgtgttcctgttttgggagttcgcactgggttccctctgaactgaaacactctctttctcccaacccctgaacccagacctcccaccagggccagcttcacaggcatgccctgtgcttcaagggaccccgtgcttgttttgacgctttgttgtcgccgtcttgagattcttttttattttgttttttgagacatgatcttgctctgatacccaggctggagtgcagtagcatggtcatggctcactgcagctttgacttcctgggct

SEQ ID NO: 58822 - DNA, 1594 bp, Homo sapiens
tggaagcaagttccgtgaagccagggccatagttatagtggtctctgtttttccccactgcctaggctggtgctggctcatggtaggctttgaatatctgctaaatacatgaatgaaatgagctgcaacaagcttgccaaagacagaattctgcattacgggggaatgtaaaacatgtgatgaatgagtgtgggaatggatgaacgaatggatgaatgaatggatgaatgaatgaatggattaattaattaattaacaggtgaataggcattttatagttgttgctctttagcagcagtaaatttttgttttcataaaattctttctccttgtatcttgtgactttggagactagttctggggtgaaactccaattttaaatttttcttctgtctttgataggatcatgcaaactcagcctttctctcctttctcccagctggcaagggctggctgagaatatgaatccaacaacctcgttaagctctctcctcccatctcctcccctttgggttgatctcagggcagggattagaacttggcctttccttggacttggaaacagtccctgaggtttggaaatcccatgcaacacttagaaacagagctaatgagaacattacatgatgtggcaaaatcactgcttacatgctctgaaatgagcacggttacaagaacctcctgttctgtgtgatcccattttgttggacaaacagcatgtggttagtagtgcatagtgggcctatgatgagacactcaggttcaaagctacctcttcctagcttgtaccccgacttagtatgaccctgtggggtgcgcatgtggactgaatggaatgggacaggttcaggattgctgagattgcagctggaatcctgaaacttaaagctatgaaattgaagttcataaattagtggtgaactcatttggcagcaaaacctgtcctgaattgatgtgaggttatgtatagtaattatttatcctattctgctgctgaaatattaatatgataatgtggaacagaaagttttaccttcctaaaaacaataatttccaagttccaaaacatatcaggccctgggaatttcagataagggattatggactatatataacatgcttagaatagttcctggcatatagtaagcacaaaaaatgcttctgcttagtaaatgtgcctaataaatgtgtgtgtgtgtatgcgtatgtgtttgtatgtgtgtgtcttagagggactgtaaagagtgtctccaaatagtaaataatcattttatgtggtatgattatgagtgatttaaattttcttctgcattttctaactttctgctctaaatgtcattttataatgcattttaacaatgtataataataaaacagtataaaaatattgggagaaagagtaaaccaatcatctcacttcctagataggaagctgaagcccagagacattccaggcctctcagcaaggtaatcagaggcccagagcaccatttgaacccagaccctcgttagatgtggatgtgaaatcagtcaacgaactgctagtattagtgtcactgcctaaccttcccccagcgggtaagaggcttggact

SEQ ID NO: 58823 - DNA, 659 bp, Homo sapiens
tattaagttaatacaaggtacagagcaactaaccattcatacattcccctcccccttaagcatcattgccctattttagaaaaattattcacttctgctctatacttaatgtaacacagtcccccccaccccatatattgaaagagattatttcattttgcttttctgcaaaaatgaaggcaaattgtatgtggataattttatagttgaggaagtggagagacgggatttacttaaggtcatccgtgaggggaagggtaagttcaagcccatggatggcacagtctttctaccacgctgctggccacatgcatgcggattttcttgttgattttgtgtgtgtattgttcattgacctgggttttccctctgcaataccagtaagtaaaattgagcttctagtaagtctgagaggaagggcttaatgcatgagacagcaactaccaccatgcttgaactgtttcatcaaaaagcacaacaatggatgtttgtataaaggtggtgttgtgcttggaggtggatattaggttggtgcaaaagtaatcgtggtttttgcaatcccttttaatggcagaaactgcaattagttttgcaccgactgaatattattcatttctttccgtcttctattccctaataatgcaattagagaaaaatgc

SEQ ID NO: 58824 - DNA, 1225 bp, Homo sapiens
ggagtctcactctgtcactcaggctggaatgcagtaccgccatctgggctcacttcaacctccgcctctcgggttttagtgattctctctcctcagtctctcgagtagctgggactacaggtgtgcaccaccatgcccggctaatttttgtattattagtagagacagggtgtcaccatgttggccaggccggcctcaaactcctgacctcaagcgcctgcctcagcctcccaaagtgctggtattacaggcatgagctaccaggcccggcctcattcgtttattctaactggaatcggtttgtctgagttcaagaccctgggctctggcacttcagataacatgcatctctgggccccagtttccttatctgtattatagggataaaaacaataagattgccacgaggattaagtgacacagaggaacaaaggagcacttagtaaatgttagtcttaccagaagtttatttcggatcaccgggctgctggggtcctccctgtcctggaggcactcgcttcagtagcggacccaggtggtgcaaagtgcgtgctagaagcacactgggtgattgcgcagccacctgtcccagggagtggaggtgaaaagatgagagaaaccaggactttgggaaataaaagtcgacttgacaacagggacttttaacgggcacagtggcgacctctgactcacattttaaatttcccatattttccaccgcttccctatcgtgtgtgtattcaagcatatcaattgctgccaatatgtaggggtgtcccatattggggagcaaagcagaagagaggctttaaaaatatatatctccgcagctcatttcggctgccgaagctcagcggcgggtcggaggtaggccggcccgggggcggggctccgtccggaaggcggggccctcctggggcggggtcggtgtgggggcggggcctgggtggggcctaggcgggcgcgatggcccgggactctggcgcgcagggtgcatttcgggatggagcaagcgcagcgcgaagttgggcgcccgccggctgcagcagaaccccgcccgcggcgctctaggactgcatctcggcctccgggtcgcgacctggctgtcctgctgggtcccgggcctcgggtcggcttcaggcggttaaggggtgcatgctctgcacccctgcgggagcccggtgggattggcctgcggggtggtcaacatgagtcctgccaagtg

SEQ ID NO: 58825 - DNA, 1359 bp, Homo sapiens
ttttgtatttttggtagagatggggtttcgccatgttggccaggctggtcttgaactcctgacctcaagtaatacacctacctcagcctcccaaagtgctgggattacaggcgtgagccaccacacccggccactcctgtgcttttccagttctctgaatcacatcattgcagcaactctgttgatgtatgcatgaatttggaaaatgatccatgtgcctttcccttcaaggaacatggtggtggctttgaaggaactgtccatccgaggcgactttaggactaccgtggaatacctcattaacctcctggagaccgagagcttccagaacaacgacatcgacaccgggtggttggactacctcattgctgagaaagtgcaggtagggagtgagctgcctgtgtctcccctctggatggccgagacctcggcttcctgaggatactgaagtgcattttctcctaggcggagaaaccggatatcatgcttggggtggtatgcggggccttgaacgtggccgatgcgatgttcagaacgtgcatgacagatttcttacactccctggaaaggtaggggctgtggcagttcccttctgcttttgtgatatgtgttagcggcttaggaggctgaatctgtctcctttatttgtgtggccagttagtcaccaggcaattggtgagtctctcctccggtcttgcctctgggaaattcctctacagatcaacctaggctacccttgaagaggctgtgggttagggaatgggattctcgaggccagggtggcagtcagtgaacaggctgttgtgtacggatccatgctgacttgtgtaaggtacatcataatagtcaggagttctgagttcaaggaggtggatttgggaagcaaagcggcttaaaggtcatctctacaagcgggtgcattcccagaccctcaccagaatcagagggtcatcatgaaatggaccagaatggaaagcaaccaggcgatctctgttaggataggccggggtttctcagcctcagcaccattaacattttgtgctggatgctttttttttgtttgggaacctgtcccgtgcatcataggatgttagcagcattcctggcctctacccactaaatgccaggagcagcccttccctctgagtcatgacaatcaaatatatctccagacattgcccaatgtcccagggttaggagtagaataatcacccccagttgagaactgctgcaagaggcaaaggaactatcaaaaagaaaataaaaggataaacttttttttttttgagacagagtcttgctctgtcatccaggctatcacccaggctagagtgcagtggtatgatcacagctcactgc

SEQ ID NO: 58826 - DNA, 5362 bp, Homo sapiens
cactaatctcttttacaagggccccaccttcatgatctcatcacctcccaaaggctccacctcctaaagccatcacattaggggttgggatttcaacttatgaattttgcggggacacaaacgtttagtccattgcacctggctgctggtggagtctccagggctgcctcacacagagtgagagctggagacaggaatcagaagggagtctctagccccagaggacatgcagttgccaacacggcttgacagggactatataagcggccattagcctacccacagggcaggtgtggctcgctactccaggcctcccccagccccatcagcagctgctcccttggcaggaattgtgagggctgggtccgagagacgggggtgttcatcttggccctctgtggtggacaaccagctcttgtttgttgttagcggggcccagcagtgctctgggagcacatcctgaacccaggcggtgacaaggggcttgtccccacaggtggcccggcagtctctgaccatgttcgttctcatcatgaatggctgccacatcgagattgatgcccaccggctgaatgatggggggctcctgctctcctacaatgggaacagctacaccacctacatgaaggaagaggttgacaggtgcgtgggggtgcgagtcccactgtgggctgggcatgcacagctctctgtcctaggcatggaaaacacagcactggcctgtgtgcaggtccaagggtcttagagaaggtgcctttctggtaaattctgggggtgtgcagagaagttaatctcttggttggaattctgtgcaactggcagatatttaggggaggatcctaggaggcccttttctagtaacctggttggtggggattcagagctgaacgggacatgactcccagctctgtggcctgcgaggtgtgtgaccaggtgcctgctgcctgtgcatctgggctctggcatccacccagttagtgcggcagtgacctactaagctcctccgtaccaggcgctgtgctgggtgttgggatagcattctgggtgtgactcgtggagcttccagcccattcgggaagatgacacactgaacaaacagatagtggcaggaaagggtgtcgtgtacctgacgggtaacacacaagatgccctggaagctcttagcacaggggcttgtgagatagtgagataggccccaaagatgccccgcctccagtgtgtctgatcaccccgagatcacgcaatgaaacagaccccagccaaggtgatgaaaggggaggggatgtctgaaaagctccagttagagagtggagactctcttctcaatcctcaatgttttggaagaaggaagactaggtttatgccagagtaatattttgttatctccttttttttctttttgagagagggtctcgctctgtcacccaggcaggagtgcagtggcaccatcatgactcactgcagcctcaacttccctgggctccgagatgatccccccacctcagtcccccaagttgctgggactacgggcatgtgccaccacgcctggctaatttttgtattttttgtagagacggggttttgccatgttgctcaggctggtcttgaacttctggactcaagcagttggccagccttggcctcccaaagtgctgggattgcagtcatgagccactgcaccctgcctgttatctcttttttaacccacgttctatctgccaagaatgttcaggattactataggttctactctccccagttcaaaggttaagactttgaatcagtaaatatttgttgaatcatatccactgattgatttttctgtgtcaggccctgttggaagtatgtcagtaaaaggaaccagctttcagccaaaaaagggtcacatcctttttattattttattttattttaaagactggttcttactctgttgcccagcctgggcaagagtgagaccctgatcgcttgagtccagaagtttgagaccagtctgggcaacatggcaaaaccccatctctataaaatacaatgattagccaagtgtggtggcgtgtgcctgtagtcccagcaatttagggggttgtgatgggaggatcacctgaccccagggaggtcaaggcttcagtgaaccatgattgtgccactgcactccagcctgggtgacagagtaattatagctcacaatagcctcaaactcctgggctcaaaggattctcctgcctcagcctcctgagtagctgggactactggcatatgctaccacgcccagctatttttttttttttattttttgtagaggcagggtctcactgtgttgcccaagcttgtcttgaactcctggcctcaagccatcctcccacctcggcctcccaaagaaagcatcacagccttggccaggcacagtggctcacgtctgtaatcccagcactttgggaggctgaggcgggcggatcatgaggtcaggagatcgagaccatcctggctaacatggtgaaaccccatctttactaaaaatacaaaaaaaaattagctggatgtggtggtgggcgcctgtagtcccagctatgcgggaggctgaggcaggagaatggcgtgaacccgggaggcggagcttgcagtgagccgagatcgcgccactgcactccagcctgggcaacagagcgagactccgtctcaaaaaaaaaaataaaataagaaagcatcacagcctttttgttcacccacctcactctcagtgtctctgagataactatcaactgccaccctttgggaatgtagagggtacactccccctttaggaaggggaaatggtattgaaagccggactagggcttgctgagttggtagtcctcatcagtctccctacccgactcctcctctctcccagttaccgaattaccatcggcaataagacgtgtgtgtttgagaaggagaacgatcctacagtcctgagatccccctcggctgggaagctgacacagtacacagtggaggatgggggccacgttgaggctgggagcagctacgctgagatggaggtgactgcagagccggccgtggggaatcctgaaccctcaaactcccactcttctggctttgtcccatgtctgaacaaacaggcctacctctccccttgaccactgtctgcaaatttctaagggaatcagtctgtggatttcagccaaatcccctgaagtattcaaagaaaaaaacttcaggctgggcgtggtggttcacgcctgtaatcccagcactttgggaggctgaggcgggcggatcacgaggtcaggagatcaagaccatcctggctaacatggtgaaaccccgtctctactaaaaatacaaaaaattagccgggcatggtggcaggcgcctgtagtcccagctatgcaggaggctgaggcaggaggatggcgtgaaggcaggaggatggcgtgaacccaggaggcggagcttgcagtgagctgagatggcgccactgcactccagcctgagcgacagagaaagactccgtctcaaaaaaaaaaaaaaaaaacttcaaaaaatgcacatctccccaggaatgagtaagaaggttaatgacagagaaactgggtacagagaatatggaaactctctgtactatttacataactgttctataaactgttgtgtaaatcagtttccttgatttctttattttttttttgagacaagtctcagtctgtcacccgggctggagtgtagtggcgtgatcttgtctcactgcaaactccgcctcccaggctcaagtgatcctcccacctcagccttccaagtagttgggattacaggcacgcaccaacatgcctggcttaattttttgtatttttggtagtgacagggtttcgtcatgctgctcaagctggtcaaatacctgagctcaggtgatccacctgctttggcctctgaaagtgctgggattgcaggcatgagccactgcacacagccaagaattgattgataataacaattattgtcaatcaatgattaaatattaaatattgaccccagcaataattgaaaggtgttaagccaacacttgcaaagccataaccatgtggcaggtgctgttctaagcattttactgatctttattttttaaccttcccagcaaatatatgagatgggcacaaatgtgatccccattttataaaaaagctgggcccaggcaggctaagaaactcactggaggtcacacaaagccaggattcaaacccggaaaataacaacaataatagcaatgaaaatacatcaataatagtagctactgcatattgacctgctgcatggcaggatctgcatctcattcaatcctcgtaagagccctaagaggtgaaactgtcattattcctcattttacacttggggaaactgaggctcaaggaggggagccacttctgaagatcacagaggtattggtgggggcagttcctgggattctagtccaggcctggctgacttgggtgcccaagctgtgaactgccaagcaagagagatagcacagtcctggctctgcggccgccaccatggtgacaaagctcatgccacgcacgtatccagacattcgggaaaattaaaagggctgatgagcagattcttcatttcacagagtgttccctgagggttttctaagtgcctttaataaaacaaactgttcacaaaatgtttgatttatgcagtacgttttaggaacgtgtatatgaaccactctatgtaatatgatttaacagtatttctaagagaagactccccctttggaaataaacatcagtttccatatctgtaaaatgggcatcataaacacctccttggctggctttgcagattgaatggcacttgcctggcacttagcaggcttccagtaaaggtcacttttccttgtaccttctgcctgaacactacccagggagtcattctggcgcgtccctgggtagtgtcccggcgcgtccctgctccggcatcactagttctgggtggctctgggtgtcaatcccggtgggctctgtactatttcttctttttacgaaataggtgatgaagatgatcatgaccctgaacgttcaggaaagaggccgggtgaagtacatcaagcgtccaggtgccgtgctggaagcaggctgcgtggtggccaggctggagctcgatgacccttctaaagtccacccggtatgtggctccacggcccaagtgctctggctggtgcaggtgcactcgtgacctccactggttcagtgagacaggtggactcaaggctggtagcgcttctcctgcctccacctgcagacagagctcgtcgcagcagccaccgtgatggtgcagaaacacaaggaagccgcgc

SEQ ID NO: 58827 - DNA, 930 bp, Homo sapiens
caggctcacattttgtgaccaaactgatgcagcggtgacttggcaaactgggaaggtatgggtggggcagagagaggtctgttcttcgagagcattcaaaggctactatcttttccaggacaagttatgtttttctcagtgggattaactgactcaggatttcctagactgggttttttgcaatgttagtgacaagctggggggaaattccatagtcagatgagtttgggaaacactgggttaaatgagatctcataaacatctttattgcagaccttcttagtacctgtagcatgctgtattagtcagcgttctccagagggacaggactagtaggatatatgtatatatgaaagggactttattaaggagaattgactcacatgatcataaggtgaagtcccatgataggctgtctgcaagctgaggagcaaggaagccagtagtggctcggtctgagtctaaaagcctcaaaagtagggaagccaatagtgcagccttcagtggccaaaggcctgagggcccctggcaaaccactggcgtgagtccaagagtccaaaggccgaagaacctggagtctgatgtttgagggcaggaagcttccagcatgtgagaaagatgaaagccagaagactcagcaaggcagcttactccaccttctttcacctgctttttctagccgcgctggcagctggatgactggatggtgcgcacccacattgaggatgggtcttcctctcccagtccactgactcaaatgttaatctcctctagcaacaccctcaaagacacacccagaaacagtactttgcatcctaaagttgacacttaatattaaccatcacacatgctaaagtgcattgtgaatctctaacagaggctggcgggacagtgtttctcattatgtggccctggaatttttgattgatt

SEQ ID NO: 58828 - DNA, 1577 bp, Homo sapiens
agtgactagtgcagggcctggcatatagcaggtgctggaaggggtgtgtctctttccatcttgtcttttctgacatgaggtacacacctgagctgtgccactgagctccaggacacacactcagccaaccctacctctccaagcctctgctctgagtggtaaatggcgttcacgatccctgcctgaaatgatgcctgtcaagcagcaggtctcagggacagtaaatggaggcggtgctcattgtaaccttcatgaaaaacttcccccagcttctggtgcgatgggaacttggtgtcagaatgcctggttctgagtggtgtcacctctctgggcctcaatttccccatctataaatgggatctcacctgtaaggggtgagtgagtgatgtcattatcctttatctccctttgaccttctcacgagccacagagctgccattcagcctttattgatagaagacagttgctcaattctacacttacagtcttgatgttgcccaaacacggagtctttgtgaataacagtttcaacatcttatcaggggtcatgttacacaaagcagatgagcagtgcaggtcagacgggtagcactgggattgtgtctaagggtggtggatactcggtagaaagttccagaactgggaaaaacttaaagctcgcccttcaaggcggggcttaatgccaaaactcccaggcagctggctgagctgttgattaaacagaacatcctggctctagggttcgggaactcccagacaccaagtcaacatccatctggtggaaagagggggatggtgcgtgaggctgcagcttctccaattttgtctcagctttgctgggagagcatttttcacatttgactagctcactcccctgtctctcttctaacccagctatctgcggaacttgccacttggggagtcagtaattagcaaggagagaaaaagaagcataaaaacagctgcagggcaaagggaggtgaggaagtgccaataaatatcatgcgttgaagttttgtccaccacttgccacgtggttcgagctttacgtggttcagttggctttcattccatcaggggtgtcttaaatcccagtacaaaagcacccccctccagttcctccctctcccatcgcattttcccctttgaaagccccccaagcccccaaacaatggcaccgcccctcttaggtacatgcaagaagagatgtgaatcatgaacaggtagaaaaatatctggtctctaatacggaaaaaatgggatgtttcacagtatcaacagtgcttgctggttctaaaaagtagccccaggctgccaagggattatgagccagttagagatgtcattctctggcctgtaggagttaggatggctgggaggtagggagggagaaggagtcccattccagaggcctcgggatgggtttgcagaagtggggtggatgggccacaataaatataaataaatttacacaaggtcacggtacccggcatggcccaggaatctgcgctaataaaattctaacagactatcggaaaggtggggctgaaggccacctggaccggctcccatttcag

SEQ ID NO: 58829 - DNA, 601 bp, Homo sapiens
atttctctcttcccacttcattctctcctctgcgttgtcatttaggaggggtctgcctgacaaatattgccggggggtgggggttagatcaccattccagagattcagagacatgtcccgccctacctgcgcggcaactccgccctgattacaacaaggtttcgcctgccttcttgagatgtggtgggtaagaaactgttacatcactgaaagctgttcttgttcccaatccaaccattacacaaaaagggattaagcatttcatggaggtgtttatttagctaacacatcttttgtaaccatgtgcaggataaagaaaatcaaatacaatttagcaagctcagaaattcccagcttggccaagggtcagtgtagtgtgaaatgatttgattaggaatttggataaaagaatctttcctttctagaacaagagttggcttgggacttagaatgtgcatgtgtgtgtgagtgcatgcacacatgtgttttttagggatgaaactgcaagactgggaaagagtcggaccacagagaggctacctctcttccttgcccataaggtcacctgaggagctgttctctccaccctgagggtgaaggg

SEQ ID NO: 58830 - DNA, 874 bp, Homo sapiens
ctcttcccactccagccaagagtggccaggcaggaatgtgggcccaagagctgtgagctctgatgttccatgcaatgccagaaacccagatttttctgtgaattccctgatttttaaaggacggtaaactaattaaaacaaaacaaaactgtcatcaacccaccacaaggcaaacaaaacacatctgcagttgaactgggcctgcaggctaccagcttgaggcctctgtgctaccctacaccaagtaattttttctcagaaggctgacaaggcagggaaagaccgtattatctttctaccagttcttttttgaggggagctcattcccttgcattttccacaaataaaacagaggctcagagaggtgcagtgccattcccaagcagaggcagcaggactagaccacaaagaaaaagtaaggcactcataggaaaactcctttcaccagaattgaaaagataaatagaattcaactcagctgcgcagggaaggaaccttccacgttctgcctttgatgtctgcagaactcagctgcttgggaagacccagggccctgaaatcaattatccaaatgacagcccagagttcccataaatgaacaggcagaccgtgacactgggctccggctcaagaatgccgtcaggaaatgcttgtggcgaaagaatcatactttggacaaataagggcaagggagccaggcacactctccaggaggtttcaatcagcgttttgactttaagatactgtggttgctttcaaagcaggaagtgatccctttgaaagtcagctcaaatgcctagcacgtagaaagacaaatggaagtcaagcagctcctcgcatgtggggggtctctctcctgctgccacggggcacg

SEQ ID NO: 58831 - DNA, 2262 bp, Homo sapiens
cactgggactgattttcccttaagactgcactttccagggacgtgacaaacaagcaagcaagtagaaagaagatctgggccaatctttggtcatctctacccagggacaatgagctactcagggaacagacccttgaggatcccaagcagacaaaccccacagctgagagacagatcttgaaacatcctccgctccttaggcgtggtcacctctggcctcaatggaagttacagataggtacccaggcgccagctgaggcactgaactccgtggcgcaggtatcctaacctcaggcccctggcatctctccccaggattccaagcactgaacgcacatcagcctgctgggctctctcgatttctttccctcactgggccgtgtgttcagacgcacctgggagccccttccccacttcctggaaactcagcgactccagccacaacctccaaaacgccaaacgctccgccccaaggaatcctacctcaccttctcataacctgcccattcattctccttcataatcctccaaatcctcattttccacccccaaatgtccgttttcaattgatatctctttgttctcctcgcaatcaccaactcccatctccaaccagcactcaggactcacttggagacaccccttcctcacgcacacacgtatctactccgcaagcccaaatgtgcttcccggattcctaaccgccagggagcctccctaccaccacccccgcccctaattctccacccaaagcccttcccccaccccgggcctttcccctaaccaatcccccaaatgcctctccactatcgtgactgcccctcatcacaccccctcctctcggtcccttcttatactctgctgctgcccagctccctcggccgccctcaacccctagtccatgggcaccgccctccctaccatgaaaagtcggaggacgcaggagtctccaaacccggactgagagaggcaggaaacacccagctcacgccagccgggggcggaggcggggccggagcgataacttccgctgtccgcaccccacttccgccccgcagagggcaacgtcttaagccgtccgttgtgcgcctaggggccagttttctttccagcctccccggccggagtgggttccagcttttctcggctggggagggcatttatcccacctccgctatttcagctgccagaggggaggcaaggtgtggggaagttttccttcccgggcgaagaagctctgcggaactgtcattttccggaactggatgcttgcttcctggcggggttctgaaagcgaacaccgcggggcaagatggcggtagtgcgtcggctgctgccccgggtctggcagaactcgggtgttttgggctgagacagtggcagctgcggccccgaccccaagtgcggggacctccggcgaataaaggtcggcctgcgggtaggccggtagggcctgcggtccggcctgcgggagaactgggtcgtcagtcctccgagtggtggggctggggactttgagggagttggctctagggcacagtccctgcctggccaggtcggaggaacaagtgctgggatctggcgtgtgtgctccaggggctctttccgcggccctttccacctcttttcactttggggacggtaggcctttataaacggactaatgctgggtgatttgttcctgtggttgttgatgccgaggaaagactctgggccccaggactcacctaaactggagttcgaatactgttcgctcgctgtgtgaccttgggtgagttccctcacctctctgagcctcagtttccttctgtgtaaatggagtaattagcaggtttcacagagggtgtgaatacgttttagtaccgtgcctgacacctagttctgaataaagaaaaacttgatcgtaatttaactccagcttagcccccacaggcaatcttgcactctcaacttctctttgcttggccattctgtgaacgggggagccctggatcttgtttgttttacttagtgataaataactgttttggatatacatggattcagattcaaaagcatccaccttagataggctgtagctttcaataaatagtagctgttaatatgaatagtctctttaagtcgtgtttcctattctttaaataaaaattagattattgaggctggccacggtggctcacgcctgtaatcctagcactttgggaggccgaggcgggcggatcacctgaggtcagaagttcaagaccagcgtggccaacatgg

SEQ ID NO: 58832 - DNA, 489 bp, Homo sapiens
gagagagaagcaaacagaatggtttgaaatgagagatcaacgctaactgggtcttcccatatccgcctacaaggaggagatataaatgacgcactctgggcacattgtgcagggagggcgggggcccagccatcttgcacttaatggatggcacacgaggccagctgctgtgaatgccaaggactctactccagtgtcaaggctggggccattcctgcaggatgaggccattgccccggccctaccccatggggcagatgactttggactcctctctgagccggtttttgcacctttgagtgatcagggctcaggtgcgtgatcagtttgggtgtttcccaaactacagtgtgcacaggcatcaccaggggatctcagcgacgtgcagattctgactcaggagggctgggctgggctgggcccggggctctgcaggtctagttcctgccctggctgatgctgacactgctggactaggccctactgaca

SEQ ID NO: 58833 - DNA, 607 bp, Homo sapiens
ccaccctacctttgtctcccgttttggtgtaaatcttggggatcctgggtgtcttcgaggaaggctgtggcctaatgagaaataaacatcagtatctggtgagtggggatggcttacacagagggtcagctccttcagagggtcccagcttgctgcttgtaacctcagaggcagcacttaccccttactgcttagatggtcatctcttgttgatttctttcccctagatcctttctaatagcaaacattttgtgggcaagaccagagctggatgacagagtgtgtagagtagctgatgtaatgccttgctcaacaaagatgctcaataaatatttgctgaaggacttgattgatcctttgccattgtccctgcactgtgccaagtagtttacaggcattatcttctggaattatcctggaatctttccacaaccccaaaggtagccaacacctattctcttcattttactgaggaggaaactatggctcagatgagacaccttcctagaccatccaagaagaggcaggagtgggatgcccaaaactgtcctagaccagagcacaaactgtaacttctatcctaccgaaattatttatttatttatta

SEQ ID NO: 58834 - DNA, 1782 bp, Homo sapiens
tcaagcaatactcctgcctcaaactcccaaagtgttgtgattacaggcgtgagccaccgtatctggcctatgattattttgttcacagacagggtcttgctctgttgcctaagctggaatgcagtgcagtggcatgatcatagctcactgcagccttgaactcctgagctcaagtgatcctctgcctcagcctcccaagtagctaggactcttaactctatcctacccaaatttttatcttatactccaccaactcagggcctcttgcaggaaaagaaacctgagccacttccatagtatgaggcttcgagtgtactcagagatgaagaattgccaaaatacagctcaaaaagtggcattttcaaaaaacaatgtaaacaactcaaggacatagctcaaaattaaaatgtgacattacaagcccattcgaaggttaatttcctggatctgtgaactaaattaatccattattaatccacggtactctagaggttctgaggtctgggttgaggtgcaagtttcaaggaatatgaggaaagccatctttagaaggtgctggtgtatctgggacctggggaataaactgctttggagattggtcacaatctgagtcgagagccctcctggcccacatgggatatgccctgccctgcccgatgatagcgggacttcattgggacttaggcaaagactacctggtctctggcgcccacgtggcccacgttgccatggtgacgtcagaacagcgtggagacgtcacctgacggttgccgcggtgacctcacggcggtgtgacgtacccatggcgacgacaccacgattcacggcaggtgttcgagttgcccttcccgccagccactcacctgtccccgtcttccacgccctgagggccgcggctctggaaacggggatacaggagcctggcggcgccgaagcacccgcgcaggccaagacggctccccaggccaagacggctccccaggccgcacacagccatgagccaggctgcttgacgggacctgaccccgccaggttcccgtccagtccgcggggtgactccacccacagctggccgcgccaccgctcaggtttcaatttttattggttcgcagttctcaccccagggcgggacactcccagggacttgtttcccattggtttaacggaaggagcggggcgggaaaacccgtgtcggcttggctgcaacacctattgaccaatgttcaagcctattggtaaaggtactccgggctcgcgcgctctgattggctggcctgaagtacaacgcctcctccccttgaggcacgggcgctctgggttgtgggagttggggagctgctccggcttcggcgcggaggggcggcggccggggaggcggcggcggcggcaggtgagaggccggggtcgggcggccgggcggcgcgaggtcctagacccaggacgacgctgagccaggcgtccagcttctgtggctcagtttacccagctctgagagtcttgccccgagggatcggcgacctcaatctgacagtcgtgattttgagcttgacaagcaaggggattccccgctctgagcctcagtttttctaagaaatggggatcacgatagtacttagctcatagtacacctgaatcttagcgtaaggtaatctacgtaaagccttaagcggaggataattttgcgttatgtataaaagtgtaaattgcacacacctatagaccctgcaagctcctttctaggactctgtcctgcagaaatactcatttaagtgtgcaaaacga

SEQ ID NO: 58835 - DNA, 543 bp, Homo sapiens
ttctgccttagcctcccgagtagctgggaatataagcacataccactgcaccgtgctactacagtgaacacttattgggcacttacgtgtgccaggcactaagtgtgttcacatatgttagcactcttagaattcgccagcattccctggaagtaggtggtggtattcatccccattgtacagatctgaaaattaaagttcagaggtcaagtggctcaggttacacttgttggtgacactgaaaggattcagacccaggtttctcctagccccaaagtccaggctcttaacagctgttccatctcgattacaaagctctgaaatacctgggttctcaatgatgccatgacttggccatttgagtatatcattaatccattcaacacacatttacccagtacttaaccagtgcccgaagtttcctaacacacgcatgcccaattccatttcccagtcccttgagaatgtgacctgaggctcagcgagtgatttgtaaaggtgagctggccagaaaggctctgccttctcagtgtctcagaggaa

SEQ ID NO: 58836 - DNA, 1194 bp, Homo sapiens
aaaatagcattttcctattttggggggaatggggagaaatcttggggccctgtctcacaccccctgaatcagaatctccgggggtggaactggggcctgggaagctgcagcttccacgagctccccaagagagttgtaggttcaggatgcagagccgttgccgtggagtttgcacaccatccaggtggcctcccctctggcaagaactcttgcttacagggcccagatgctgtgtcctgggccccaccttcaccatgtggcttgtcgggggaagctggacagtctggagggagggggacccaggaatccaaggcctggcaagagcttcctggtggggcttcggggaccttttgccctcctgcaccttttgtaactgaagctgggctgactcattacttagcctctttcctgaatggggcaaaatgaacccaacccaaagttcaacctctctcccaagtagcacagatatgttagcttttcccacagctctgacccactggtttttctctttaggaggagccctccgataccatcaagggaagatttcatccttaaagaggtaacctgggggtggagcagcacattcagccatggctgcattgatgtgtgcagggggcagagctctgcacctttgggaagtaccataggaggcaggtgtccctggctcttcatcccccaatgtggccctcacagtgcactagctgcaaggaagcaggggtggtggggaagacctgctctctccttctccccttcagctcttaaattgcagagatatcagaaagggaaagtcatgcatggctgtgcccgtagactctcagctgctcattcattcattcctgtatttgcttagtaaacaagaatccattacttcctgtgttcccgatgatgctgcactggggcgtaggaatggagagatgaagcttgggtacagtttccaaggactctcagtctgcttgtgggggtggggccagacacacacaaaagccgccacaggacaatgtgagagtcaccatgatggaggcacacagggcagaggcaggatggaagcgggagggaggcttgggaggggcttggagcagaagtgacatttggagactctcagcctgttttatgtttctgtgtccctcccgctggaatcattggaatcacaaacgtgcatgtgcgatttcagcattctctgttctgtttgcgatt

SEQ ID NO: 58837 - DNA, 1354 bp, Homo sapiens
tggcatttcattccttcagtgtctcctgagagccacttgtggcctaagcactggactaggccctggagctagaaaactgatgaagacgtgggctgggcaccgagtgtacggtctactgggggcatcaggagatgaatgaggaggtttccaaggggggcgggcaggggaacggccaggggaatggccaggcgttgctggtgtgctgggcggaggcgctgggtccacaggcctaggtttgagtccagctctcccacttgccagctggtgccctcaggtgagtcacttctcccagacctccagctccttgtttacttagggggatcttgaacatacaatcagaagcggtggctctgaagtgcttacctgtttgctggccgagttcattcatcctttccacaagtatcattaagcacctactgcgtgctgagtactggggcctccgcagggaacaaaacaaagccccgcctccgtggaactcatactttgttgggagaggagaaaaaatcagttgtctgtgagagcatatcaggcagtcttaagcacctttaggaaacaaggcagggtcagaggctacaaagagaaggaggggtccgattggatgggggttcgggggctgctggtgaaggaacattgagcagaaacctgaataagtcacgccgctatggggcggggctggtccctggcagaggaagcgcggtgcaaaggtcctgagacgagcacgctgcctgccgtgtgacacagtagctgggaggtcagagtggctgagtggagtgagcagcctggggagcgaggagagaagaagaggctggggcagtggccaagcccggatcacaggagcgcttaccaggcttaccccctgcgtggtggccgctggatgggtatgagccctggatctggtggggctggtgacaggcctgtctgcagaggacttgtctaagaaagatgaagatgcaacacccaaactcctcccgcctggctagatgggagcatggagcaaaccaacctttgctgcctgctgtggggtgccacgggagcagatggcggcttcacagagaagctgggggccagactccacgttaatcccatggatggcttaaggagcttccccccaccaaccatgcgtggtgcctctctgtaaagaaaaaatgcattgtttgtgaagtggatcaagatgcggcctcccagaacgctgcccttttgaggaatggcttgtcttagaagggaagagaaaagccaaatagaatgttcatcttttgtaaagttaaaaaaaaaaaaaagccagcctccaaggctgagaatcgatattaatttcatgggcttatgggcagtgagataaagcaggtttctggcagcc

SEQ ID NO: 58838 - DNA, 963 bp, Homo sapiens
ccagaatcacaagcacccacgagagcacagacctgtgtaagacaggaaagcagaacctgccatcgctcctggggcgcgccttcctttctgaaatgaactggctggatggagaaaacagactcaaatgttctggcccgggtgcctggcactccccacccccgccccccaccggccctatttgaactttatattgcagtcagcttggtgctttccgaaatgccattagccatcaggaaacccttgtagttggtgccttgccagccagaacctctgggacccacggacctgcaaagaggccgagtggaaaggtgggggccggcgcagggatttcaggatgaggtgaaagcgattcagtgcgcgtctgcccttggccactagggggcagctggcggccttccctgctgttgtcttcctgcagggtgagaggagcaggagccgagctccacccccacgccagccttgggcccggcctgggatcactgctgggaacgtgagagtgaagggaggacgcctaccccagcttaacttgtagaaatggccccagatcactgatggctgttccctgccccttcccttcaaaacacaacgcataaagcagtaatactaattaatactgaacgctcactgtggactaggcgtgtttacgcatcgccccttctcatctctgccccgacctcagtgtcattgctagtctcatccccgctttacagaccaggaaaccaaaggtcagagagatcgagtaactggtgcaagtccacacagctcatcagcatctgaggccggattcaaatggactccagagcctgctcttagcccctacgtgtgtctgctgggtgcggctctgtgtgcaggctcactgcgattttttagctttctgtgctcaggctcgtttttctggattcggatgtatttgaccggggtggggctcggacctgcatgttttcctccccacgcgattttaat

SEQ ID NO: 58839 - DNA, 781 bp, Homo sapiens
ctgaggctgagggaggttaaatgatgtgtctgcagtcacacagtgaataattgccaaagttgagatttgaaccagaaccgtcctgctcccggtgttccctgctacatccagagcagtgccaggacagctggcgggagtcctggctgaggattctggagggggtggctcatcagccccagaaggagacagagaagagtgagggacaggcgggtaggatctgccagaagatgctctggtcaggtcggggacagaggctgcctctccaacctcccacttcacaccaaccaatgatttcctgcaattatctggaaaagattaattagtaaagtgcaccatattgactgaaggccgccccggcgatcgataacttgggaaagtctcccaggtgcccagagaaaaaaaccgaactggaaagtgggggaggaggctcattttgcaaccctggggttgtccactcggctctctgggtcggggccagctctgcgtgactccctcttggcttcaagcaagacctttttgcctctctgaacctgtttccccacatgtaaagtggggggctggactgacccctatccagggatcttccttctactggaggaagttctgggaggagagcaggcactctgggggtaccgggggctgatcgggtggctgctgtggagggagcccccttctctagggcttgactttccgctgctgatgtggaagacagctggagaccaaggacgcctcagggatccatggtggctgccatctgagggtgaaagagaatgtctggtct

SEQ ID NO: 58840 - DNA, 1229 bp, Homo sapiens
ggtgaagcaacttacccgaggtcacacagccagtttggtttcatatttcaacctatttgacctggggcacatcttgatgtatcactggtttttatgctgaacataaaggcagcaggattgttccttgtcacaaagatggtttaaaaggcaatgagacaacactggctccactaacaatggcgagaacatattttaaggccatggagtggcatctctgagcgataatggtttacagaacaactccaggcaatttagtagatcccctaactcctggatcccagccagaaaggggctctgtggcaagggcagccagaaagggagctctgtggagctccctgggtctgagcccaggtctggggctgcgggagggagcccagtgcagctgggcaagaagttgggacccagcctatcgaagacgaagggcccaatcaatgctatctccccgggccatgcctggccagacattgatttctactgctgttgttaactccctgtttatgtaacgcctgaactttgcacaactgaaccgtttaatgtgcagaagagggcctgttgccatgaaaaccaggctgctcatggcagctgggatgcagcggtatccctgttttattggcctgagctgaatgtattttaaccttgataagtcaataactttttgtacaaaaggaaatctgccaggagggcttaggaggacctgggagagcctgctggcctttccaggttggagaggaggcggggctggctgggtttaatcccctggaaatatccctgccactcacagcctgggagaaccatgcccagctggccagaggacagagagaaccttggagggggatggtggggaccacccatgcctccaatcactatttcctgtctggtaaggactgcagctaagtcagacacccactatggcaaagaaaccgaccagggttcaaatattggctccacacactcgggagctctgtgtgaccttcagcaaggccagtgaccccagcctcagaatcagcatctctaacacaagccatcagttcctcttcacgggcgtgttgcaaagttaacagatcatgtatgcaaagcacctggggtaactcctggtcaacaatggggccttcatagattattgttgttgatatattttacaataataatcattgattatatttgtagaacacattaggctccaggaaatgttatatccattttctcattacacgcctggctaattttta

SEQ ID NO: 58841 - DNA, 798 bp, Homo sapiens
gcctggtgacagagtgagactttgtctctaaaaaacaaaaaaacaaaaaaacagagaagagcaagactagccttacatacgtgggagggtgggaacaaaagttccagcctccaggccccttgagtgatgccttgattaattgaaatggcaattaatcccatttcaaagatgggggaaactgaggcacagagcggctgagtcatatggctagtagcccagtcagcctgactctactcccttctcttaattctcctcctctacgtgaaaacaaaacaaaacaaaaacttgggccacattcattcagtgattcagagattaagtcaacagaccttcattgagtgctgactctatgtcaggcctgtgctagggaataaaatgaactgaatgcagcctttgccctggaaaagccctcaggccagtgggaagcctgacaaagaagtgggccattataacacacactggacacatctgtgaagggggaagtgctccagcctggagcagggtagtcagggaaggcttcctggaggaggcagcactttggctgaactctgaaggaggagcaagagttagctacctggagggagggcattctaggtagaaggaacagcataagcaatgacctggaggtgagagaggcacgtgcaaggatttgtaggtatttcagcaaggttggtgtgtgggaggcaaacaagaacagtgagagatgagatgccctctgccccctgccccctcagggcctgtcggacccctggccagagccagtgttccggggctggcctgcctggtggttttatggac

SEQ ID NO: 58842 - DNA, 2102 bp, Homo sapiens
acagtgccttgtcccaaatatgtgatcagtaaatgacactggttttgccacccctagtgggactacaaaaaccagcacgccctgcgcccccagtcggggcccctccacccggcgccggcgcgcagcatgccgggagttgcagtcctcgcgaggcaagttccgcctcgtccctgcttgggggaggaggttggagagccgccctgccggcctttgaattttgccgcgaaaagcgcgcgtggcggcccccggctccgcccctcgcaggacgcggtgccgcgtcaccctggtaaccgcctctcagccgccgctgattgggctgggccgcggggggcgggcgggggacgagacgcgggggctgctgccggcgctcgcgcctgtcagtcgggccagagcggagcagcgggcaggactgcctggccggctgctccgcggagaggctgcgcgcgccggccgggggaggcggacagccgggcccggcgcctgtggggcgcggcgcgcggcacccgggcctgagaccaggcgaggcgccggcgcgcgccagacggcgcgaggctgcggccccgggagcccccgcgcgccgcccggggccatgggcgcgtgagagcccagcgcgcgcggcccctgctgcggcttgcgagctcgcacacccggtgcacagtcccccgggccgtcctcgtgtccgtcctgcgccactgggatcggctgtttctcagcgccgaggcccccgaggctgcatccgagcttgcgtcgcccgctgccgccgccgccgccgctgccgccgccgctgttcgccggcttcccctccccccacacccggggctcagagcaggaggaggaggggccggtgcattctcgccgctgttctttgcaacctgcaggggccggtgtatgtccggcgaggagccggggccgctgcgggtgcgtgcaacccccgaaggagacaatccctccacctcggggcgaacccgggggctgcaagccgcgggcgggcgggcgagcgagaggaagcaacaaagacaggctgcagctggggctggcgaaaggggccgcggccgccgggctcccagcgcgggcggagagggcgccctgggagcggcgcgggccgagctgcagccttgagcggggccccgaggggaggcgcagcgccgcccgccggacgtggcgatcacgggccccggcgaagatgcgtcgcctgagcgcccgcgcggcccccgtccggggcgggcgtgacccctgctgaacggagacctcccctcccccccgacttcggacggcgcaggccggcgccaggatagccctcaccgacagcgccccttcccacccggagagaggcatcgacccccaaggagggcttcgtcaggcagcctctgccactcctgcatggctgcgacccgtcgagcggagcgtcgtggtagctgagacctggtgcccttcgacggcctggctgatccggtgagttgtgcggggcggggttctgcgctggagctgggggcaccccctggcgtccgggcagccaggattggacagaaggggtcctaggctgttgggggtcctgaagcagagataacccttgtccgcccctttcctccctccaaacacaacttgttcagatgggccagccgatgggagtggaggttggggggcccattcggattccgcgggaccctgggcgggttggttgccagagaggaaaggtcaccccacccgtaaagctaacaaaggtattggctgtgtcatccgaaaattccccgggaactccagtgtcttggaagggctggggggtggggggcacccaggatgggaaaacgttgagggtctcccgagcagcctctgagatcttcaagggaaatcacctcagagggggatttggggttccagaaacgcaggtggccacgtttgagaattgtgccccatggggctagaccttagagccctcgttcaaaccacgttcccacaaataactcgcagggacggtaggttccccagtgggggcacgacatgacgtcaaaccttagcctctgatgtcactggggttgccgtggcaacaccacttgccttgacccaaggccggagggggcggggtcgtggtaacaaggggcggg

SEQ ID NO: 58843 - DNA, 859 bp, Homo sapiens
cctctctgaagggtgtttttatccctgtcatgtgaatgaagaaacttagcctgatgatgtgaagcagcagccctgggccacatggcaggcccacagaacccccttcattatccacacaagcttttgcctcttcactgcctgtaagggtactgggcatggtaggatcctcgggcaggggccgaggggacgctgttctgggccagctgtctcctttatgagcttcacgaccttcagcaggtcaccttcccccacccctcccaacccagactcagccgcgtccttcataaatgtcaaggatggcaaatctgtggcaggcctggcttgccttatgccgctgtgcccttggcagacattgccaatcaattgctgccctctttccctgctgagttcttcccctgaccttgggttccttccagggctctgggcaggcagcgccaatcaatcagcagggcctgtgagctgaaaccagttgcctgcctggcctcaatgagctcagggtgcctctggcccgtctccatgtggctcagaggaccaggggggacagcgagggattctaggggatctctgtgtatccaggttgttcttaagccacaaaagccttttaggtgggagggtctgttaccctcttctaactcccacttgtgttcatccatgcagattccgagcactgacagtctggatgatgataacagcatgtatttagttcttcctgagagctaggtccttcctgggcactctctcgttcatcattctgcagaacacctgcagcaagcctccctgcacctccagggagaattcttaacccattttagagatgagggaactgaggcttggctcagctaagcagagtagggtcacg

SEQ ID NO: 58844 - DNA, 690 bp, Homo sapiens
cgagctggcattcagacccaagtctgaaagttcacagcctgggacagggctgtaggtggcaggcagacaggggagccctcccagaaaagatgtcatttttttggaggctttaaaggctggtgggcttctgacgggcagagccaggaagggtgaacgtccgggtggagggaacagcatgagaggcagctcagaggcaggcaggtgagagtgtttactaagggagcagtgtgtaaccagatgtggctagaatgtggagagagaggactgtggaaggagccagggctggcctggatgtttggactttgctttcccatagtagggagctctggcagctctttcagcagagtaacagtgaggtcccgtctaagagtacttattcaacagctctgtgaatcctgggtgaggttgcttggggggctaccttcagtctactagaagctttggcctagaacagtgcctagtgcacagtaggtagacatccaagaagtattgattgaatgaataaatgaatgaagactccccggactaaaatgctcctgacctccccaggggcccagctgcaaggaggggagagaccagagtcctcctctccaggcaaagttgaacaccaggcctggcagtgacgggcaggagaaggggccaggcaggtacctgggacagggcttccccttcaccactcccctaccctgc

SEQ ID NO: 58845 - DNA, 804 bp, Homo sapiens
gtggatgggaggggtgcaggccactagcctctattctggaagccctctgaaaaggttcccaaatgtgggcagcagaagcgcaggcccttgagatattcttagtatttgccttgatttccctacctgcgttcaaagggacataaggaggccaggccagtttccctggggatgaggaaggagccagttttggcccttggcagcccttcttggcaccactgtagattctttctgccaactaggccggaggttctggcacctcagtcttgaacctgccattgcactttgcccacccaacccccattatggttcgccccacccagccacccttctcctgtcctgggtcccgggcccagtccctggcagggccagactggtgattagctcctttctctccatcattagacccgcagtcagggcacccagcactggccaagtccctactgggcagggaagccctgccaagccccaccccagctgcctggctgtgctcccactcctggcgaaggctgggggatgcccggagagggagctggcagggctgctgtgatgccgcatcgcatcggcctgggccccaagcccagagcaggttcctgggcctccgcccctcctcctgaatcttgtcccgccctgtcccacgtcccatcttcctgtcagtgtggagctccccactcccggttcagacaactgacaaatccagccatgcaaagtgggagtttaattgcaaacagtttttacggatcatgggcccatctgtgccaccatatgcaaaagagaaaaaaaaatcccctttttttttctccccac

SEQ ID NO: 58846 - DNA, 1470 bp, Homo sapiens
cgaagtcatttgtctggcattgccttgctccagaaagggggaggcaggattagaacccatgcatccccgggacctgcgcctttgatggacactttacaaagacaagggaactctgggagggagaagctggagaaagaatggagtgggggatgggtcgcagtccctgacgaaccaccagttcaccagctctgggcaagtcacctggcctgcccatgcctcggtttcctcacctgaaaaatggcaatgatcctagcacctaccccaagggaactgtcgtgagggttacatgagataaagcatgcaaaacactgagcccagtgcctggtacagagcatgcattcagtcaagcatggctgctgttggaatcatcagtatcagtgtactatttattagtatcattaggggaacagatgaacaaaaggactgaggaccaaggaaggcaatgactcctagagaaggcagagcggccagatccagagccttggaggtagactctggcagccacctcgaagtggcggctgctgggaacagccggctgggagctcaactccttggccaggcgaaacctactgcctgccaggctaccccacggctcccaggcacttggcaggcggcagcagtaggggggcatcatgccatgcccagcaccttccctggccagcctgtatttacctagcaggtctcggcccagcccgcttcctgtttgctgcacagtggccgcctgtccaggacagacagagccccagtgtcctgctgggcccccaccccatgcactcacaccacccaggcagggcaggtctggggtgactcaccgcgccccacggagggcaaggccagcgtggccacggcagtcatttggtcattctgcaagcccttggctggagggaggccggctgacagcacacacagatgcccctctgagctttcacagggaccaagtcatttccaagggtcccggcccctgggtaggagccaccaagaagcggtgtggcttaatggttaagagcatgcaccttgtagacacaaaaggccacatattgcaggattccatttatatgaaatgcccagaacaggcaaatccacagagacagaaagcagattagttgttgccaggggctgggagtggggagtggtgactgctaatgggtacagagtccttttttggggtgatgaaaatgttctggaatgagatagtgctgatgtctgtacaactctgaatacactaagaaaccaactgaattgtacgttttaaaagactgagttatgagtatgtgaattacatctaaatgacccttccaggcttagtgacctcaggcaggtcacttccctcccagaacctcagtttccttgttgcaacatgggaatgtcatggagattaagcacacataaagggtttcttttttttctttcttgtgtgtgtgtgtgtgtgtgcgcatgtgtgtgtgacagagagagacaggatcttgctct

SEQ ID NO: 58847 - DNA, 605 bp, Homo sapiens
agaacccaggcaagagatttcaccctctagacctcattctgccctctgaaaaatagagacaaaaatagttttgtatccaaatgtgctgagggtgcttgactcagtgcttggcacacagtaagtgctcaataaaggcttgccaccatcataatagttgttaatgcaacccagggttggctaaagccagacagaaccttgtacccagagttcataacagcagccacttatctcaagagatcggaattaatctttaacaggtgaattctgctccaaatgggcgatgtggagcattccagagggcccactggcatgaaataaatgttatcttggctccccagaccctatctgtgacaacaagaggagctgttacctgggtccctataatttggagaacggactggagtgtctttcccaaagtcaaatgggggaaactgaggcagacagcagggtcaagggcctgcatggagtagagacacccacttcatgtagaccccatccccctaggaacagaggaaggaactcaaaggactttgaccatctcaaaagtatttgttcagacaaccatgccatagatactgactgagcacctactatgtgccaggcac

SEQ ID NO: 58848 - DNA, 1107 bp, Homo sapiens
ttccatgctctacccacagggagccaccagcaggaaaggcagctctgtatgcatctctgtgttacataaacaagcacgctgaagtgggtttggaagcatctggaggtgggctgcctgcaattagcagtggcgtcaacctgggcagtggcactgaagcagtggcatccacagtcctgggtttgaatctcagctctggtgtgagtttggccaagtgacttaaccactccaggttcaggcccttcggtttctacagcccagaggtgctatgcaaacaggaagtgctctgtatatggttgggctgaagcctgtttcaacatcacccacccaaggctctgggcttatgtttgcctttggtgcagtccaaggacatcaagtcacagaaaagccaaatgacttgcccaggttacactccagggagtgccaggaactcagacacaattccagagccaaagctgcttccactacacccttaacctttctgtctagaatgttaccattctttgaactcaaagaatgtttctttgaggtcctgtgaactcagagaaaataggaaaccagaagacgattttaattcccaagcatgtggtggcttttctaatagtttattttatttatttacttattttattttattttattttttgaggcagagtctcactccgttgcccaggctggagtgcagtggcgcaatctaggctcactgcaacctccacctcccgggttcaagtgattctcctgcctcagctccccagaagctgggattacaggcgtgtgccaccgcacccagcctctaagagtttaaattcaagcctgtgcctgctctgaatacagcatgacatgtttctaccaggctctcaagccttccctttcctacagaatgcagccttaaccccaaattacccttcttgtttgaccagttttgcagttactccaaacttgtttttttcaattgttgtcagcaaacagcctctttgaaatgccacccagaacctgtctgcctggagggagggaagggacttggagggttttctagttcatgaccttcagggagaaaggaagctgtcttttaaacattttttatttattcttcttcttcttattttttaa

SEQ ID NO: 58849 - DNA, 1838 bp, Homo sapiens
gggaagagggtctgaaagtggaccgccttcccaatgcgcccaggaacttccacacgacatacaggggaggggcttcctctcgtagagcccaaactgagggaggaattggtgccaagctctgtatgtctgatgtcacctcacaaaacagctcccccgacaaccctcacccctgtcctaaaaggaggaaaaactttaggtggtttcccctagaaagaggccctggaattttgcaactccatcttcaaaaccctctccttgtccccgcctcaccaggcttcctacccttggagggggagatgggagtctttgatctggaatgggcgaattctgagggaagaaggaagggtttgtaggtcccatgagggagaggctggaagcgttcaaagagaaggcttatgaaatggggggattcattgtaaggggagcgagttgagagccatcagaaagcgccagggatgaaggactttggggaagaaggggcaggaggctttgggggagatggtggattacagaatgcctaagggagatggaagatcatccgtgttgggggcacggatgatcagggggcatttgggggatatgtaggactgtgaggtgtctagggagagggaggatttggggaggacaggcaggatgtgacatgtttagagcggagaggacttgggagtggtccgggaaagggagaatttagggtgagtggagggaaagaggatcttgggtgcctggggaaacagtacttaggggtgtctagggcagagatggttaggggatgctcgggggaaggaggattcgggtgcgcgtggggctgcgggccgcctcccccctccattccggctcaccgaagaagggcggcaggtgggacaccgcctcgaggaagggcccggtctcgatctgcttgtccgcgggcagcggcttcagcaagtgttcggccagcagcgccatttcggggtcgaggcccgcggtgatgccccagccggcgccgcgggcgtcgacaccgcccccccggccgccgccgtcagcgccggggccgtcacagccgcccgccgcaggctccggggacgccagcgtcgccacttccgcccgcacggcgccctcgtagccgagcgctcagcgccgcccgccggccgagcgcctaaactgccgggcgcgccgccccgcccccgctcaccggctcccaatccgcgcccgccgccgaggtctccgcgcccccattggccggggggccggccgggggcgggacgcagaggaggtgcgccggttcatgggtcccggagggcccaagtgagccgctcccaggtgagtcttccccaggtgtgcctcccgccgcccccggtttggccccccaatccgggcgggccgactcgggccaggtcacagctcacaacccgcccaccagctcgggttacagccccacccagccaacgctccccaggacccccgtttcccccaaaattgtaccccagtaaccccaagtgacctgggtggacactgctctcctgttggtcacggttctctttcgctacaaccgacgaggacgctcgattgcttgattcttggtcttcaatgaccttatacctgttgaacactgctgaagtcacagtctaactcagccactgccctgctggacaactcctgcttcccgaaatctggggtccagtctgccctcaacagtctgatgttacctgttgtgaggcagaaaaatagggcctggaggcagggaacataaggctgacttcctagacctaaatcaaaaagcaccttagcaatgacaggaatgtaaacggctttgcaacttcacttcatcctctccattcacgccctttacactttgtaacttc

SEQ ID NO: 58850 - DNA, 1778 bp, Homo sapiens
ggcagggtaatcgcttgaacccgtaaggcggaggttgcagtgaatcgagatcacgccactgcactccagcctggcgacagagcaagactctgtctcaaaaaaataaaaaagttaccaataacttccatctacttatgccagcaggcctctgcccaagttgtacattgaacacacctggggaattttggaaaacactgatactctcagatgggatttggggtttggtttgggcatctggattttttaaaggtatctggattttttcttcttttttttgagacagtgtctggctctgtcacccaggctggagtgcagtggcacagtcatggctcacggcagcctcgatctcctgggctcaactgatcctcccgcctcagtctcccgagtagctgggaccacaagtcccaccatgcccggttaagtttaaaaaattttttagagacaggagtccctctgtgttgcccaggctggtatctggtgattctcacgcgcagccaggtttgaggaccactgacttacattctcttccccctggtttccaccttcaccttcacgtgatggtaaccaccatcctgaaatacgtgtagtgcatggacggattctttgcctccatgcttccctatttcaaggagcagcgacgtttgctatttatctcccgctggccacgacggggcaccagagaaaaacacaggctccctacgcgctgaaggaggcttggcccttgcgacgctccgtcgtcgggctcgttgccggtgcaaacagggaggaaacagccggcgttgctgtagcgcgtctgggaattacaccgggggactggccggcccgcttcgtgcctgcgggaagtcgggccgggggactcttcggaaactccgagcctcagagaaatgtgagtcggagggttggactaggccggatccggcgttagggcgggggcccgcaggcggcccgcgcgggcgggaaccggggcggcagtcagcgggcgcgagctcagggcgcctccggggtcctcactgcgctccccacgcgctgtgaccccatttgttgcacgtgcatgttcaggtcgagagagggatgcgacgtgttcggggagcagcccaccttgtgggtggccaatccgggacgggaatcttaaacttttaactcttggtgcaaagactgatccactggcggctttacgggagcgggaaaaaagtatgtgaagcttgccacggtctcgagaccgaggtcacacgttagcagcctgccggctacatttggaccatagacgcagagtgtttgcccccaaaactggaggacctccagaatgagattcttggcgtgcaccaggccttttcgctcattcagccggcgttcctacccaggcactgcatcgaccctacacttgaggacagcttttgggtcaggggaattggtgcctggagtgagactgctctctgctttcaaggctccagctgtatccctacattgctcaggcaattcctctctctaggtctcagcttcttcatctgcaagatgaaaggtctgtcctccatggtagcccaacatacttccgagtgttattatcagtcccctccccggggactgccagagccagggcaggttggtcccaacaggcagccccttgcagcagagagagcctgggctctggtctcagacggacatgaattaggaacccagcttgtttatctcctttacttcctggctctgtgatcctgagcaaatcactttgtaatgcttaacgttgtttttactaaccttgttttttaatgccttacctt

SEQ ID NO: 58851 - DNA, 1487 bp, Homo sapiens
tcagtggtgtcagctttgaacatgctaatctgcctggcaccaccccattttagagactgtcacttggaggccctgaatgctccttccattcctcacatgcaggctgctccatggtgctggatggattagagttaaggggtcagcagggaatcgtgttactctttggcatctggcattttaaacaccattcaccacgtccattctgcgcagggtccttcccttctggtgcgccttcatcttccatggacattctataagctgggtgtggtgtgagttcagctgtctactctttgacagagattgtaaaatctgaccaaattccccaccagtgccaaggtttaagtccacaagcaactgtttgcaccagaagatcattactttttcagtagcaaacccattcaatgttaggagttactttcaatttttatttagaaagcaccaatctgtgaaaaatacaccaatagtagttgctcctcttcattaattagcatcttttccaagcaactgttaaatgtgaaagatcagatacaaatcatgctactttgtcaactttatgtatattaaaaactttacccaactttgaaatataatcaatacatctttgctaaataaacaaattccatatactttatattaatcatgccaaactgctgtgaaagtgtgacttactgcctcttccacaaaaagaccactcattctgtttctctgaagagcaagccattacagaatgatagaatgcttttatatcacaaaggctggcagggtatagctcatatctgcaattccctttccagggaaagaacagctgcaaagcagctgacaaagcagccctgaacatttctacattccaggatacagacaggcatgaagtgcctgttgaaactattcattagagaacccagggcctagagtgaaatggtcaaggttcaaggactgaggtgtgtaactgacacaggtccctcaatggggcactggtgcatgtgatcacgtgtttgtctgtataaaaagcctctgtggcagttatttagttaaggccttgaaatctgaaactttatcctaacacttttcatgcctggattttgtctgaatgtgttctcatgagcacaagttcttggtttcaatttttaaaaatgttagtactctgtatttagagagatgtcttcacataaattttaatgacgtttatcttaataagaaccaggctacacttttttatttggaaggagtataagggaaaataaaaagttatagacaattcaatagtttcagaaatcaaaagcacttctaagaattgatgagataatcaataagcaaaagcaaataatttcactttgcatttctcaaagaagctcaagacatttgctttcagagataatgaggctctctctggtgatttccaaaaatactaaaagaagcattgttagattttaaaaggtgatgtgcagcagattgatttacagtggcaaaatcagcatgtttcagaaata

SEQ ID NO: 58852 - DNA, 2050 bp, Homo sapiens
tacaagttagtagtaaaaactggtgagcaataaggtggggatgtgggatagggctgccagggtgggagcagggtttgaatgctgataaacatgcccctgcccagggctctcattggctctgtctccatggtgtgatcatccttccctagcaatgggaagaatcacatccatggagccccatccaggtttccaggaagcacagaatagtccaagggttattctaatgggcacaaatgcttaaatagatgttaggtttctcctacctggggaacttactctggatatatttcattttaaatatccaaatacatcctgcttcaaaaagacaacttggcccaaagatttctaaggctgttacaataactgtttttctttcctcggaccacatcacagtgcctgagattcttccttgtactatgggattaaagcgtcaaccgtcctggcatttattaacatgttacctttttctgcataattctcagctcgtcactcaagttgttattcaccttcattagctgctgtatcttggcctcagaagccactagagcgtttttgacctccataaattcctgtacagtgactggtccatctgataaatctgaatctaggctctaaaaataaattgggaaaacgttcacaatctgagatgacgagaacattaaagactaacagctcaagaatttcaaattctgaccaagccagctgaattgcaaagttagtcaaaccaaatcaaggcctctgagagtaatgcaaaactaaaacataaaagtagggtcactatactatttaaaaaatttgaaagtcagtattttctaatagaacaggcagtgaggctacacatctatgctgacaatgactgtctaaggaggtctgtcctgtcttgtaagcctttctctcgttcactcttgttttgtttttattcattctttcattaattcattcattccaacattttcattgaacattaggcagtgttctaggtgcttgggatatattagaaaagagacaaagattcctgcttccatggtgtttatattccaacagcatgagagagtatatatattgcatgattgagggtgatgagtgctgtgggaaaagataagacagagcagggtagggggctgcatgttaagcggggagctggggtaagcctgtgagtgggtgagaggtgagcagagccccaggaggtgaggggatgagtcacatgaatctggaggaagaacattccagcctgcagtggagctcagctagagggagcaggtgtgtgggatggactgggcaggaggccaggcggttgacagagggcctggtcacagagggtcttggaatgacctcggctctcactgagtgaaccaggtggcttccgggaagtctgcgcaggggtgtcccctgcatctgctaatgacgccatctttctcacagtcatgtgggccgaagaactccaaacaaatcttctataaatctgtctccccacttcaaccttccgacttattgccaagacttttctattctaccttcctattcatccattctcaaatgattgccaagcccctctgtgggtgtgtcctgggggtcagcagagggtgcacagcctggggtcctgctgccctctcccccagctcacactctggtgccgaggtctctcccacccgcaccatcctagcatgggtccttaggtggcctgcatcagctccagtatggatctctccctccactctctaacccaccagaagagtcctccccagacatggcatcctgggctctgcactgcctgtgaggcccactctcttccgtcgggtgtcatacccctcctgctgcagcttcgagtcccaacctttttaggctgtccctatgcatgaccagcttccccttagatgccctggtttcactttctttctgactcctccacatgccccaatcccaagcgtcccttgaggcgcatcttaagagctgtcctatgacacagccccacctgatgctcccagccatagattctctctctgctcactccctcagcctgtgtgtgcttcgtatgacacacatcactttg

SEQ ID NO: 58853 - DNA, 1722 bp, Homo sapiens
cccctatattgctggtgattttgcgtttgtttccgttgtaatcaacgtatgatttagatagtcaaatatagctttaagggactacaagagttctactgtagacagcataatgcaaaaaagaaaagccttagatgatatgattctacgagtattcattgaatcttcctcaccactaagcgtgatactcccgattatcctcattgaaaaaaatgaggaaatcaagcaagtgaccaagtgaagtcaccagcccaaggtcagccagaagcaaaatctagtttgaacccaggccgttcagatcctcaaacttgagacaagcactgcctcctaagtgctggttgtgtttggaagaccccgatctcctggcaattctcccgggcagagtagctgtcggatgtcagcagcggggaagtcatctacggggaccctctggcgagtctcagggagtgtcatcctccccgggcaggacacccaggcggagaaagggtctagtgggaggtgacacctgcagcctctggaggctgcagccgggaggacgctcacattttacttctgtaattggctttcctgtggattgcccaagccccttcctgttgggggagcagccctggcccccgtcacctccccagttggcctaggacggagggaacgggagggaacgagagggaagggagggccgcgagggacggggagggcggcggccccctgcccgcccggctctgacaggcccgggacggttcccaccccaaggccgcccagggacctcttcgttgcgaccctagccgcgggatgcagcctgacctgagggggcggccccggggtaggggtccgggccaggaaagcagaggggagcgggcccggccggtgcgactcacccggcccgctgcagtcagcgcacacctcgctgctccggagccgtttcgacatggctcccacctcccacctgcggggaactagaggccgggggacagcaaaggcggcggtggcggcggcgcttccgctctaacgggtcccagctgcggcggcgctgacggcggcgcctctcccctcagcgccttgcagccttggcacagcacgcacgcgcggggaggtgcccttcggcgagtgtcaggtcatgtgaccggaaagggcactctgccttgtcgccatcttgagtgagggcaggagactgcccgagtatcatctgtcctacctttaaatattgaatttgggtcttcttctctggcagagattcccctcgtcccaactgattaataccaggggaagtagcaatatcttgtgatgagaaccctgcagccacaaccttcctgaggcaatcaatggtcaagttcattcattcattccttgattcaacaaatgtttatcaagcacttaccatgctttatatactgtcccagccactggagaaacagcagtgagcaaagactgaatttctagtccttatgaagcttgcattttactggggtaaagtaaaataagaatatattatatgattccaggctgggcgtggtggctcactcttgtaatctcaactctttggaaggctgaggcaggaggatcacttgaggcaggagttcgagaccagcctgggcaacatggtgaaaccccatctctactaaaaatacaaaaattggccgggcgcggtggctcacgcctgtaatcccagcactttgggaggccgaggcgggtggatcacgaggtcaggagttcaagaccagcctggcc

SEQ ID NO: 58854 - DNA, 2060 bp, Homo sapiens
agccataacctcaaatccaaaaagctagcttaaaaatgacattcatacatggactaaatcaccaccatagttagctattgaatcataacccggttcggagttcaaatagaagcggttctcaactgaggacgatttttctccccgagacgacatttggcaatatctggagagacatgttttggggagtgctactggcattgagtggggagaaagaccagggcaactgctcagcatcctacaaggaccggacaacccccacacaaaaactgcccagttcaatatgtgccgaggttgagaaatcatgaagtagaaatatccccttttatgcaaatactgtatttgaagccacttcgccagggtttagcgttcctccttcaaaaattgtccggtgttgcccacttccaaaatggcttttgacccgtcgtggaagcatctgtcctgctccaaaaaggctgcaagggtgtcggcagctggaatggtttggtccggggctcagttgtcaccccctgacttcagagccaatggaagaggcccagttgtggaccgaaccacatggggctactggagcagggggaaagaagctggggacaggtagacggaactttccgcgtggagatctttggccaagagaatgagcctcagctctgttctgtgggctgcactgagtttctcggtgtgagctggaggtgggtgcaatggcgcggaccccggacccggtgcccaaggtcgcctatccccgccgcggcatgcggtggttcgctctccgcacttccctgtttggggcagttaggtccgcagaagtctgtccgcgagctgtcagcgcgggcgggaacgccgcggggcgcggggtgggcgcggccgacctggtccctgagccggccggcgaccccggacctcccgcgcgccccgcacccgaccggctcagccggccggcagcgtaacacgccctacgctcgcttgctcgccggcctcagggcaggcaggcgggcgcgggagaccccgccggggccgagacttggggcgggcgacgaggaccaggttacggcctcctcgccatgtcctcggcctgcgacgcgggcgaccactaccccctgcacctcctagtctggaaaaacgactaccggcagctcgagaaggagctgcagggccaggtgaggggcggggcgggggtccgtctcccggtggggacttcggggaatcgggggtcgtttcgcctccctgagcccatttccagccctctgtccccgggatccccagaccccttccactttgcaggtgtgggacagtcctaataataggacacgtatcgagtgcttaccgtgcgacgggctttttaaatatcttctctcttcacctttccaataacgctggtgggtaggtactgttacttttccactggacagagaaggaaacaggtcctcagacgctacgtgccttgtgcgaggccgccccgctgataaatgccaagtcgggattttaactcgggccggctggctccggaatgcaccgtcttaaccatttttaggttctgctgcctcaaagacgtaagaatagcacactctccttgttgtaaggaagggcttggttggttttggagtccaggttctaactcgccctgtgaccttgggcaaggcattttccctctctggccgacgttaacttagctgtagaatgaggatgttggtgctggggcagaacccaacacttgactctattgataggtctggggtgaggtccaggtgccgcatttttaacaaactccccagggaggctgatacctagcaaagtttgagaatcacgggttctcaggctccttaaaatcccttcctgttctaaagtgctttgatgctttaatcttttcattattgctatctctttaaagcagtagtgctctcagttggaggtgattttgcacccacgaccccccggggacatttggcaatgtatgggacatttttggttgttgaaagtggggagtgggtgcttctggtagtgggtagaggccggttatgctgctcaacatcctacaatggccaagacagccccccgcaactaagact

SEQ ID NO: 58855 - DNA, 627 bp, Homo sapiens
gaataacagctagcatcttaaatcaaaataaagcacattttctaagatgtattatggcatttaaaaagtttttacaggctgggcatggtggctcatgcctttaatcccagctactagggaggctgatatgggaggatcacttgagtccaagaggtcaaggctgcagtaagctgtgatcacgccactgcataccagcctgggtgacagggtgagaccttgtttaaaagaaaaaaaaaaaaaaggttgtactttccaaaagtccatggcagtttgttgtattcttggaagaactttcagagtcacattttttaggcagtgcccaggcattgagacttagctcacactagagaaattgctgcgtggctctggacacgcggtgcaggtgccaaaaggggggcgagagtggcagaataggaacgaagaggtaagagccaggtgtgcatgtctagcatggggaagaaaacccttgatgggatggatggaagtgacgcatgtgcacttgcctatttctttgtgagtagatccgcatacgtgcccggcagatcatgcttgcggtctgaaggacccacagatgctgctggagtttatgtgctacttcaaggcacgtggaactcaatacacaataat

SEQ ID NO: 58856 - DNA, 796 bp, Homo sapiens
tgtgttgctctaattaatgcataaatatgttttctattttttgtacttgaaatatctgtcaagcacatttccctattttaatgtaatacatccaattatgtaaatgccagtgtttccttcacagaatgtggaggctgtggacccacgaggtcgaacattattgcatcttgctgtttccttgggacatttggaatctgctcgagtcttactccgacataaagcagatgtgacaaaagaaaatcgccagggatggacaggtaagtatacttttacaataatttaaagtccgtctgagcaccatggtgaaaccctgtctctacaaaaaaatatgaaaattagccaggtgcggtggtgcatgtctgtagtaccagctactcaggaggctgagggggtaggatcacctgagcccggggaggttgacactgcagtgaactgtgattgcgtcactgcactccaccctgggcaatagagcaagaacttttctcaaaaaaaaggtcattcattttagtttctgtttctgaataaaggccagtctcaatcatacttttccttggagtcatctttatcttaagatttctctcttgggacaagggatggggacaaggaaatgggagcccaggatgatgcaggttgcgtcccaggccagaaaccctcggtagagaatgactcctcatccagaaacagctctcagtgcaaacttcttccaccatacacgaatgtggaggccagttttcccctgaggaatatggttacctccattgaatccatcaaaataggcaaaaatcaaaaataaatt

SEQ ID NO: 58857 - DNA, 1996 bp, Homo sapiens
gggatgtgatgtcctagacaaagggtagggctggtcagggatcccctgtgagagggagcgtttcccagggcaagctgctttgaaaaagaatcagagcctcctggctgcttttggttcctaaatacattttttttcaggagtatgttgagttgaataactgagattttgggcatattaccaatgctgcatctgccactggaatgctgggctactttaaaaggagttccacagagatggaattaacagctgggctaaaaaaatctgtttttcacatcctttgccctgctgcaccaaacctgcccaaacatgtgactcagctattttgcagacctaatggcatctccaagcagctcaccacagtgatgagttcctggcccacctgctcttttgtaaggagcaggatggtctgtgcctcattgttctaagaattcctcgagtgagatgtggctacttgtggagatcccaccattgacatgcatgtccccagttaagatgacccagataaatgctctgacctggttaccaccttgtggcaagcccttggatgctggtcatcttcagtcacttctttgggactgctgtccaataaatgtcaccacctttgtcctcaatgctggcagttttgtaaagaagccaagattggaggctttctatgcctggggtgaggcaaattgattaataactgtgggaggagggtggagggtgcataagccatctgtcattgctaaccgcctcctgtggacaataggaccatgatttccaagtgtccttcactaacttaagctgggggggaaaaaaactataaaggctacagatataaatctgaatggcatattgtacatgtagaaatttgtggtgttcactttttatcagaactaaatccggattctggggctggaggacagataaagcagaagttgttaatggttacgaagcaaaggtaaaaggaaactcttaaaataagatttaatatagctatttagcttctatgcaaatgaggaatctgttcccatttttttcatgcatctgtgccatggagatgctctggggaatgagaactgtctaatgtgtctctcacttggatgtttgattttgtcttatttgactttcagaaaatgggatagcatgccctgaggaggtctgtagctatgctaaagagaaacaatatggtagagaaatgagtacaggtaccagttgttctggtaggaatgacaagctagtcattcccttaattatttaaaaaaaaaaaaggaagaggaaggattagacttcacatgtgttcaaatgttgtgtagtagcttttgagtctcttttttgttaaatcagcttaattgtaatcagcaggcgcacagcccatttgcatgacatcagtgcatttaaaacatagttgtaatagtggagacgattgttgatccagtcatctggcattttgtcagctggaaagctgtttcctggcctttcagtccctcagtacaacagggattgatggcttttggtgttggagcccagtgctgcagggtcctctggtggcctctgagtgagcaaagaaaggcttacgtcatgctcagcaagatacatttagaagcacttgtcatagtgctgagtgtgttttctgcagctttgaatgttggggctcctcacgtggcatatagagagaattctttgttaactgttatgtttgattttctagaccaccatattccccagttatccttgataacagagcatttgctctggcagttacaataatttttgtcagtgcacagaatgccttttaaatagtgacttgctggttttctctacagctcataagtctatagagaaccttgtgttcatacctttctcttctgcccagcagatggctgtctgagtcatactagtattacaagactaccagcggaggctgggtgcagtggctcacgcctgtaatcccagcactttgggaggcccaagtaggcagatcacttgaggccaggattttgagaccagcctggcc

SEQ ID NO: 58858 - DNA, 2257 bp, Homo sapiens
tttttacagggtttctaggacattgtcattattcttcctccatctatctgattccattccttccacacccagctaaagttagaggagatacatatagaatctattttagattattgttaactatttgcatcaaattaagatacacaaatggccatggatgttgccttagccttaaacattactaatagtttcacatcacctcactgcacgcatcgaaggatctgatttgaatttgtaaaggcaattcttttgagagcaggattctccaggctaaatcaaaggcagctaatcctgtccctgaaggagcagctaggggaacctgaggcttgttcttgaagtgggcaagctggccaaaatattggaacacacagaaccaaaccaggtgtgttctacacctgcatgagtgaaggatttccacgtagacacctaggaagagcccgcatgccctagactcactccagaggaaggattgatttgcaaccagaaagggagctgaaaaccacggagctccatggctcttcattcaaaagggaaaataatgattccacgttgctttttagagttcaaatcaacatctttctggataaatctattttttaacaatctttttattatttgtaaaagatataaaaacaactcccatcagtagcaatacaaggttatacattttaaccagattttctcaggccttttttggatacctttagtagttaactctcttttgtcaaaccctcttgtatataaccatcgcacaacatacagaaccctggggaatacagccaagggcactgctcactgtggcccgtgtattcattcccacaggctgcactgaaataacctggtaaacaacaccctcctccattttgcgtctatttcttctattgtgcttctttggggataggaagagaaacataactactgttccaggtaacgtctgtatcatacagttagtgttgccagtgaaacgttcccagatacaaagaattgtgcttttaattccatttcacaatctgttttgttttttttttttgtcattgtctgaccaaaattccttctgcacatgaggccagtataggcaacgtcacatttgtttgtttcaaatatgcagtgtggtattttgtttactttgcatttaccgtgagcaaagatacttcttggaatggctgcagtgaggccgtgtcattggctcacaaaagtgactcataggtaatttctgtgtttgcattccactgctctgctccctaaggtccttgactttctccccaggaattcacttaaaaagggactgagcattgtgtcaacctgttgcagtgtttttcatatatgtgttcactctaaaaatgcaaataaagactgcttccttagagggtgctcatacaaaattccagtctttgagtctttttccttttcagttttttctagtcactggatgtacccacacttcctgttacgtatgtcagtagaacattagaatgcctcacttcgctcagttcatcactgcaaaggtggcatgctcctcccagccttcctgcccaggttaacaagccccatgctgcttgtttcaaatggcaactaaaagcaagccagtgttgggctgttctgacacctctgtggtcctcctggaggggaactggctcttgtggggtaagggaagcccagccaacatcaaagctctgcatcaatgctatcccttgaagccaactgctttgtgaggctgttcctagaagtccagatgataaggcttccaaactcttcctatatctaaataagcgggtattaaaaacaacaaaggcagtggccagtagaaatgtatgggttccagaaatgaggctgtatttctgggaagatgtaaaggagctgctttgcttttaggggaaagtagatatcaatactttgaagccacaaggacactatgaagaaaaccattactctttcaggtcaagaggtgcaatgactatggattatttaaaaactgaaaagctaagcttgagtggcccaatatcagcaggaagtggttttttttttttgtttgtttgttttcctgagacggagttttgctcttgttgcccaggctggagtgcaatggcgcgatcttggctcactgcaacctctgcctcccgggttcaaacgattctcctgcctcagcctcccgagtagctgggattacaggcgtgtgccaccatgcctggcttatttttgtatttttagtagagacggggtttcaccatgttggccaggctggtctcgaactcctgac

SEQ ID NO: 58859 - DNA, 1942 bp, Homo sapiens
acagagtgcccactgagccttttacattccaaatctggaaagctgcctcaagtttcagaccgtgggctagaaagactcaaatgcagggcaagggagatcaatgtgtttaagcaggatggggtcctttttgtaacaggccaacctagtaacatttccagtccaacttcagagcattccaggccaaaggtgcatatagtaacaggtctacctgatgtgaccctgacttcagggggagcacctgagtgcagggcaggatgcaggtgaggaacgagggcccaagatccccacagctgacaccactttgcaaccagcgcattctaggctaactcaggtgagattaaaaaaaaaaatctgtgattcttaacccactgtaaccaaatggttcttaaatagggaatgtctgcatggtaagtctccttcttaataacattttcaagcattaatgatgagttctttacagtgtggttcttacaggcactcacaaggttaccatgttttctttctcatgaacactccatctttacactgacctttggagctttcaggtcttacttttaacaagtacagtcagaaacactgagaagcggactcaggggccaattatttgcgctacagtgttaggaaaaaataatgtctagtacatgttttcttctaattcatttagcatttaccaactgtccagaccaaaggtcatttccaagtaggaaagttttggttccaacttctccactggcctgtgtgcaacacaacttatcctattcccaaatactcattgaagaacttgtctggctgtcaccgacgccgaatgggcttgtagacacaaaatgccataaggatgacagtcaccagcaggatgctgaaaatggttcccatcaacactgcaaagggaaaacaggttacttcctaatggcagctccaggttaggcaattcatccactcactgccaatgatttatcaaatgccacttgctgccaggcactatgtcaagtgctgtgcaaacagctgtaaacagatcctctctccagttgtctctaaatatagttgggggagaaacaaacagatgagagcatttcacatagcttgatataccgtgaaaaaaaaaaacagtaacatgctagggatggagacagggtgggcagcaagaaggggggacagtcaggaagcatccgaggaggagactcacaaactaagacaggccgagtgtggtggctcgtgtctgtaatctcagcactttgggaggcctaggtgggtggatcacttgaggtcaggagttcgagactagcctggccaacatggtgaaaccccgtctctactaaaaatacaaaaattggccaggtgtggtggcatccgccagctactcaggaggctactcctgagctactcagctactcaggaggctgaggcaggagaatcgcttgaacccgagaggcggaggttacagtgagccgagattgcgccactaagcgacagaatgaaactccacctcaaaaaaaaaaacaacaacaaaaaactgagaccttacgagtgaggctctgcagggagcatgctgcaggcccacagatcagctaaggaagggccttgaggccagtataagcccaatacactcagtgaacagaagggaggcaaccaggcaaggagtgcaggaagagaggcaggaaatcaggccagaaaggaaggctggggctggtctgtgcaaggccttggagaccatgaagaaaacacggattttaagtttaaagagaagccactagggggctgtaggcaaaggaatgacatcatctgatttagtcggaaaaaaaaaaaaagattcctctggcttttgtgtggagaattgtttgactataggggagcaagagagcaggatgcccaactatgcctttaaagccattaataaaaacctggagattcaataaagtatttcagtctcaagatgagtcttgac

SEQ ID NO: 58860 - DNA, 1518 bp, Homo sapiens
cgtgccacagcactccagcctgggtgacagaggagacactattgtaaaagaaaaaaaaagggctgcaaaccgtacgtttctcattaagttattgtaaggctcaaatgaattcgcgtatacaaagtgcgtagcacaagacatgggatgtaggaaatgctcaaaaactgttatcatttttgcaataaatactggctcctctgggaaagaagaggggtggggtaaatgatgtgccttgttgcctagcctgagcccacactgccagagaggagaggacccagaatgagacccaggtctcccgattgcagttcattcatgggcaagcagtacatattgagagcttactggacaccatgccaggcttgagaccagcctggccaacatagtgaaaccccatctctactaaaaatacaaaaattagccaagtgtggtggtgtgcgcctgtaatcccagctactcggcaggctgaggcaggagaattgcttgaacctgggaggcgaaggttctggcacatattgagcacttgctgagaggcaaagttcaggccttctgccccaggcttttggagagggagtctcggggccccctgaggggcctcacctgcaccccccgcactcacccatctccccactctatcccctgtccgctccgtacatgcccggctccagcacccggagcagtgaaagctcaggcactacccgccgcccgccagcccgagggccgctcacccaggttctgccctcgcagcaccgcgtacggccggctccgctccagcggatccacggggctcggggcctctgcctcccccaccaggaggctgcagaggccaaggtacagccacggtaacgctggacgcagcatcttccccagccctgcagaagcagagaggccacttccgtcgcaagccctgcctctgtctcctcccaggtctctctgcgtcgctgccaccgcccttagggcgcgcgtcattgccatggtaactgtgcgtcctggtctaagttccgcttctgcctaagatttgttccggattaacgttcctcaataactaatgtttcccccggaccaactttccgttcagatcaactttccgtctgtgccaacgttcgccgcgattaccgttctgctgtggttagcgttccctcatccattggggtcgaggtcttgtaggtccatttggggcctattgaagattttttacgaatccatgcattttcttattaaaccttcattacgggcctggaaaatagatactgtgtttctatagtacaaatgccatcttctcagggagcccttgcccagacatccttttctaaaattgcaaccctccctttcccttaatgtacattctccctaccttcgttctcttccattccccccattcactttagactcatcaccatttaccttatacatttaacgtacatttgatgattttctgaggacctgctccgccctagcatgtaaagtccacgagcacagcgattttgttcttgctctctgctctgtcccagagactggggg

SEQ ID NO: 58861 - DNA, 1010 bp, Homo sapiens
aaagcaaacatgagccaccacgcccagccccagctctgccatctatatggtgttaccctcatcagcatggtcctaagtggttcccaccaggactcaattctaaacagaaggctggaagaaaaaggaaaggagaaagaaggggcatgttcctcccttgaagggcatgatctatcactgccacttgctggtcattggccggagcttagtcatgcagtcacacctacctgcagtagaaggtgggaaatgcagtccttattctgttgaccatgttccccaccgaaaatcaggacaaccaaattgaggacaaccaagaattcctgccaccagtacaaatgaaacagtcctctgacctggaactgaatgactagcctgtcctacacgtggaaggaactctgggttcccaggggatctgggcggctatgaaacgtataacatagctcagccaggaaaaagctcccagaagagaatttatttgtctgggaaggtacaggcaaaaaatgaccattctgcatttttccgagggaaagaggcccaaccaacctcatgtggtttgttctgtccagcttggcactgacagaggctggtgggggctaggggagggtctgaaagttcagggtctcaggtatgaactattgctctgaccaggtgctaggttgtgtcctgtaggaatgtgctgggtccctagatgacctcagaggtcactgatttcacaagatccacaaacaattcaatattcaaatatttaactgtagcagagatggatagatttttttctgccatgcccaacctccccctctagctcaacctgaacgcaacagaccttcatatctatagctgtggcttattggaccagggtggacagggtggatcagccttccctgatccaccagctgaaagagagttatgctctcctctgaggctccaccatacctggaatagacatctcttggtagcaccatgcttcctatgttttcagttgatatggcttaggtcaagctgtccccatccac

SEQ ID NO: 58862 - DNA, 2675 bp, Homo sapiens
ctgagtgacagagtgagaccttgtcttaaaaaaaaagagagtctgcacggagagcacagttgactcacagtcctcattcccattcctctggatccaccaagttcacgccaaggccatatttcctcagatggctcctagccaatgacagcacagcgggggtggtagcacagccccactgctgctgacctgagattcatcctaccagtgactttgttcaggaagccctcatcagtccagccaaaactttctgagacccgcattgctgtctgcagctcctcctactcactctttccttccccgtctctttccccaggtgttagcccagtatcccagtctgaagacgtccgccctttatctttcacagggattcccttgataaatcccctgcaagtctgagcctgtcctggcatctgcttcccagaggatccaaattaacacagataacttccattttgtaggatgagataatgaagtctacaaccatccaaactcaaaatcatctgttgtcaaggaaatacagtttcacattgcagtggtaaggaccatgggctttgggtagaccagggtgtgagtcctacccaccagcggtatgacctttaggaaatgtcttagcccgccctgaccctctatttcctcatccgtggaatcagtgattcttaactgggaacaattttgtttcctccgggacagtttgcaatgtctggagatttttttggttgtcacaactagggggaggggaatggttgcagctggcacctagttgggtagaaggccagggacactgctaaatatcctacaatgcacagagcagcccctccaagacaaagattatccagcccaaaatatccatagtgcagaggttggaaaactctgtgttaaatggggatgataatagtaaactaactcaaagaactattgtgaggactcaatgggatcatgtgttcaatatccctcgccttccttgtaaactccacaagggcaggaaccagatgatgtagatcaatgttctgtatcatcaatgactggatcataaaaggcgcaaagtaaattattaattgttgaaatatttatcaaatgagtgcaaatcaacaaatgctaattgtcatcatcatcgtcaccattgccatctttccagcccctggctcagtgcctgaggcgtaacaggtcctcaatctttgttgaatgaatgcatgagaaatgaaggattatttactcattaactactaatctgtgtgctttggagagatattggaaactcttgagaaataggcctggccttttcctttttatttgcaacgaggaattttgttcgtcaaataaatgaccttaaaggattgagaccgctgccaagccacagaatcggagtcgagaggcctgactcagagtcacggagaggttaggacacacatcttgcagggcttaggcaaaaaaggaaaatgggccaggctttgtgcgaacttgctgtgaaacaagagctgttttcagggctcagggacaagctctgtcccatgtttaatttcttccatctgtctggtatctgacctctgctgccctttaagccattgccacatattgtctgcacacgttcccatataaggtgatctctctctctctctttctcttccctctcctctcctctctctctctctctctctctctctcttttcctctccctctctccgggtagcaacactgacttcctccaccctgttcgccctctctctgccttccctggcagactctgctgtgaggatggatggctggagagcaggaaggggcagggggctgccaaggaatgtaacaggtttatttttgttcaggctgcattctttgcccagcctgcacgccccagccacttgggaatgtcacatgccgataagacagtgggggtgactgggatctgtggctcaaatctgcaacaccccaggtgtgagccattgtcacagagtcggggaactaagggtgggaggggcagggactctgaggtcatgggactcacctgttcccactgccctgtgtctgactcctagaaagacaagtttggtccttcagggaaacaattgcagaaattgagatccataaccacctaagcccatctctgggcaaaattcaacatctacaggagagtggagaagagccaggtgtcagggtgaaattaacagctgtgtgaccttgggcaagttgcctgacgtctctgactctcagtttccttctttgtcaaaatagtatcagtgaatctgttctctactatatggtgaaaatacactcactgagggcaggtattattgtctattttgtttcctgttgtttcaccatcacctcaaatagtgcctggcacacagtaggtgctcaaatatatgttgagtaaattaaatgagataatgttttaagtgctcagcacccaagaaataagagctgattcaacaacaccctactcaatgactacagatatttattaagcacctcttaacagccagaccctattaggtgctgaggacacaggactaataggacagacaaggcccctgccctcagggaacttacatttgaatggcagagatctataataaaataagctaaggtcagagagtactaagggctatgaaagaaatttttttttttgaaacagagtttcactcttgttgcccaggctggagtgtaatggcgtgatctct

SEQ ID NO: 58863 - DNA, 1196 bp, Homo sapiens
acgcatttaacataggttaatcatgcagagagtattttgtaaactgcgaagtgcaggactttcgggaagcttattgtagcgcgtctaggtcggagtaacagtcccaaatgccctcggctgtctgcagtggctcagcacgtgggcccgctttgcaagtaagcccggctcccgtccgccccgtccgccccgccccgtcccgccccgtcccgtccgctccgccccgccccgccccgtccgctccgccccgcgcccgtcctccccgccctggcccggccccgccccccagctcgtgcgcgcgcgcgcgggagagcggccgctcgcccggaagtgacgtaactctacggcctagcaaccgttgccaaggagctcgactctgggagcggtctagagcccgggcgcctcctggggggtggggaaacggtttcgtgaggagaatttgaggtaacctcgccaactcgcggtcggaagctcctctgaaccccgaaataggagagagctcccgtcctctctcggtcctgatgcagcacctcgcaagtggaaggggtcgtcgcggttaagcccccggataggggaatcgggccccttctgggattcgagcggatccaggccgctccctggagggatgaactgtcgaggggcccagggcagcccccgctagaggcccggtcgggtgtggggtcccctgtcccctgtcccgagcccggggagggggacactatttctggtactcccaggaggctgcgggtcgatgctcgtgccagcctgggacccaggcagcacggtttctctcccaaattgtgccagagaacacgcacgtcctggttttcattgttccccgcctcctgcgactcgtttgtgggtgagtgcttgggaattagcgcggcgacttcgcgctagaagagggacagtaattgcttttgctaattttagagcgcagagcccgctgggcacagacagccttcctgttcagtacatctttgtccttatcgagtgaccatttttgcaggctggtgggcgacttggggggaacccaactggtttattttgccttcctggaaacgttgtactagtttatccagatttttttttaagggaaaaaagagtagacctatagataatttctaaatcatttaaaatgaaatacatatttctgcacgcaaaggttatgacgtggacttttacttaaaatactttaa

SEQ ID NO: 58864 - DNA, 3357 bp, Homo sapiens
gtctccttccagagaagtccaagggaatcttcagtaattgctggacagcaacctggagtagggggtggaggtgatgtatttttctttcttccagtttccccttccagtctgatctctctttgagtgacactgattggggtgggccaagggtcatgggtgaaaacgtccccgctgctcaggtctgcttattggataatacacccatcagcctgccctctccgtgggcaaagccccagcctttgtattgatgtgtgtttgattgtttaaaggcagccctgctggctcagtgccccctgctggcctccatctgtggcaaagagcacacagccagagagcagcagtcactgagggcagggccagggcagcaccaggcttcccagtcacctgcctgcagtgcccaggaactcactgtcaactccttgtccttatgaaagttcctcgggttctccttttcatgattgtattaatctcctgttgtaacaaatcaccacaaatccagtagcttaaaacaacatgaatgcatgatcttccatttctggaggccagaagtgcaaagtgggtctcacaaggctaaaatcaaggtgctggcttggccgtgttccttctggaggctctagaggagaagccatttccttttctttcccagcttctaggggctgcccatattccttggcttgtggcctcttcctcgtcttcaaagcccgtcgctccagcctgtttctgtcctcacgtgtcctccccaactctgaccctcctgccttcttcctgtaagaaccttatgattaagttgggccccagccctgtctgtccttgggtttctaaggatttctcaggaatggaagtgctgttccttgtcagctgggagccagtgggataagtgcattgattaggaagtttcctgaggacaggaggcacccaaccttacaggcctttgacaccctcccgcccaaagcagttgatgaccagtgagaggactgagagtccagaaataaaaagaagcgggaccccatatgtctggattataagaaactcaattgataaggatgagagcaggcaaacgggctgatgtcacacacaagcagcctgatcaacgaccttctcccttgccccaattctggaatcacttcaccaaagcaccaccatgctttccatctcttaatgcctttatttttagtttggggtattttctattgtttgaaggttgccttgcaacccgttcgcctggagggtttaaacaatatagagtttctttgctgagcagcaacagtagccaagagagactgaatataaacttttaagtctattttctcagggttcctccatcaggaatggctttaaacagaagagcgcactcccctggcttgcctctccctgggggaggggagaagggtagctgatggagaacattttgtgttctcttatctttcatcctagtggaaggggataagcaccagaataggaaaacaaaatatctggctattaatatactctaagtcctccagcacatggattgggtttgtttatttgtgaaagggaaggatgcttttctctgacctttgtaagcgcttctgccagctgggagggccctggcagagggagtgccctccataaggtgaaggggccagggggccagggcctagcttcctaggaaaagagaaaaccctcagacttttctcaagaaaagttgcttttcaggatcaacctgcttcaagccccagcagtgtcatccaggaaaaaaagagagagagagagagagcaagcaggaggatttctcacgcaagagccagagtgtccccacctccccaccagacgtgtatctctgtcaccctgtttgtacctaacctggggaaccagagaactgggcagccttgccagaagaaagaacacacaggttcctcaagacacccacttatatggcagtaagcaaggctaaaaaaggagtgttcccctgccccagaggacaaaggctggcaagaggaaggcacgcaacactgcccagctcaggctctgcactgtcattctgtgtttccctcggaccctgtagtggattgaaccaaggagtgccctggagtaggtcatcattttctgggcggctagttaatgataagctttcagctgggaaggagccagaaggaaagaggcttcctcagggggcaggagcacgcaggcctccaagccccacacctgctgtgtcatgtcagaggtgccagagcaccctttgactgcctgaagaggtctcggcttgccacccaccagggtcaggtcgtctcaggtccccggggaggtttgactagccaagagccccaggcagaggcaccaggagaggagagcagcattggcagggcctgccctctcccagagcaaacagggacaaaggttggtgtactcacggctgcctctcccatcctgcctgtgcctgcccgccacaccagatactccaggttgtcccagcattgctacattaggcaggaatctgtcatctctgcctgctgggtcactcattaccccagatccaattcccaggcagggaagtttggggcatcagagcagcggagaaggctttggcattcaggagctttaaaacagaaaagctgtcgtgtctgtacctgttcagtagggagccaaacgtgtttattgcatgtgttatgatgctatcgtgaaagtatgcatgaaaggaaataatttgtaagctcgctaccctgcctgtctggaaaagtggggccctctgtgtaaaccccagctctgcaggcattctgagagcttgaacattccttgtgactatttcttatactacatttcactgccaccccagtgtgtttgaatttgtctctgcgccagcaggtcggagtacccattgggattctctgtgagaattcaaacaagttggaggcgctgaggttgccaagtgcaaccaggtctggcacagacttggcgtgagagagagcaggagcaagaaggcttggacatcatgaatcactgaagccctggcccatatagccttcttgtttgggattagtatagaagtgttgtttttccttctttatacctgagaatggccttcagctgctgaaatgatgatatttatcaaggtagtactatactaagaactgaatgaatgatctcatttacctcccacctcaaacccatgagatagatacagatgaggacccatgctcagagaatttgagtaacatgcttaaggtgacctcctacttcatctgcagttattttgtttgtttgtttgtttattcatttgagatggaatctcactctgttgcccaggctggagggcagtggcacaatctcagctcgctacaaactccacctcccaggttcaagcgattctccttgctcagc

SEQ ID NO: 58865 - DNA, 2815 bp, Homo sapiens
ttcattctgcaacctactccgtgaagaaagctgctcttctttgtgaagagaatatgttcatgttttgttcatgaattccatgcaatttcccatccccttgttaagtaatgtagcttctttatattggcaaaattccctttatcttgctgtgacctgcgctttgtcctcccgagcagagcaaatcatctgtggtttaagagcagctttggattcaagtccccttttctcctgtcgagggaagtgagtctatgaaatggccttcatctgaaagccacagcgaagcacctcctagcccaagtctagctgctgtgtggcagctccagcggcgtgaactgtgactgccctgcagacacctatcaagcgctgcgtcagctattaataataaaatcaactcttctccctcccccccgcgaggggggttccctcgtcagggcccagaacccgctggggaagaatcggggctggcgtgcgaaggagctggcggcagggggtgtaggatgcggtgttcccgaggcgacagatgaaggatttgggttgtgtgggaagtgaactgcggaattcctccccttggtttctgaggggggctctgaaggagccagattaggatgcagagcgcagcccgggcgaccgagggcgaggaggcgagccaaggacatcagcccgagggcgcctcgagacgccccgcgtggaccgcgctcccagctcctcggcctcgccttccaaccatccgcccaccggccccagagcagcgtgcccactgtgagcgccccaccctgcgtctgcaggtgggtgggtcagagaaccgcaggcacagaagagggtacccagcttcccctccgccagccccgcgaccgcggcgcgcgcggcctcgatccgggttcctaggggcggcgcgcgggagggggcggggcctgcgcggcagcgtgggcgccaggcgcgcgggaggagggagccgggaggagggggcggggccgcgccgcccgcgccgcgctgggcgctctcggccaatgagcggcgtccacatgccgcggcggcggcgaaaggggaggcagcggccgataaatgctattagagcagccgccgcggagccgtccccgacgccacctccttttccttcgccgcagtttcctccgccgctgtcgggcgtgcggcgctgagggacccgggcgagcgcgccgcgcaccgccccgccggctcgcctccctcgccgcgttccgccctcagtggtctgccgggcgccccctcctccggcccgggcggggcctctgatcgcctcaagagagcggggagggggctcgggggccgcggcctgccctcccggcgggcggctgagggcgagggaggccctcccttctggcgaggggagggagggtgggtcaggagcccccaacccgccctgcggagctcggggccgcgcgaggggcggttgtctgggggagggggcgcggggtgattcagcgcccggcgaggcggaagcggccgcaagaggaggaggggagagcccgtccgcgcctgggctcccggggtggcacgagcccgcggccggagtgcgaggcggaggcgaggaggccgcggggacgggaggcgaggccggccgggcccccgaagccatggagaacgcgcacaccaagacggtggaggaggtgctgggccacttcggcgtcaacgagagtacggggctgagcctggaacaggtcaagaagcttaaggagagatggggctccaacggtaggtgcagggcgctccgctgcaggggcccggcgcggccgggagagccagggaagatggctgaccgggctccacctcgtgggcttcggctccgcgcccgccgacagctgcgggcggagggtcgggccagcgcgccggccccgcgggagagaaaggggctgcggtcctcgcctcgccttccctggacctcttcgcttctcgggccctcgaccttttcggcgcgcaaggctcggaggcttctctccagcagcagccggccccggtggagggagggacgtggcttctgcagctaggttgagcccggcaagacgttttctcgtcccctgccgatttatgaggagtcgaggtcgttggaaggcctctgaccgttcttgtcctacccaaagttacacatctggcagaagtgatgacatcgctgaaaccactcctaggttcaggagcccgaagtgatttcacgcttagggctagacctcaggccattgattacaaagagtgcatgcttccttgagatatcttcgtggtatgccctctgctaaaaaaatcggatattcttatagctaggtctgtgttttaaagatattgatgcttagaattgtagcagttctttttagaaaaacgaagtgctaaaatgtctctctctttttttttttaacctccctcttgacacattgcttgacgaatttctacattctacagagttaccggctgaagaaggtaatcttaacatgctgtttctgttttttttcctctgttggtgtgctgatggtaagatgacagttaaaacacatgtgtttgtttcttacaggaaaaaccttgctggaacttgtgattgagcagtttgaagacttgctagttaggattttattactggcagcatgtatatcttttgtaagtataaaaaaatttattttctttccccccaaaagctgaaagtattccatagataaatcagaaaacaaatgatgtccattgggtgaaaacatatttggagttgcaagctgtgtctctatgtttaaaaacaatctgggcattttaaaattacaaaacaaaacacttgaagccattggtattcagaaaatagatgcct

SEQ ID NO: 58866 - DNA, 889 bp, Homo sapiens
gagttcgagaccagcctggccaacactgtgaaatcccatcttcactaaaaatacaaaaattacccgggtgtggtggtggatgcctgtaatcctagctacttgggtggctgaggcacgagaatcgcctaaacccaggagatggaagctgcaatgagcctagattgcacaactgcattccaccctgagggacagagcgagactctgttgcaaaaaaaaaaaaaaaagaaaacaaaacaaaaaagaaaaattgctttagttgttctgtaaatcctggaagctatacctctgtttccaaagccaaggtataaattattactctagaaaacggataagcagaagagcaaaatagtctaaaacaaaaatcagcatagagagtttttgagtttgagagcccctgagcactgtcagaatagctaagacattaagaactgtgagaaatgagagttctcctcaaccatcagaccatgataggccagttgatcttgaagcctgacctgatttcatggggctggcatttccttcctgatttcctgtaatcacctcctctctactccccatgattcagtggtagtcacagtaccaggaagtgccaaccttttcattcttgctactgagatgaagattttggaaaaaggagaagaaaccatgtggtttgggaaccacctttccttttttttttttttttttttttgatacggagtcgctctgtcgcccaggctggagtgcagtggaatgatctcggctcactgcaagctccgcctcctgggttcacgccattctcctgcctcagcctccccgttagctgtgactacaggcacccaccacaatgtccggctaattttttgtatattttagtagagatggggtttcaccatgttagccaggctgg

SEQ ID NO: 58867 - DNA, 2085 bp, Homo sapiens
cactacgcccggccaataaaggatattaagcaggagagggacatgcactcaaggatggaatcagctcagtgcttcaaggaaacatgaaaggcgccacgcccacccattaatggagtctcccgtttcctttttttgagacaggcagtcgttctgtcgcccacggtaaaggacaatgatgcgatcacggctcactgcagcctcgacctcctgggttcaagcgatcctcctgcctcagcctcccgagtagctgggaccgcaggcacgcaccatcacgcccggctaattgtttaatttttacttttcgtagaggcagggtctccctatgttgcccaggttggtcttgaactcctgggctcaagcgatcctcccgcctcggcctcccaaagggctcgtattagaggcgtgagccaccgcgcccggccccgttttcaggggtttcccaaggccagaaagtggaccctcctgatacacttaacggggggaccaatctcagatgcgggggctagcgcataaaaaccaggaggctgggtccctgagctgcagcgagagaaaaaaacgttcttctggaaggagccgagagggaaggattcagcctagcgatgtgacagtcgcgctgccccgcgacaggtgcctcaggaaaccctcgcctgggtcgtcctcagagcctctgccttctatgtctccaagccgccgctcgccacatccccgcgggacttgacgccggcacccagtgaacccaacttgcgctccgaagtctgctccgctccaggacgccctcgcagaccccggagcctccgctggcgccggcggccgctccttcccgcctgttcccacgtgccctgagcccccgctcccagaccgccgccgctttctcctcagccccaggcagctacccgcctcaactcacgggttgttattactcattgtaagtaacaagctgctgaggagccgcacgttggagtgcagccccgcggccgccatgtcccgcacgtggtctatcacattcatcctgctctgcaaagccgcgggcagcggcggcagcactgactcgaaaagccggtagaggatccttagggaagactccaaaatggcggcgtcgccggggtccatcgggtccacacgcggcaccacccccaagcaagaggtaactactgaagtgcccgaataaaaagaaactcgagtccctgctcctgtcgtggtccttttcaggtgaaatgagttgttatttttacgcaaaaatcacgttatcatcctaaactgcaaactttactgaggatttacaatgagacaaaaggcaccttataagactactcggtcaatttgaatgagtctgagaggaatttgtgcctctcagaaattaaaatgtgtgggtatttaccgaaataaaatacagtaaggtgaggaaaaacgctccaactggaattaaatattctaatcgggcgccagggacagacctaacggcctttacagtggcgcatgcgcaccaggctagggccgccgcgcccctcctcaggtgttttgtgttcctgccaagtcaggcttcggccctgggggaactccttggttcgaggggtatatttccccatgtaaaattattccctagatccgtggaaataaaggctggatccaggaattagctgatacccatataaaccagtatgtgtctggcacacttaacgttttaggaaagttttacacaagttattgggacgctcacaacaatccataaagttgaagttgtcattcccttcccacaagggaagaaactgcctgcttaaattttgtgctcaggttgttaaatggttgacttggaatcagatcgactggttaattatgttggatcgcaaactcaaatgtatacagggaccagggaggtaactgagccaatgaggcagtttaggtcgttgagtcagagtccgaatattctccacagtcatcctctcagatctagcctatcgctcctttcttaaaggagacagtcgttttggtctagattttgttttcatttgatttttacagtagtagatgcaaaaaaaatgctctgaaaaaatcacagtgtatcttcatcagcaactttttcagctc

SEQ ID NO: 58868 - DNA, 1970 bp, Homo sapiens
gttgaacttatttgctgctgtaaatacagcctggcaggcagcaggtgctcgttaacgtttgttaaaaataatgtgtgagcaggctgggcgcgatggctcacgcttataatcccagcactttgggagaccgagggggcggatcacctgaggtctggagttccagaccagcctggccaacatggtgaaaccccgtctctactaaaatgcaaaaaattagctgggcgtggtggcgcgcgcctgtaatctcagctacccgggaggctgaggcacgagaattgcttgaaccagggtggtggaagttgtagtgagccgagatcgcctcactgcactccagcctgggcgacagaacgagactctctcaaaaaacaaacaacaaaaaaagtgtgaacaatcacataataactgaaccaccttttcccgaatctgcaaaatggagaccatgacggtgataaatctaccccacaaactggctgtcagaaattaagtacaaccaggccgtcataattttttactcccactctgatggcacacgaaaaaggaaatctttggaagtcaggcgccgaacgagtctgtgagggccctaaacccagctggctccgggatggccgccgctgccgggaagtgggttctgacaaatgacaaacagcagagggagcctgaccccggggcggaggaggaagtgggcctgacagaaaaaggagaagctagacccctggacttgaaatatgaaaaataaaaagcgcagcccttggcttcgctctctagtgaggctttgggaaccctgccggagtcggaaggagtagacggagagagaaaagggcctcctcacacaccctggacccttggcccactcctgccgcgcccccgcctcccacgactggcacccccgggccgccccaatccttcagcaaccggtcccctcccctcgcctccctccttctcgggccccagcttcctctctgccttccgccgcccgcttctctcggcacacacacggtttctctctgctcttcgcaatccccgctgtctccccacaccgtggatcgaaccctcaccggcatcttggcggcgcccgggtttcaacccagaggagcaggatccaggtacagcggagcgcttccggtctggcagcctgggcgaggtaggcggaagcgaaacggaaggggcgggtgcggacgtggagcttccggccttgcagttccgcttctggttgcagcggccgcgcggatctgaaggaggcgccagagcactaggcaggggccttgagtggtgcagcgtgaggcagcgcccagaatggagatgggtcttgaggttccagaatctgagatcaatcacctcttttgtatttttttcaaatgtcaccttttcagggccgggcatagtggctcacgcctgtaatcccagcactttgggaggtcgaggcgggtggatcacctgaggtcaggagttcgagaccagcctggatggtgaaaccccgtctctactaaaaatacaaaaattagctggtcgtggtagcatcccagctactcgggaggctgaggccggagaatcgcttgaacccaggaggcagaggttgcagtgagccaagatcgcgccgctgcactccagccgggatgacagtgtgactctctcaaaaaaaaaaaaaaaaaaaaaaaaaaaaaatcacctttcctgtgaagcattctccgttcattctattttcagttcacccaactccagccccatgccttatccttctctcccgctttttcccttagttcttacgattcttgtatttagtttactcttagtgcttgtgaatgccaaaaaggcagcacttcgtccgttttgtcacctgcgcccgtaacagtgacggtatgtaggaaacatcaatatttgagtgaatgaatgaacccaatgcactgcatctaaaaatggagaaactgaagggcactggactccaggtttgaatcgcagctccaatacatact

SEQ ID NO: 58869 - DNA, 2196 bp, Homo sapiens
tagctaaatacaggtgcctattaaaagctctgagactaagaactgctctctgaaaagacctggggattaaagaagtgctgaagatacacactagcaccgagcacaacttctcctaaatgcgaagttgagaactgaaagagaaatgaaaagggaacaatttccctaacacattatctgatgctccttaatgtggggtccatgtaccacctaccacctaaaagcaccttaaataccaaaagtccatgtcccaagttctgagaaacagtaattaatgagaccccactttaccctcctgggagcgagacagggccggattctggagttgagacaaaactggatttatatttttttgcggggcaaagaacttaattaacctttctgtatctcgttttctgtaaaatgagaaaaatgagatctctctcacagggttgttgtagaaataagcgaggcgtttcatctgctgcctggggcttaagtatacaataaatattaacaactaccattatttccctttcaaaacaacaacaaaaaagaacgtgaagccagacagcagaaatgagttgcgtggggtctcagggttcccagtacacacacccgccggctcactccctcaggacccaatctcccgccttccacgaactcctacttttctctccttgtccccgcagatcctcaccttcccgctgcccgcggggcccatgaccagctgcgcataccgaggcatgttggctcccggagccgcccgccacactcccttagccttcgcgcgacgcccactgagctccgggaaagtgaagtgcgaaccaatcgcaatccacattctttctacgcctccagttctaccacacctcctactacggggcagcccgcgggccaaatcccgtgagaaacgcgtcctgagaaaaaaggggaggggcgagggagaggatttgcgcgtgcgcaaaagtagttgatggaaatcggccgttgggatgctgtctaagcttggatacctgagtaataacggacaacagataaagctccgcatccttgcgccacgtgcttcggtccgtggtttgcgtgcagacgtttgacctgtatggtgaccctcgcgatttgcaaatgtgctgaggatctggaatactgaagtggaaggcacctcttgttttggggagcatgtatatttccctcctgtgacgcactgcttccacagagaggtgcaaacgtgcaaacgctcagcgaccgcagcgctcctgcccctcccccaccgtaactccggggtcgcggatctgcccgccccgctctcccgaagctgttcgggcagtgtccgaacggcttcggaggggcgagaagccagcatccgagccgcctctccggaataccagcagcctgacgcacgcgtgctgtcgggggagggatgctgggacagctgctcccgcacacggctcgcggtctcggcgccgcggagatgcccggccagggtccggggtccgactggacggagcgtagctcttctgcagagccgcccgctgtggccgggaccgagggtggcggcggcgggtgaggttgggggccccggggtaagggtggcagcatggggcccccgggtcgtgaggcccccgggtcgtgagccccgtggaggagggctgcggccgacctctcgtctcgggggctggccccggtgccctcaagtgagaggcggggagcagttttgttgtggacagagggcagaggggaggactgcctcgcggttgagggagggtctctgagggaagcttcggaggagcgtttggtgcagtggccacgaggtgactgcgacagtcgcccgcgtgcatctctctgccccgagggggcgctgcgagccctgctgggacgtttgctgtctggcacaggactgtgtgtccaccgaaaggcgaggcgggagggacagaggaggaagatgtcccccggttcaactgggggcatccaggcccataaaccagttccttccctctagtgacatgagccaccttcctgtcaaacggggatttctttttctttttttttcttttctttcttgttttttgagagcgagacagtctcgctctgttgcctaggctggaatgcggtggtgcgatctcagctcactgcaacctcagcctcccaggttcaagtgattctcctgcctcagcctcccgagtagctgggattacaggcgcctgccaccacgcccggcta

SEQ ID NO: 58870 - DNA, 1477 bp, Homo sapiens
aaagaaagaaagaaaatatgattacagctctgagtcctctctagtagaggcccccagtttttatgtaggaaggtctgaggggcaccaaactactgggggtgaaggggtgattgcttgaaggtggctgggggagactaggtaagtctccaacaccggcactctccccagaaaaatgtgtatattcacaaaaatttcccaacagtttcaatgagttcacacatcattaaggaatcctaccctaaagaggcgtagcaacccgtggaaagaaacagttccagcaattgcaagcgccaaatcccgccctctgagagcacacctgctcatctcaatggcagctagatgttatttcaggagcgaggagggtggtttattccctttccctagatggcaaagttaaacgggtacgaaattctgctcgctacttcctgttctgcattcgagaggccagcttccaccactacaccccaaccagcgggaggtgctttttgcgggaaacgagtaggaaccgtctggaaacggaggaccgtgcccctatccccggaacattcgaggtataggaccaaaggccttccctggctcgggcgtgcgtgtctcgtgacaggtcgggctgctagaggggcctttttaccccttggatggcctctggccccttggggccgggatacgagacctaggccagccgcacccagaggtggccgctcccttccttccctagacctcttctgggcctttcccaggccagcgcctgggccctgacgccgaggcctccgggatttcccaattcctcgccctcggcctccccacggctcccaacaacgcagcaccccacccgagagccaggccttggtcgccgcaactgcagccctcaccatcctgtcaccgggctccgctcagtcaccaccaccgtcgccgccctcttcctcaggctcctcggcgacccgcccacttaaccgcaaccaatgagagcagagggagacagaaattgccgtacggaggcccgcacggacccttctccgccgtaaagccgtttgggaacttgtggaggcggggtggtagagtgcagagacgagatcgcgaagctttgaaaagcgcgggcaacatccgggcacctgggccgtcgagctgaggcgcgccttccgagcctgctttttagggcggatggcagccatgctgaagtgcgtgatgagcggcagtcaggtgaaaggtggagcggcctttgttgtcttcccatttagcagagagaaaagcagacgttaataggtcgtccctaccattgtctaatttttcctctttgcctttttgcgcaatgactgaggacgcacgccctggccacagccccacccactcaagtccctgttaacttctgaggggaggatgaggacccatctcgtgtgacttagaggcagatgtaatatgggtggtatccgggaaatagagttgtaccatcgggccacaaactcgggatgctgaggactgc

SEQ ID NO: 58871 - DNA, 545 bp, Homo sapiens
tgcaaagaatttaattttaaataaatagaatccaaatatgtcctgcttcatgttttgtttcataagcagattttggttttttgatactgtaaaatttttaaaatgcaaaaatgtgatacagtttccagagaaactgaatgctgtagcttctaccaaagatagctggtattaaggtgacctaaagaaccatgaactcatccaaagtacaaacgtttacaattcgagccaatcttgtttacattctctcaaacactcaaagctgactcaataaattcccacgattcctgcctaacttgttacttggtatggtgggctaatggtactgaaggtggtttccatctccgggctactgtcctatccagaacacacgcagctgatagaggagaggacgctctcccatcatgcaaagcttgaaacccagtttctaatctagacacagcccaacccccagacatgcatacctggaatggattcttttgtgatttagtacccaacaaccatgtcaagcaagtacagtaactcaggacaaataacttgttccccct

SEQ ID NO: 58872 - DNA, 1715 bp, Homo sapiens
ctttaccaacattactcattttcaatacttcaactactttgaaaagtaacagccacggtggcactgaacacctccatccccatcatggaaagaacatcgagaaatgaaggccaatcttcaaatattggatctcttcaattgctgccggcagatatgagctagtgaatgatagtagtggttctcaacaaagatctcaacgagtctcaagaagacaggcaaaagacttacatcactggccattgagatcagtggcaaagaaatgtggtcctgccagcaggatcagcacacatggcaggggaaatttgggatgatgaaaggaaaggcaggacttgacacctcagctagtctgtatactcagccactattgaaagaaggacggtgatgtcatctggctttccacctacaatgaaaatgagaacctatcagtatattttaaaaggaaaagtcaataaaaaatgtgtacttaaattaagtactaggagacaaatgcttgcattccaggcagttttggtttgtcagtataccctagtagaataaagaaaaaaatatttgattaaaaaaaaacagttaaacaaaactccaagaaattacatgaaactgaagcttaaaaaaaaaaatcttccctgctcctttacaacaggagctctattcaaacagccaccacaccctctgttcacatcaatcacagtgaatctgacgagaaagttacatgcttctatacccacaatcctaatttagacagacatatccaatgttttgaaactaggaatagccttgtattctaatctgccaaacagctatggcatgcactttttctattttaacattttttggaggactaagaaatgtttcacatgtcataaaattataccaacaagaaactaattctactagctctgatatgctagcaccaacatgtcccagccctgagacggagccactggcctgctcccaaagtcacacatcatgctgtagataggacaagtcttcagtcaagggcagtttcacattgcttccctcttcaaaccctgctgtggcaatttgtcaggcaaatactgttgagtcccacaaagccagaggaagggagaagcgaaatgtcagacacgtgaaaggctgaatgttaaactgttaggaatgtccacgcactctgggcagagctcggaagccttttgggttcaggtccaagcattgcggtggcggcaataaagggcttcaggttccacctgcctctgccgccaatgaggttcagttctgaagggcatgctgtgtggggaagacatgacgaaatgcacttgctctcatcctcctgaccttgctgaaagccacaagtgcacagtttgggggctgggagaggacacctccacagtctcacccagagcccagaatgctccactctactgacaccatgtccccagtcagtccctatgaccttcccaaagaatgcttacctctcacattcaatccattgtcacatgcaaactgtgcaaaaggtgacatataatttgggtcataggccagctcatgagcttgctcagcaatgcttctggcagtctgttgtatactctcataatttgaattctaagataaagcatgaggaagttattttaccataatgctcaagacagtaacatttatctaaccaccttttccatcatgtaagttttattctagttagaaaagacattaaaacatcatgccctggctaatatgaacaa

SEQ ID NO: 58873 - DNA, 735 bp, Homo sapiens
agttaaggttaaaataatattctgtagataagagggaccattaactaaggagatacatgcagcatgaaaaaaaaaaaagggaaaaagactgtaaaactgggggaaatcaggtcaattctttctgtggaataaagagaaaacaatgcaagacgctctcatctgctcagcctttgaaagctaatcagattctagaagtgtagattaatgaccaggttggcactgaagctctgttttatgctgaggtttttctttccccagaagtgtcctttgctattctgtctgtgagagtcttgctcccattggacagttcgtcctctcctaacactcccacccatgagcttggtgttctgccagctgcagttttgcccattttgattgaacatactgtgctgctggaaacttttgaccgcactgaaacatgagctgaaatcacatgctagcgagctgtctctgggctctaggggaagccacctccacctcgctggcatgccggcagagtactgccccaacctgtctgtcccacagacagtgtgtgagatatggcagggctgctttggtgcttggaagcccaacaagaagaatcaaatgaagaaaaaattgaagcaccagtctccaaaaactgtgatctgagcttgggctctacggaggccttggggttcagagttctccccactccagtgtggctaacaataatgtagattacagccaactttagaagggcctagaatcaaatac

SEQ ID NO: 58874 - DNA, 756 bp, Homo sapiens
cctacaccatctgcaacccctgaagaaaaaacaaaaattacagtaaaagaacaatcttaccaacttctcaggaattcttacctctgttttctcctaacagttaatttcactacatgctactacatacattcactccaaaattcagaataaaaagcactcacgtttaatgtattctacactaacactcctaagccacattcactacttagaatttggcctttcatatattgatgaataaacttttgagctaccacagggtggcattgcctaccagccaagagttcaatttcagcaggattagcatctgtgtatagacatatttgtgtcattaatactttgtcttttataagaatgaaaattgatttttaagcaaagtgctgatgctagtgacgatacaattcagtcagagctggagatcacaaagaacatcaaaagcggcaaccttttaactccaaacattggtcaatcgctgggaaataaagaacaaaactgagaacatatcccatcccctctccttctaccctgtagagggcggtactgtacaatacaacagccattccttacatggttactgagcacccgaaatgagggaagcccaacttgagacatgctctaagtataaaacatacagtgggccgggcgcggtggctcacgcctgtaatcccagcactctgggaggccgaggcgggcggatcacgaggtcaggagatcgagactgtcctggctaactcagtgaaaccccgtctctactaaaaa

SEQ ID NO: 58875 - DNA, 1236 bp, Homo sapiens
ttgatttatgatatgcaattttgtgaactgttaggaaacaaattattttagttctcagggagacagaaaactccctatcagattattattattattattttgagacagagactggctctatcatccaggctggagtgcagtggcacgatctcgggtcactgcaacctctgcttcccaggttcaagcgattctcatgtctcagcctccctagtagctaggattacaggcactcgccaccatgcccggctttttttttttttttttttaaacttttagtggagatggggtttcgtcatattggccaggctggtcttgaacttctgacctcaaatgatccacccgccttggcctcccaaagttctgggattataggttgtgacccaccgtgcccggcccctatcaggtttttaaaatatatgacgactcccaaacaagacagactcataaattttattactaacaacaaaaattaggatccaggacatcacttcttaaaaagagatcaaaagttaacaactaattttgaaaggcaaactcacattatttttcataaactaaaacttccagtttgaaaagtcaaatttctttagaaataaaatactgctaacttacttttgcaaagcattttcctaaaacttctgaacctaaagccccaggcaagacctctctctaaaaggcatgggaacataaaatgaatttgacatttagcttgaacttaactttagcatttgagctactcaaaggacatggttgtaggtcacattctaacccggtgtagtgcttctggtgtcacacactagtacaaactccatttggatactgttgcaacaattcaggttatgtattgcccagtttcacaaaccagtgctaaagttcagggtacagcctcctcccatgcagcaaccccacctcaaaaaaaaaaaaaaaaaaaaaaaaaaaagctccacaacagcttgcatctgtaatctaccttctgctacaatttaaaacctccttaataaacagttatgcttctaaaattcaattacttgcactacaaaaggattcaaccagaatcctttacagagactgttaacaaatcaagagataaactgtaagttaggaaaattttaaactaagctagaaaatctcaaaagatttgtgaacaaaggaaaagtagctctgaagctataacaaatgaagaaatgacttcaaaaataaaggtaccttaataagtaacttataaaactgcaacac

SEQ ID NO: 58876 - DNA, 1985 bp, Homo sapiens
accaaattctacctcatccattcacttcctaaatataatttagatcttaattttgttcatatgatctttacacctcaagacaactacttttaagactgacattactcacaaaaacacttcaaaatcctgaccacgatcaaaatcagatccaaaggctgggatatgaaattattttaatttcacttttaggtttcaagtttaagcttaaataaacatcccacagtttcataataaatactttacaactcaatattcagaggtcaaaatttatatggcacagaccaggctgccatttttaaaataagtggtttctctaaactgtggtttagcatgcagaggagtttttgttgcacatcagttatgagtcagagtgaataaagaagttataaacacacacacacacacacccaggaaaagcattcgaagcacaaaagtatcaggagactgactggtttttaattcacatatatcatcaagaaaacttgaccagtggtctaacggggacaggactgggaaagggagtctcagatgagagactgagataggtgtcagcctcagttccaccaataactagtagagtaaccttggggaagtcatctgactctctggaggcctgttttctcatcagtgaggtgaaaaaaactagactccaaggtttctaagtgttacaattctcaacagtctttgattctattgttaagtagcataaggctgtgggaagcccaggtattacaacatgcagttctcatatttttgtgcacctaggaagccatgccacgtagagtaataagagaactcagaattagccacagggaagaaggaacaagaaaagtgtacacggctcccgctagtactggtttactcctgttggacctagtaaagagaaagcacctttgacaattttctagagaatgataggagtggttcctatgtctcaccacacccaacatagtcagtttttccgaaacgaaatacagtggggactatacaaaatgttgtgaagcaccaagcactattagtcactgcatgactaataggacagatcaattttaaattaaagaaacaaaagagatttctctttctcatataaaaagaaagaaacagctttcattccagtcaaggagtcctagatgaccacagtgaataatctgttacacggatactcagtaataaatatggtgtcaattcaaagaaaattaattatctacagaaccaaaaggttcaaaagcacttaagttcaacgtaacgttattactcaacatagccttttaatgtaattcaggttgtaactccaacctctagagttgacagcagtattaaagagtcattcaaagtcatcaccttagccagacactgtggctcacacctgtaatcctagcactttgggaggctgaggcaggtggatgacatgaggtcaggagttcgacaccagcctaggcaacgtggcgaaacctcatctctactaaaaaaatacaaacaattagccgggtgaggtggcacatgcctgtagtcccagctactcggaaggctgaggcacaagaatcgcttgaagctgggaggcagaggttgcagcgagccaaaatcgtgccactgcactccagcctgggtggcagagcaagactctatctcaaaaaaaaaaaaaagtcatcaccttttacggtatcaactaaatagaagtcaccatcatatgaactggttcaggacagccaaggatcaaatgaggccaactcatgaagttatttcaggtggcttccaagactgccgtccggaagagctcctccacaacaggacagtcctggagaacctgtccttcactgcccctatcccccaccatttgcatatgtgcatgcttgatctttgtcaaacatggctaacaaccaccttttggtcacatcagctaccagtatctgactgtgtctgctggcattcccttcaagggtacagagctggggttcttgatctgattcctatgcatggacctccag

SEQ ID NO: 58877 - DNA, 3046 bp, Homo sapiens
tgcgccactgcactccagcctgagtgacagaggtagactccgtctgaaaaaaaaaaacgcagcacaggtcacaagctcattgagtgaggcacttctaaatgtatcagggaagacagccactgacagctgacttcggggtggatttgtacaatttcaatctgcaagctgcaggacctttctaagtctccctctcatgttaatatcaatagcgttgcctaaacattaaatgctttttcttcaacccaggtaatggggtcattcataaattaaactgagaacaacctttccagtcccatgttcacaaacactacatgtagtagaaccaaagatactaggcaattattctgagatcagattaaaaaataattactgtcataaaaaagttacagaatcatttgttccaatgccaaactctgcctcagcatatgaaatttaaagtaaccaaaaacttagtctcacctgggaagggaaatcaaagtgacatttgaacccaagttcaatgacaacacgtccttcaatttcaaagcgagcgcattgctttattcattcaaagagttttaacggcacaatatcccatagcatacacaaaatctcctaaggcgtacattatggtaaagtttctgactgcttgtgaactatatttagccctttctgccagctctctccgtagtctcccacccccaaaaggtataactggaataggcctcagggagcacctgtggcctgaaaaggctgtgaccaatcctcagagctttaccggctgcaatctacaagtaggctcgaccattctattttggatcaaggagactctgccaacccccaagtgaccgcaagtggacaagatcaatttgggagaaaacgctgtgagggttttttcgccaagccagcagcccccaccgccacactccgaaaagggtgaagatttggttaccatccaggcggcgaaagaatacggccgggctgtctgggggctcacgactgcctgtcggccggcgatcccgcagcctgggccgggctgtggtgtcgggagcacgcgaagaggcagggatccccggggcatgcggagagggaaccagaacgaggttaggagcctgcaggtgtcgcccagggaggggacgaggtcgcccagggctggcacggccgagtgagaccgagagtgtggctctggactcggacagaccggtcacactctcgggttgtgaccttgagcacacgacttgaccgctgtgcgccttagtttcctcctctctaaaatgggggtcgttcaagcggaaaacgcgcctcggagcgcttggcacggcgcctggcgcatagtaagcgctccctccatgtgagcgctctggctcctttcgccgccgggaggaactggggaagccccgcgcggggagtccccgggaggcggatccgaggctggggcaagggaaccgggtcggggactcaccgagcacgtccgcggaacggtgccgggccacgaagcacgcgtcgtccccgtagcacgcgcccttcttgaggaggcccttacggaagtccttcccgaagccgcagccggccgtcaccagtccgtagtcgccgccgccgccgccgccggccctggggtcggtctgcgagaggccgccgagcacggcgcgggccaccagccgcccgtacgagaggaccgagaacatcgccgccgccgcccccccgaggaggcggggggccgggggagcaggaggacgcggaggcccggagccggctctctcctcagccgcagtcgcgccgccgctggggcgctcctcagggcggcgcgcagtggccgccgccgcccctgcccgacgcgcggggcctcgcacgcgctcagccgcgcgcaccggagccagagcgaggtcagaagcggcggctcctccgcctcagcccaactgaagtcccggctgcagcggccgccgccgccgccgccatcttccgctccactagcgtgttccgggcggtgccggcagcaccgccccctccctggccctgcccctagccccgccccgattcaccgctcaggcccaagcccagccccttgggctcgctgccttatgcagtcaccaaggttgaacatgcgcagagggtgcggacgcagtgtctcttgggaattatagtcccggagtcgtagtcacttttgacttggctgccaaagatttaggacctagggggattcctcagacgcgggacctatgttaagttagtaggaattgcaggtgggccacgtgagggttttctaccctgttttaaccgtatcttttaaagcctgttttaaataaataacgccaccattcctttaaacaaaaacctgcaagaaaccagaatggagtcacataatgagaaacagaggtacacagatctagtgacacctccccaagtaatatactggaaggatttagggcggcaaactgtttggaaagaagagactttttgtagtcttttaggaaaaattgagaaaatgttatgtgtccctatcagagtgggaggggacacagatggtgtcatgtcccttttgctaactggcctctagccatgctcacagctgtctcaagacctttgcccttgctttcgcttctaccctttggaatgtaattcgtttacctgagggtcctgtgttttctgttgctgtatccccagaacacgtgagcacccagtaaatatgtgaatgaatgaaagaatgaatgaatatttcactagattctaagtttcccaaggacaaggatcatttgctgctcaattattagaatctaaagcaatgcctggcacacagtaggagagtgtgtaaatgtctgtggaataaaagaaggaataatgggctgggcgtggtggctcacacctgtaatcccagcactttggaaggccgaggtgggcagatcacttgaggtcaggagttcaacaccagcctggccaacatggtctctactgaaaatacaaaaaaaaattagctgggcttggtgacaaacgattgtaatgccagctactcaggaggctgagacaggagaatcgcttgaacctgggaggcagaggttgcagtgagccgaga

SEQ ID NO: 58878 - DNA, 1549 bp, Homo sapiens
gagaatgaagtcaatacagagagaagcagagcctagagatggtaagaaacagaggcctggtaaatgtcaatcaaaccctgaatccagctttgcctgagggaggatcagtctctgaactaatatgagttccctatgttgctttagccactttgattttgccttgtaatgcagtgaattctaacaaacacatcacgtgatccaagtaccatgactacagttactaaatcaaaaacaaatcccgaaaccaaaagcaactgtttgaagggaacttatcctctacttacttatataagcagagagggaacttccgcttttcaatagagaagctactgaaggaaaactcatccctttctctggtacctccatgagtgaggagtgatttgcctaatagtgggtttgggagaagatgctgagtttgttgcctggtccctttctctttttttctttttgctatggcctgacctttagacactgctgttttcctccttcaccatgaggagcctgtccctgtgaaagacatttgcagtaacccagcctgtggctgggtaaattagtttaatccagagggaaattgcatgcaccactaaagccacattctccaatcagccttatccagaaaacaaactctagagctctagtttcctgattcatatatctttttctcagtggatttggaatttggaaaggctaaggagggtgcaattaattatcagccccatgaaaccccaacatgttaatttacatattttctttagaaaactttgagaggcagtcctgtggagatcaaatttctggtgttgtcagggctccaggcttaaaggtaattacgggtcaagtgtgttcctgacctgggtagtttgtgacagttacagtggttccacaggattttaactggctggagcctgagtacaagggcctctagggcaggccttgacctaactcatgtgagtacagccttgacctcagcaggcaggcgggacagggattcgattattgggggaaaagtctttctgtcccagagcaggcttaccttcaaaagggcagaactttagtttaccaacctgtagactccggcgggtagatttttgctttttgtaatacctctttaagcaacacttgcggctgggcaagttgactttgatttgtgaattgcatgaactttgatcacggtttagcatttggagagctcagactctggctttacccatagaatgggggtatattttattagtgaaaacaaatgaaaagaacagggcccttattgtataggagatatgcttctttgcgggtggaggtagataaattgaatgaagacccataagataagaaaacagtgaggcttatgccttgaaacttttgtttctgagaaacaggtttgcttgagaaatcaaggaggacctggacctgggttgtttggttttgtttttttgtgggttttttttttttgagccagggtcttactctgttgcccaggctggagtgcatggagtgcacggtgcgatcttggctcactgcaacttccacctcccaggttcaagcaatcctcccg

SEQ ID NO: 58879 - DNA, 916 bp, Homo sapiens
ggatctcctgaggtggtacctggaaatccgtcttttttttttttttttttttttttggttgagacagagtgtcacactgtcgcccaggctggagtgcagtggcacgctcacggctctctgtagccttcacctcccgggttcaagcgattcttctgcctcagcctcccgagtagctggaactacagaaaatctgcattttttaagcaagcgccgcggaccggttggaaaccacagccgggatttacacgcccctcgtttacgccagcttcacacccgctcactagtgctcgcccctgtgcctgccatcgctgcctcacccaggcgccgccctccggcctcatccgggatccgccccctgcctcatccaggcttcgccccagtcagtctccggcagcttctcgcggcttcgcaagccccttcccgtgatgccccgcgcctggctgtcgcggttgccgggcaacgcgctgtccatgtcgcgggcctcgctgggactccctgggagatgaggccgcgaggtctcccgccgctcctggtggtgctcctgggctgctgggcctccgtgagcgcccagaccgatgccaccccggcggtgacgacagagggcctcaactccaccgaggcagccctggccaccttcggaactttcccgtcgaccaggccccccgggactcccagggctccagggccctcctccggccccaggcctaccccagtcacggacggtgggtaccatgtgccagctcctggagtccacagtgatccaacctcaaggggacagccccggtgaggacgtaataatgatagctaactcttattgagcacttactgtgtgcagacactgctgagtgttccataaacgtccattctctaaacaataaccctgagaagtagctgttactatcactgtcaggtaaat

SEQ ID NO: 58880 - DNA, 3814 bp, Homo sapiens
aattcttacaaagtcttggataagatgttagcatccgttgacatgcccttgaatctgaaagcagctcatttcagcttccgtctttaaaagctgaacctcgcccctctcccacatcaacatgaatcaattgccaggcacctcacaagtcttagatgagccgaaatttaaagctttctattaacctttacttaaccactggccaccttccttcctacataaggtgacagtgttgtctgtagagggttctagctcccggctatgtggatttgaaatccaactgtcactaactgtgtgaccttggttaagtgacttcatctcagtttcttctgtaaaataacaaaaacaaaaaaaattgcaaatatcttgcaatgggtgggagaattaaatgaaatctgtcttaagtgctcaaagaatgcctgacacacagtaagcgctttagaagcgtcagttatgattacagtaataattcatggacgcaaagtgcttaagacagagcctggcacattggaaagataatgatagcgtcagcctcgttggcttcctcttcagatgcacgctcaggaaaagagcgcggagacctctccaagattagaacaacttaaaaggatttggagggcaggcgaagacaggttctcacacctcttgagacatgaacgcttgttaccaagtaacaagaaatgggccccccaagaccccagaaccacgaaaaataaaaataaaagcaagcaggaaaagagcccccaaacccggcggaactcatgccctcatcaaactgccttccgagaggacgagcaccgaaaagtccatctcgcacagcacggcacacgtcgtccaggaggctggactgggatccccaaccatcgctccaaagacccgtccagtgcgcgggggcaaacgggtaggggcgggaaacgtgggggtggggagcggagttttcaaattccacggccgggaggaagcctgcatcctcgtgcaatgaatgagcggagcctggagggtccgcagctggcgacaagttgggaatcccgggctggcctccctccggctgcagtccccggcccgtgggccaactcgaggagctcactccccacggtgctgcaagcccaaccggcctcccaactcccctccctcgagcccccggggccgcctgccgccctcaggcccgcctcccccttcagccgcccgccgccccccttaccttccagcagccgttggataatgctgtcgatgttgagtttatctaaatccgccatcgccttcccaccgccgaccctcccgcagcggcgccgccgccggctcgcgcccgggactcacacctcctttcccacgccacgagcagaggcggtggtggcggcggtggcagcagccgcggcgggtcccccccctgccaccccgctccctacttcctccttctctccccactggaaccacgagaagaacaaaatggccgccgactccttagacagcctcgggcggcgcacggatgcgcgcggggagtgcagcggcccggccgggacttctttatgggccatagggggcgcgggagggggcggggcccgggcgctggagggggcggggcccgggcgctgggcggggcgcagatggctgagcgcaaccgcgtccccgcatgggatccttccgccaaacgggccgagtaaataggcccgcccccaatgccgggcccgagcgagagttgcaaagttgcacgcgggagttggggctgggggaggaaatgcagctgtgcacaccgccggttgcggccatcgccggatcttgtgcattgagtctagatgtttgcagacctggacaggtgggagctcaccgagggatttcgggggtcctggaacttaccctttaagataaatctggggtgaggatggaaaagaataataaagaaaagaaggttgacttattttggattcagatatactggaacttgggacaagagaaaggtttatttggtaactaaaaagaaaaaaccctctttcagataagtcaaaatgtaacagttaactcattgtgagtggtgggtatatgggtatttgtatatatattttttgtgcacttctgtaactttaggggtaaaaaatccatactcaaagaaaattttatcatttctgtcccttggatttatcttccctgaactcggaaagttatgtaatcatcgggacggttatcccgattctagccagggcaaagttgaacgagcgcgtgcagcagttaaaaggggaatttgcagatttcacgcgtgcaggccgggggcgggaagagaagatgcaagctgcgcgggcggtcctgggttctgcagacacccgaagaaactttggcccattcctctctggcttcccagcctccccgagggcactcctatccaaggggcccccaaactgtgccacctccaggggctgcgcgtcgactttggctgggtttggaagtacagcccacactcagcaaacagatcggctctctttcctgacctttccatgtacgttgcttcctgcagcgctttacattttgcaaagccccctctctccgagaaattcattttgtttcccaaggcgtgcaggatgcacgaatccccatctcagtatgccacgaggtaattgcaccacccaggcatcctcttccaaagcaatgtcctcagggtgcgggctccatgtccccttacttgggccccctcgctactggtgcagggcccttgagtttcagaactcagcctatcgatccactttcctcaggcactaactcactttcccctgctacagctctgtccaccagaagtcacataagtgccatttgtcaggccaaggcaatgagcccagttggtgacattcggagttggtgcccagcgctgctgtgaacatctggctatggaggtcagggggggctcttgctggagtccacaggactttgggctactccagggcagggtgcatcatcggaatggcatttagggtagaaatatgaaagacagcaattcattcagcagacaaatatttatggagtacccactctgtgccaggcattgttctagacagggaagcaggggtgatcaagacagacaaggcttttttctatggagagtcatttagtcagtcagatggtaagcaaagatgcaaataaaaatatcagcttctgataagtgcagtggagaaaaataaacaagaaaaaaaatgctactgtgttcatttcttagtatgtgccaaaaaatgatctcattgaatccccaagataatcctaggaattatgtcctattcctatcatccccatttacagatgaagaaagtgaggcacagagaggctagggtggttgctgaaggtcacacagccaggaagttacagagtcagggctggaactcaggacagcctgaaaccacagccctcgttcatattcagtaaaacccggcagtgaacccccagcagtgttcacatccctggcacatactgggcacatatcaatttggaacccagtggaatgactgaattgtgtctctgcccacaatacgagtgccataattttcctcatgcaaaatggcaggtgtgttaacctcttgcaacatcatcagggctggaggaggacttcagactgagctgggacatggggagagcctctgtccccaggttgttttctgctgggcaactcccctccagagttcagttctgctggcacatgcctaagtgattagctggctctgagcctgagcatggcatagctcaccagggtgggccctcacagctcccaggaaccagcaaatagccggtggaggaaagcactgattccctattcgcctttttctgccattatcagcaccag

SEQ ID NO: 58881 - DNA, 688 bp, Homo sapiens
gcccagctaatttttgtatttttagtagagacggggtttcaccatgttggccaggatggtctcatctcttgacctcgtgatccgcccacttcggcctcccaaaatgctgggaatacagcgtgagccaccgcgcccggccccagccttcttttttagtttcgtttggtctcctccacctccccaagttgttaaattcttagtggcagtgatttaaaaaccaggatattccacatgaaagtctgaatttctggtttcccttggaaaatcagatctgacacctcccgcccacattcccgcgggaatccgagttcctacaaacggagccatcggctccctcttcgctcacagagaccagccaggctgaagtgctccagggcccgcagagcttagcgggcctttgagttgctaactgaggttcaggcgcgtcaccactgtcctctggcgtccatttgcggtattgcagggaaggtctttgcgggcaggcctggaagtgggcaggaccctgaattctcgggtcccagtgggacaccgagggaggacaagccctagcagaggggtatgaggaccccagctgaatatcctgacctgatagaaaatattcctgagctgaattggccttgattttccccactcctcataaggggaccctcttccttagggtcatgacaaatatgtctaagatgggtaa

SEQ ID NO: 58882 - DNA, 688 bp, Homo sapiens
agtgaaggaagggtgacatgtatgccattgccacatgctatgtatttgctattcctccttcgtaggtgtcctctgagacagaaagaaagttctagggccatgcatggtgaagagaataggagagacttttggggttgggacatacagtgaaacagtttcatttcccccaggaaaagccagccagaaaaagttaggctggccctgttctcttgggtgactttggacaagggaacaggagcccaagggattaagggggagggtgtgctaatacctctgtatcctcacagggggccagggcatttcacaaaggacaaaaatagatgagagagaagaaagacaaagagggatggctcatggaatcctctctggaatgaaggtgtgtggccagcaagggcctcggaggtgagtcatggttttacaaagggaacaggccccagggaggggtatgggctgcctggtgcaatgcccagacactgtcctcaaggtgaaccagagaatatttagacaaatggagaaaaccaggatgattttaattcggaacagagaactgggaccctggatcagtgaggaatgttctgggatgcaggtgatggaaatccattagcagcagcttaaacaaacggggggttcgttttctctcaagaagttggagaacagacagttccacggttgttcagtagctggacat

SEQ ID NO: 58883 - DNA, 1776 bp, Homo sapiens
tgaaaacagacatgctctctgctctcgaggtgctttggtctctgtggtgtttagaaatcaaatccctgaagagacccacattaatcaaataatcacatatttgaagttgcaagcccagctaagggctgcagaggaaatgagctaggaatgatgagaccatattacagggaccagctttagtctggaagtcagggaaggactcctgagttagcccagtgaggaggcgcatggtagtccagttagagggtaggagcgagatgtgcgaaggccctggggtgggagaccatacctctggctccagcaagtgaaaggtgggcagtgtggctggagtgcagggtgaagggcagataggcaggatgtgtctgagaagcaggggacagggcagggtcccatgaggcttgtaggccctgctgaggtcgttatcatgaatgggaggggacgaaagaggaggaggattgaaggggtttgaggacagagagcctgggctgggagacctggccagacaaggaggcttagctgttgcctccaccatcctctggcccaagtctgtatgtctggcctccctgggcatccagaaagttccccagtctcccaaggttggcacaagaataaagcaatttccctgggcagatgaggagggggttgagggtggtcctcaccacattcaaatacaggcttcttttctgccatgtattatttacctaggggcttgtgaaaaagagaaggatccaaaaaaaacaacagcaagcaaacaccccctccccccaccaccctgcagtccaacattgctccaggcgtgcagcctgagggaatgagtattttttttcctccagtatctgtacgtgtgtgagcatgtgagacgctgtgctagagctccaggtcccaaccagcataggtggctctggggcctttgggacatcgcgaggcggcaccatcgcctcccacagccccggcaaaggttggcctcatggggcctgcactttgagatacggtgggcttccgttttagatcagtctggtgctccagtaactccagcagggcctgccttgggggctgggggttctcaggcaggctggctcctggaagggtaaaattcccagaggaagggaggtagcgagtccgggggatttggcggccgcccctgcatagcattattctgtgcctcacacattcttattagcatcgtaatcgctccaaaatactgattcattattgcactccgagctgcagacggaggcaatggggtttaatagttccatatgagccattctgggctgttgagtaaatattgctcattgtgaaaaattgggtaaatgtgtgtttacgctgtcgaggagcgaggcaccagccaagtaggtagctggtgtctggacatgcacccggcaaggtggtggggacaggggaatgaatgttctctgggaaatatttgcttcctgtctggctggccttggaaatgttctttggacatggacgttgggatcaagaaaggggctttacctcaaaatcaaggtagaaggagccttgtgtttcttgtgcgtgtgcaaatggcttaggagtgggcaggaaagaccctgggccttccaagcttgtagagacaaatgattggattcagaatcagagagctggttaccaccagcagcaggaggcgatgtggcaggtgagaagtgtgcaggtgagagggtttgactctgggttccctgttcaaccacctgctaattgtgggatttcaggcaagttacctgacccctctgtggcctcagttttctcatctataaa

SEQ ID NO: 58884 - DNA, 2023 bp, Homo sapiens
aggtctggtagcctcctgcttcactggtgacctgacacttttcacttaccctggggtctgagcccactttgtcactcacagggaccaaaggctgaacaaatcctgggagtctctctaccttacctctgcctggagctggagtccagttcagccaacgtttgttaagcacccattgggtgaggggtgaggggagttcactttatacaagtgacaagtatctctgctagaggacaccaccccatggtcagtgtattccagcatgtaaatccccttgctctgctctaggggaacttgactgctctaaggaggagggtcagaatggtgtcagggtgaagagctctggctttaaaatccattggaatcaagttcaactcccagctctgccttttacaagctgtgtgatcttgagtgagcctctgcccctctctgagcatcagcttctccaactgcaaggtgggatgacagagggttgctgttaaggatccagtgagatcattcatggaaggcacttggccaagcacctggtacatggtgagtcctccagggagcacctccaatgaatgtttgtgactggaatggccgttatgagtctgtttctcatgataaccgacttggagaagtcaggctggggaggtggactggcccttgggtgctccagaggccatcgtgtcacagatacaacttggggtagcagccctgcaccccaccactattcctgtagtgacctttcttcatgctttccacctctacacagtcatgtgactcaacccaggaagacagggaagctgccagtcatagtatgccatccctctggctacagtgattggaccaccagagagtcacatgacttaagctgggccaatcagaattctctggtacttttcagctggagcaggtctctgttgtccctatagctgagacgtgggaaggaagaaaggaaggaagcctgaaggaaggaagtctagagccgcctggaggcagggtttcagacaatttcatggggacagagtgaaaccagcctgcagggagaggctaagagacagagtcctgatttgaatcatcctgagggcattctctctctttatcgtttgattacaggagcccaacccatgtttttatttgtgtatttggttgtttaagcttgttcagaccgagtttctgccacctacaatcagaaacacccccaaaacatgtctccccatggaaggttccgggaactcttggccactccattctgtgtgaccaaaattctccaaaggtgaatcagacacaagtcatgtctgccaacctggcctggtgttgataggcgggtctggtgcaggatgtaccctgttgtttgaagaacatcatgtggagaacaaggggacagagggaggccatagggtgtgccaggacacaggcctgggcagaactccaccacccttgggatttgagtatcccagaagaaggaacatttgggcagtgacatggccatgttcgtgtcactgaaccaccctgagaaataaggtcccgcgcagagcttcagcagatgtggaatagttccaccccctgcctcagattcttttcagggcagcccatcacgacccctctagcaagagttacctgccctccccaccgatcataccctagtccagcagggaatggcttttgcccacttttaaaaagtggcctgcagagcctggcgaagtccctcccgtgtccccaagcccaccacacctgcttcgttctgcatagttctccccgctttatctttgatctcaaaaaaagatcatcttggaaaagattgttttgtgtgcagtttacccaaatgccactttttctaattttgccggagttgccctccccactttccctcttccttttctttctttcttggatttgctctggggttggcttcctcgaaccaaaataactctcacaatgcacagggaaaagtgcttcctgtggatgaatgacatctgtatgaaaagccagccagccggccgatttctgtcctttgaagacgcttgtcagcgagtgctgc

SEQ ID NO: 58885 - DNA, 1910 bp, Homo sapiens
tgcagtgagcgatgatcacaccactgcactccagcctgggggacagagggatacctcatctcagagaaaaacaattgaattttagataaacagtgaatgattttcagtataagtatatcccatgcaatgtttgggatatacttatactaaaaaaaaaaatcatacattgtttatctgaaatgaaatgtgtcattgtttatctgaaatgaaatgtgtctgggtgtcctgtattttatccagcaatcggcttaattccatttcttctgtcttctgaacactgcagtgaataacatcctggaagctgaatctttgcatacaaaccatgtttcccagtcgaggcttctcatttgaatcacctgggggcttgttaaagcccagcatctcgccccaccccaggtctctcgaaacagattgcaaatttggttgagactgaatctgtaactaagtccccaggtgattcagagccaaagacgtagggtaaacacctgagtagagtaaattgtgagggccacccgcctatttcgctaaagtggaagatggggcagggaaacattctagctgttccctgcctgatcagctgggtcagctctctgctgtgagtgaagatagaggcttgtctttgcccaaccttgcctgggacccctctgcctgtggccttcagcttggacagggggctgagggggtgcccctaccttgagctgcccctcagctcagcccagagcctgccctgacttcacaggaagcagcagctgaactttggcagcaggagggaagtggggggttgtgggcaccagaaccaactgcattgatttctggctgcagttcttggaaggcctgtcatgaggaaaacaggcagcgggtaaacagcagacggcggcagggcccagcagctgggaggacctggctggacctaggaacctgtcttagctcgtggtaccggccaggtctggccaccactgttggggacaccgtgcccctcgggcccaggcctgagcctctcgagaccccaccatctagccaggtaaggtttgcccagacctggtcccccagaactgtctcccttgctctgcccctgcctgttcagagccttagggattctgggttcattcatccagtcccccacaggccttctctggaccaggcctggccgagtcacacctgagggctgcagaggatggaggagacagccaccacccccaccccccaccacccagccgcaccctgagccctgctcacaggagcagccgctctccctggctctggagggcagatctgatttctgttccatcccagctgctgccaggcacccctggagccgtcagaccgcagccaactaggcgggccgaccctgtctgcgcagagccaccgcaaaattacagctcagacaggatcaataggatcaggtcgaggggcctttggaggatgattttgctttgaggagaggtcagaggggcttcagacttataaatttattatttaagggaggattcctggtggtccgtaagagtttgttggacagggagttggcctctctctggtctcctggatgttctctggggtggagtcaaagcgtctaggctgtttgcgatgggataagctgggtgccttccccggcaatgggtagaggggatgatcagggtttgggggcagcgttcggatgcggagagggagctgctcaccttccatgtccatttgctgctgttgttttttggggagagctcagttgacaaatatatttgtgtgtcatgctgtctttttacttatttgggcgcttattgtaggcctggcattattctaggctgagggaatcaggtcatgaccaagccagatggagcttataagtctcattatttgtccttactggggaggaatccaaggcccagggtgtccgagtgatttgcccagggtca

SEQ ID NO: 58886 - DNA, 1814 bp, Homo sapiens
gcaagtcagcatcatcatttttataaagatcaggtcctcaggctgggatgtgcagttgaggaggatgctaatccaccaccactgactttatccagaactgatctaaggagcaaaacaaaacacctggcatataatagcaatattaacaatggaaacaacagatgccatttttgagcagttgaataattcccatgtgcctcctaccatgtagagatgacctagagaacttcaaatccatagctgcattcttgttcccatttgatggatgaggaaactgaggctgggagactcacttgccaaagctcacacagccaggaagtggcagagccgggatttgaattctgttggctacacagctcacagagcctccttgctggtcctcccagcagctgctccaaggagccagtgggagcttctgtgctcttctggggtctctcagtagctcagagcatagatacaactcacccttctctccatcactcagcagacgggctagcctcctcccaggttccagtctgtttccagccctgctcgagagtcttatattttcccctcccaagtcctcctttctaatcaggtcagccgttgactacgggccccaaaataatgccaagtgcagcctttgctgcattggatttcttgcttgcttagcagaatggaaactttggcatgggtatatgtgtgtccttaaaaaaaaatcctttatttactctgctcctgtttttataagatatgactcttaacgaggctttaattcaaggtcaaagagtcgagaagttggtgagaaaacccgtcgcccctcggggccctgctggacacataaacggccaaaggatggctcttttcatctcctcttttaaacagtcccattgcaacagagctattccttgcacgaggaggtaaaatatttgaactgattgtattgcctgttcctaactgtttgcagaatacatctctgccccccttgactatttattttttcctttgctgtagttcaagggaaataatttattaacttgggaattccaaatagtgctcccaaaccccgcagcgcccccgaggcccaagctggcctctgcctgccctgcttggggagttgaaagaggcctttccttgaaacgcgcagccgtgtggcagggcccgggaagacgtgggtaatgtattcacagacatgactcccagaccccgagtgtcttgaaccctagcctctggggactggcgcggccatgccatcgacctgaaccccctggacttctgcccccctggactgatggcctaaatccatcaggctcaccagccccggtcttggaccactgaataatttacggtccctcggagcggcgaggagcaggtcactggagttcatgggttaataacaggtttggttttcgatgtcagcagctctcttgataacgtatgaaagaatcctattctgttgattagattttgaaatggatcaatttttaatcagccaaacacctgactcactcaataagcgttgcattgtggagacaggatggaggccagctttatttacaagagtgtttgttttttgggggccatacgcaaattcccacccagatccctcctcctggaagaaattgaccagattatctcccacctcaaatggcagcatttgattcatcttctgattagttgggaaatccatgggtctgtttaagagataagaacagcagctaaaggtttgatttagtcttctgtggttattgatgggaaaagcatttatttgtcaatgaagaaatttttgcttaatgtaacagcaagaaagaagagaggaaacaaagggagtccag

SEQ ID NO: 58887 - DNA, 903 bp, Homo sapiens
ttggttcggtgtgtcctagctatgtgtgatatcaggcaggtcactttatctgtgcctcagtttccttacctgcaaaatcgggctaaatacagtaccgactacatggggatgttgtgagagttaaatttcttactttacataaaaggttatagtaagtactatagagcaggagctattattgttatttctggaacgcctgaactcagattaaaacgtcctgtcggcacacaatatcctctttttttaaaatcacacaatgtgtaacccactctttctgtagccttgcccactgtgtgctgctgtcaggcagctgctgtgtgccaggcatctggctgggcatgcccgaggcatcgtggtatgggttatggggtgggtgtcctgcgtgggtgggccgcgccaaatgctgtgcctgtctctcctccaacggtctggtgaggtgggcagggactcaggttaaatcaccctgggcagcagccaggtgtgggagccagccgacaaggaagccacctggcagctctccctccgagggaggatctagcaagctcaggcttgtggcggttgtgggcatccgagactgttttgtgcacttgtccaaagccgactgacatctgagcattggtggcagacaactgagaggagagtggcatgagatttcccctgagcctggcaccacactgtgccctgagcccaccccaccttcaaccatgtcacggacatgttgatgatgaaatactcaggctcattcagtgaggccctctgcctgggccaggccttgtgctgaaacagcttgcatgcatgatctcgtctagtctttgtagaaacccctcaaagtaaatccttattcctattttatggggagaaagctgaggcttggagacattttggagtcttccaaatctgtgt

SEQ ID NO: 58888 - DNA, 1168 bp, Homo sapiens
acacagcctgcccacctggtgtgcacctggagtccttgagcccatgtaagtttctcctttgcaggaacttttttgacatctgactggggtgcatccattcttcttcaggatttcctgcctcatctaatcaggcaaagatgtcatgtacatgtcacttacaattcttttctccatgttcccagctaagttcttctgttgcctcagggagttccgggagctgcaggtttcacctggggagggcccagtgctgcagttcccaccgtattctgttcttgctggctctaggaagttgggagtattgggacatgtgccctggcaggcagaatgcccgtcctctaggtgagggagcagagggtgcagggaatggaaaggtctgggatggggcttctaagttacagtgagaaaacaaatgcctgaaattaaaattcaagaggatgaaaagcaaataaatgagatagggcagttagggaaagctttgggtgtaatttatttaaactttttttttttaacttttcattttgagataatttcaaaaagactgacaaaaagttacaaaaacagtacaaagaattccccagattccctgaatgctgacatccagcctaaccacaacacaattacaaagtcagaaaaattaacgtggctgaaacaccattacataatggactgacctgactcaaattttgccaagtgtcccactgatgtcgtttttctggtccagagtccagttctggatcatgtgacgcatggagttgttatttccccatagtctcccttaatctccaacagttcttcagtcttcttttgtctttaatggccttgacacttttgatgaaaactggccatttatcttgaagaatgtccctccatttgagaatgcagggtgtttacttatgattcgattcaggttgtgcattttgggctacaggagtgatgttgtgtccttctccatgcattggatcaggaggcaccactgctgttaactttggtcacttgctcaaggtgaagactggctggatcctctgctgtaaaattattatttttccctttgtaactaataagtgcttgtgtggaaacattttgagacaatgtaatactctctgtcatcattcttttgcccaataattttagcatgcatcgatgcttcttgcttgaaacaattattgct

SEQ ID NO: 58889 - DNA, 1794 bp, Homo sapiens
cctcagtgctccagacagcgcagccattctccttgggcgggagggcactgggccggcggggcaggggcagggctgggaccggggctggggcagaaggcagggatgggactggggccagggcagagggcagggacgggggcaagggcagggactggggctggggctggggcagggccatgccacccccgccacgtacagccgccagctgctgctccagctcgcgcaccaccagccgcaggtagtcgaagctggcacgcgacagggccttgacccagccctccatggcatcctgactctcagcggccagcacgtaggtgcgcgcccgggtccccgcaaagcgcacagcgaaggcgaactcctcggcggcctccaccagctccacagtgcagccctccaggatgatgacgcccacgggctcacggctggcagcgtcctcgaagtagaagagcatgttcccgcgcagcacgaaccagcgccggtggtaggccgcgtgccgcccacccttcttgtacaggaagcctgcattgtccaccggggcgtcacaggtggcgtagaaggccaggctgcgctcgttcagcttcatggtggcaatcgcggggcctggaggggagcctggggcctggaccccatagaagggctgttatgcacaaggccactgacgctaggtcacccagtgccccaaggggaccttgcagccactctacatccccgtttcacagatgaggaaactgacgctcatagggtggaagcagctggcctatgcgcccacaactcctaagaagcagagacaggactggaacctgggtctcacgggcctccccagacagcctcataacctcctaccctcctgtatccctgaaataatgttgtgagttcctgctgcatgccagacatttcagaggaatgaactcactttatctcacaatagaccttaggtcacagggactggcctggcaccagtgcaacagatgaggaaacagaggcacagagaggttaactgcttccctggtgtcacaaagcaggttgggcagggctgaaatccaaacccaggcctcatttcaggcgctgctgtttccatcatcccaagaacaagaccagctggccttctgcagtccctgccaggtcccagccctgactttgtggttcgactttggtttgttcatccatgaaatggatgagcagaaccaactttggagagttgtagagattgatttcattcataaaatgtttattaagcatctactgggtgccaggcattgttccaggcctagggatatagcaataacaagatggacagggtcgtccagcctggccaacacagtgaaaccccttctctactaaaaatacaaaaaataagccaggcgtggtggcgggcgcctgtaatcccagctactcgggaggctgaggcaggagaatcacctaaacccaggaggcggaggttgcagtgagccgagattatgccattgcactccagcccgggcaataatgtgacactctgtctcaaaaaaaaaaaaaaagatggacacggtccctgccctcgtggtgttgaaatgccactggcaagtgaaagggagcagacagttaacaaacagataagacgtctgccaggtagtctcatgttctatggaaaatagtaagacaggggctgggcacagtggctcacgcctgtaatcccagcactttggaaggccaaggccaatccttctcacctgaggtcaggagttcgagaccagcctggccaacatggcaaaaccccatctctactaaaaaacagccaggtgaggtggtgcacgc

SEQ ID NO: 58890 - DNA, 2255 bp, Homo sapiens
ttcacaaggccagctccccatcctttggtctcagcctagctgtcacctcctcagagaggtggtccctggccaccctatgcacaagaggccccccagtccctctcctgtgcctccacctgaaattaatacctgggtcatttctgcctgcaggggcgtttgtggtctgaattctagtgcctggcatgcagtaggtactcacacagctgtttgattcattctgcagtatcttctgaaacctttcaacagccccaagacaagggatctcaccccacattcacagatgtggaaatggacacagggagattcaataagttggctagaggcatacaactgtgcccagaatcacatgctccaggcaagccacccaaataaaggggctgatcttggggtctctccaccccatcaaggccaaaggaatagcaacttccctcctgctcagcaaccctcctcccccgactgcctagatagaggccaaactggttcaaggtcaccagcaggcacaggacccagctctgcccatgacccctgcctccaccagaactgggaagacaggaagctgcaggggcacaggcgccagccttgcctggagcgaaggcctggcccctgccttatctccccacactgttttccaagaagttcagagtccactgtgggcactgctgctgattcaacagcccatggccagacaggaagctggagggagcctggcccagctctgctcccaaggcaaagttcctgcctccgcaggtccaggctggaggaccttggacaagtcgtttcacctttccaagtctcagtgtcctcatctgttaaattgggctgtgtggcgagggttcatgagctaaaagaaggaaaacccactggcaaactatgggaaatggattgcaaatattagctgctgtgagtcggagttttttctcagcctcatctgcaaaatggtgacgttaacttccatccctctaagggctgagtgaattgactcctgaagagtcattttgcaaaatacttggtgggtagtgagctttcagggaaagagctgtcaaaaaggcaaataattcatccaagatctccaggggcacagctggccccggaacccaggtctcctgggagactgaagcatggcattttggcactcacatcaacgaaaagaagccagtaccgcaggtcctggggttgaatccagctgccctcagtgtcccccagcagcgggcgtggggaagagggtgtggcaggcacaggctgaaaaacatgtgtgccaagaacactaaagagcagcctggccgtcaccgccccagcagggaccccagagacacgccagcaccgccgtccagacacaggcagcccccttgtccacggcaggggctgctgctccaggtgtggccctgctcccggctgctctctgtccctttgtgtgttgtgcgtgggagctctcttaagttccttaaaggacagccagagccccagatgggtgatcagcggcagaatggggggcttatccgcagtccccaccagcggcagacgtccctatgggctgagagaggggagggtggtcattggccaagttcgcctcggcagctggagaagtcaccactggtgcggagtcccagcggggaagatccccgcaacgcgctctccaggtggccgggggaccccgaggcccagggcggcccgacccgggtcccatgtcctcgtgcatgtccccccgccaggcccgccttacctcgcagcgcaggcctagggcggcgacgggacgggaggcgcgaggttgcggggtggcccggccatggttcgggactggcccggtggcggcgacggcggcggcagcgctttgtctcctgggcggccgggccggcgcagccgcgggagagcgcggatccgacggaaggaggcgggagcaaccggacagtccgcgacccacgggcgcgcccctttaacccttcccagcctgctcgcgccgggcccgcccccgcgttcttcccacctcccgattggcaggccccgaaccggcacgcccccgtgagcccgccctcgaaatcactcttaaagggtccgctcctggctcgcgactccccagttccctagcccagaaaagcggattggagcccgggaagctcattgcgattccaaaggtaaggactggcccaggtcgtggattagcctgcaaaagcatttgggggtcctgggcgggccattcgctgaagtcctaggcttaagtccgaactccccccaggacgaggcaggaggattgcctgagc

SEQ ID NO: 58891 - DNA, 1104 bp, Homo sapiens
tactcgatggtggctgagaggcatccaacctggagcctgggaagcttccaggaaggcttggggggaatccaagaggaaggttctttgcgggagaaagagtgaggcaggggagtttaggaggccgcttcccagccctcgatcgccccacagccaccagggggcgccagagccccgcgcaaagcggctgccaccaagtggctgccaccgcgcgttaccaccctcagggcctgatgcctgggactgcggccaagtcccggccccaggagctcgcgtgccccacgttgatcccgggtcacgggtggggacggctggggtaactgggttgtacgtcctctgcggagctattagggactctaattaccgggattggaagtgaataattatctactgggcctcaggctactgagtcacttcccccagaaaccagattccccaggctagcggaagagggggcggctcgcaggctgaggttggggcgggggaaggtggaagcgggggtctggggttggggtgcgcggccgccgctgtttttggtcaagatcagaactggggagcctgggtgtaaatcgctgctgggccacttaccagccacgtgaattggggaagtcacttcacctttcgtgcctcagtttcctttctgtcaaatgggggaaaacaacattctctccttacagttgttgggcaaagtaaattgtaatctacctaaactaagccctcagagtagtccctggcacataatcctctaataattcattaatcactcagaattattaattaggccgggcgaggtgcctcacgtttataatcccagcactttgggaggccgaggcgggcggatcacttgaggtcaggagtttgagacgagcctgggcaacatggggaaaccccatctctactaaaaatacaaaaaattagccaaccgtggtggctcatgcctgtaatcccagctacttgggaggctgaggcacgagaatcgtttgaacccgggaggcagaggttgcagtgagccaagatcgagtcattgcactccagccttggtgacagagcaagactccctcccccaacccccccccaaaaaaaaaggacaaaaaagaacattaatta

SEQ ID NO: 58892 - DNA, 3414 bp, Homo sapiens
ctactgccttcaaaataattcccaaagtccccaccaagaccttcaagacaccatgtgatgggcccacctttgaaacatcatctcttaccagtataggtgtcaccactgcctttatgactttattccaaagcaccacatgtattcccacctcagcacctttgcacatgctgttcctttggcctggaatgctcttccctcagacgttatagcacctggatccttcttgtcatggagggttctaagctcacatgttagttccgcagaggtgtccttcctgagccctggatctaagacatccccttccagctctccatcccgtaactgttttgtcattgtcatagctgatcccacttgcttattcgtgccttatgtccccccactagaatatcagctccacgcaggcagggatatctgtgttgttcactgctgtgttcccagcgcctagaacagtgcctggaaatgtgcggaaagcagatttttgtggcctttttcttcaaggtcattggacaccaggaatcctgtagcagaccgctcccttcccccatctactcggagtctggaaatccccaccttctggggaaccccttcctgtagttctaaggtcaggactggggccgatttgtttaacacagagagcttcctggagccaagcctcgagctaactgctttaatgcattaactcacttaattctcactgccaggagagtgggtacacattatttccatttcataggcaaggaagtggagaggtacggagaagtcaagtcatttgcccgggtaggaagagggggaggcagtggaatggagacacttgctgcctgggaagactcgaggtggcccctccaagctgggggcgtgggcgacttgtttcctgttgggggagggggagaagagtacattcctccctccccgccctcccacatgttgggggagaggctggctgagagcatgtcccactccggactagggggaaccccactgtccgtctcagctccccatgaggccgtggagaaaatgtaagtagcccgggggcgggcaggggggtgggcgcagaggccacggaagccagcggtcggagagggcttcctggagaaagatgcacccctcctagaattgggggacaggacgggcggccggagcgaggctgggctatacgggcaccggctgtagcaaaggcaaagctgagggctggggccagaacccaaatcgggggcctggggccgtggcgggtcgggtcagcatgatcgcagatagtcagggtcgggcagggctgggctccctccctggggcgatgatgaaagccgtggtcgctattgcaccgcccagccctgcgggcactgataaggccctgcaggagggagtcagcaagggcgcgccccctggaggccaggcccctcgaccctgcccgccctaggccccgccccttcatctggccccgcctccaggcgctgaggcacctggtgacctgccggcgttgagtgggtggggctaaagtcgccccgcccctccgatcctcacttctatcttcagactgtgggacgcgaaatcgggtgggcacgtggtgggcgtggcttcgcaaggcctcgcctttttccggacccgcgccaggagagccctccgaccctggcagccgcggactagcgggattggtaggcggggccagtccgggctccgccctcatggcccgcccctccagccgaatctccgactcgcgcgcggcctgaggcgtggctcctggtggccccgcccctgccccgcccctgtcgcggccggcctcccccgccgggctccgctcgcacggccggttcctctttacataacggcgcggggcggcatgggcccgggccaccgcctccgcccggctgcccgcccggactgtcgcggcccgcggtggcgacggcggccgctgcaaagtttccccggcggcggcggcccgggggcgcatcctcccgcaactgtcaagcgctggcggcggaaatgatgaggcgctggccattttccgagcccgggtttcctgcctgagccccgctcgagcgagccgcgagcgaggagccggcgggcgggagaggacgcgcccagggcgggggcccgcccgccccctcgggatttcgagggcccgggggcgcgcgacgccatgggccggccgggcccagagctcctgtctctcaggtgagcccgcgtttgcccgcgctcccctcctccggggccgggagggcttttgtggggaaagaggaggccccgtgtccagttctgcccgggctctgcgcgtcacccccagcccaaaatactgccctgcagccaactcggatggaggcgttccggggtgacggctcccagcgcctacgaccccccactcagccactacccccacccacacacgtgttagggagagcgttggggtaactgaggccgtgggatgggggagagggcatcgctgacgcccccagcccaccctacggtagcctcgccggttgggggcggccctcccctcaacttgtgcctggggaggagcggtcaggggtcacccattgctaccctgaaagtgaaagtagtcaaactgaggctgtgagcacagatgagcccttgggtgtgggggcagcgggggaggatgcgccggcccctccccactccccattccgggccatgtggctaagagggtagcgccctgattcaggaagcccctctccccagttcctgcactgccgaggtcgaccgggccaggcccccgcatgctgctgaattgggcggttcaccagggctaggcgtcccagagacaggtttctggtattgatcctctcacacctcttgcctggggttccctgggaatcccccgaccaaaaaacgtctggagtgggtgttggtcttctagatccgcacggtagggatggtatttcagaggtctctgatgcctggtgcagaaatccccttccctcccttccctccctccggccaggggagctttgttttgagggagggggactgcatttgaggaactggagaggagggtctgcctgcctgtcccgcttctttttttctttagtttcctcattctcctgtttctcttccccattcccagccacaatgatgtaggtgaggaggtcactgcctgcagctgggggcctccagggaggggcacggccaggctgggctgagtgggaggaagtgaaatctggtggggggttcagagcagaggccccggcaaggcaatgtcggcaaggccagctttggtggcaggagggaccgagatctgacccgcagcccctcgccggggagatgacagttccctaacaccggctagcagccaggcctcagggcccctgccagggcagtgggcctgtgggtctccagggatgcaggcgcaggttgtgtctgggtttcccatcactgacctggctgcctgagtggaaacagctc

SEQ ID NO: 58893 - DNA, 1185 bp, Homo sapiens
ctctgtttcagcttccccatctgtaaaatggaagtaatcgttggacctacctcctagggctgttaggaaccttggaagaggtaatattttgtaaaagtagttagaaaaatgcctgatatgatcttggcatggtgccatgagcctgtagttacagctactctggaggctgaggcaggaggatctcttgagcccaggagttcgaggcagcagtgagctatgattgtgccactgcactccagcctggaagacagagtgagaccctgtctctaaaaagagaaagaaaaatgtctgatgtgtagcagacgctcagtaaatgccattgttcttatgggaggactggtggaaggggcccaatgaggggggttcccagccgttgcctgggcagtgagggacctggagtgggcgcagctgttttgaggaaggctcctgccagggtttggccctgcagttgggcttcaagactctgacatacaggactgtgcggaaggtaggacggcccagggggcgggggaggttggttcatgctggttgccacgcatctgccgggagagcaagagtttgcaaatccaactgatctcttgcattcatatgttcattcattcaagaggcattcattgagctcctgctgtatgctaggagctggagatgaagcagggaatgactcatggaactcagtctgttggagagatagtcactaataaaagcatcctgtcaagtgataatgtgtgaccagtgtgctgaaggtcaagttcagttgggagctcagaagaggcttctcttatgtgcaattggaagcagacagggcagagggaatggctcatgccaacacccacaggcagctggcgtgactagcggcagatcgtgtaggtggggcaggagcctgggtctggaatcacagctctctgggcatcctccaagccacgagggcagcgcctgtctcacctgtgtcaaggctgggtgtggggaacagtaggattgaccaagaacaggtgcccttatgcaggggttagaccctccccccttcagggacaggaagaacatggtggccaagggcagatgtggcccctccctctcccttcccatctgcctgacagcttttagtgactacttactgtgtgcaaagtacctactgtgtgcgggtcccaaggaccctgtgatgtacaaaactgtcgactgtagcagggc

SEQ ID NO: 58894 - DNA, 875 bp, Homo sapiens
ttggcaggaggtgccggtcctgatagatctgggtgaaggagtcccaggctgaggaatggcaggttcacaagccctgcagtgagcgtgaaccaggcaagtctgtggaatagccaggcagcctggggttcgagggaacagggaaaggtgagactacaaaggtagtggagctggattgcagaggcccttgtgggccacagtggggactttaggttttacattaagagcagtgggaacaattggaggatttaggcctagagggcctgagacacttgctggggccacctgcgggtgggagtgggtgcaagggaccctccaggctacctgtggtctcccagctcaggcccgcgatgggagagtatgacatgatttcctctagagacctccttcccctgggcaccgctgagccccaggcagggcaaggacaggggagcagtgtgtttatgtgggggaaaggtgacatgcctttcatcacccatcatcgggctcacgaccgacactcttgcaacaagacaggtcagcaagagaaaagcatcacaaagttattgaatcaaagttttatgtgacatgtagctttcaggaatgaagaccgaaagaccccaggaaatggtctgtctggtgtttaggtttgatggagcagggatagctgcgtaaaaatgggattgggatgaaagggtgtgatctactgagctagacggaggcggggtcccagcaaggcctgcttgctcccattcctcttggcctctgcatggtgttccttcctcccagtgtagggcaggacctctctggaacttacaacctgcctccctcagacaaggtaggttggagaatttctctgtggatggctcctacccaggaaggtaggggaaggttagagt

SEQ ID NO: 58895 - DNA, 2916 bp, Homo sapiens
ctctctgagctatgaagtgggtgcctgcagtggccttctgggagtgatggggaaggcggagggggttgggcagggctcctgcggccccagccacacacactgccgccccatctgcccccttattggggttccatgcaaaatcgtttttgaaaaagtgctttgccgcttagaagaaacccccgaccgcgctgaaaccacgggggcagatggtatcggggcgcttcctttcagctcaaattctgcgaatccacagcctagaaagtgccctgaatccaacaaggggggaggtaattaagttattatggtccatccccaccccgtcctgcttaccaggcctggctgctcttactggcttcttggaagttggtgtggtatttttttgttttgtttgttttcgaggctggtattgagatgagaccattgtggggtcagggctgtgggcttggaggttcagggtcagggtccaggggcgaagggtggacgctggagaagggcagatggacagggtcaggttcagatcttggctcttgtatccttgctgtgtggctctgggccaagaacttggcctctctgcgcctcagtggctcattacagaaaatgggatgccagcacttgccttagtgggttgttttgagccaactgcaggctcagggagtagctggcatgatgtgttcctaccctgaagggcagaaaaaggggaaggaggccaccagatcccacaggtgggtccccagggtccctccccgggatgggcagcagcctggctgctccccacagcaacccctggctggccccattggcgctgctggaaatcccccacccagttctttgtgaatggaaaaggaaactgattgcgctagaagaggtctccgagtgccggccgggggtgggtggcggggggggcttcctctcccagtgcaggaggggccacctcagcttcctttctggggccccataccccctttttcctatctcccctctgagttgaggaggaggctgtggcccccgcccactgtttggcctctggaaccactgggtgacagtgtacatcggggcgattaagggccacctggcctctggacctccctcgctgtggctgctgcctgggaccccccaccccatgcctgactcgaaccccaacctcagctctacacacaggggcaccactgtaggaggagagagaaacctctctctagggaaccacctggaagggggccctgccctgtcttcatctgggtaccccatgtaatctaggaaactgtctttaacttgccgagggcctccatgtctgagttcctaatgttttttattttgctttttcaattaataaagctcatggcagaaactatttaaagaaaaaaaaaaacagtaacagaaaaacctcccacaatctcactacccagagagaaccagcatttccattttggtagatgtcattattgtcatttttgttttgtttttgagactgggggacactgctctgtcccccagactagagagcagtggcgccatctcggctcattgcatcctcaacctcctgggctcaaggtgatcttcccaccttagcctcccaagtagctgggactatttaatgctgctattagcatagacattagcaggacaccatgccctgctaatttttaagtttttttgtagagacaaactctcactatgttgcctaggctggtcttaaactcctaggctcaacagtcctcccgcctaggtctcccaaagttctgggatttacaggcgtgagccaccaccacacccagcctcttctctgtctttaactttgcctccgcctccaaattccaattccttcagcaattgctgggaagggattactttttgcacaattctgtctggagccccttgcaggcaggagcttgtggacaaaagcttcagcctttgcgggcctggcattcctcatactatttggtcacctgcttttttcactttgtgtcctgaacatttttctgtattcttttttttttttttttccacctcctaggttcaagcgattctcgtgcctcaggctcccgagtagccaggattacaggcatgtgccaccacgcccggctaatttttgtatttttagtagagacggggtttcaccatgttggccaggctggtctcgaactcctgacctcaggtgagctgcctgcctcagcctcccaaagtgctgggattacagccaccgcgcccagcccatttttaacttttttgctggtatagatgaccctgggatgaacaccttatgtcagtcttggtgcccacttctgatgattttcttctgctcagttcctagaaggggagtgctgggtcaaggcttttatgagcacttctgatccgttcttgctctcaaagctttattgagatataatttacaaaccataaaattcgcttgtgtaaagcgtataattcattggtttttagtatatttacagagttgtgcaaccctcaccataatctaattttagaacattttcgtcatcaaaaaaggaaaccttgtacccatgaacagtcactccccatacctccctccccagcccctggcaaccactcatctcttttctgtctccagggatttacctattctggacatttcacatatgtggaatcagactatgcagccttttgtgtctggcttccttcacttagcatcatgttttccaggttcaccgaagttacagcatgtattttgttcctttttatggctgaaaaatactccattgtatggacttgccacattttgcttatttgtttatcacttaatagacatcaggttatctccactttctggctgttatgaataatgctgctatgaacattcgtggacaagtttttgtgtggatctgtgttttcatttctcttgggatacatctaggagtggaattgctggggcatacagtaatt

SEQ ID NO: 58896 - DNA, 993 bp, Homo sapiens
tgtgcaatgatcaccactatctaatccagaacatttctatcaccctagaaaaaaaccttggagcagtcagtccccaaactccctgcctccagcccgtggcaaccactgatctttctgtccccgtggatttcgactgtttctcttctgttccttggtcatacacatttcttgtgatttatcaggctatttactcagcatgtttgtctcctgcactgcttgcctttttcttgatttgtgaacactacacggcacggatattagctctgtcccatgttgcaaatatttccctggtttccgatttgacttttcaattttgttcctgcatttcttgacctatgggggtttgcaagttccaggcagtaaaatccagtgatcttcgcctttatggttttattctttgcttttttaccttagaaaggcctttccccacccaggatcagataaataattatttaggttttattctagttctgtcttggtttcctttttcacttttaattatttaatccagctggcttttgttatgggtggctggtgtgatttcctgttgttttgtgatgtcagtgagaggctgtgtgtcaaggcctgtgacatggtaaacgttcagtaaacaggagctaaaatgatagtaatgagagtccgtgccgggtggagctcagaaggacatgggattcccggtgctgtgccgtggctggaggaggacctggcctggctgtgccagttggctgggagcccctccaccccagaagcccttgctctcacctcttcttctgaatcatcgttcttcgaaggcaggcagtagctaccgttgtctggggctttggggatcttggtggtgatgagtcccctctcctctggtgcactctccccacccgagacgggcgacagaggttttttgttgtttcttaaccacatctttttccacccacacccggtgcagagcagatgcttggccggggcttccccgagctggtcctggctttgtggcagggg

SEQ ID NO: 58897 - DNA, 3912 bp, Homo sapiens
agtagtgtttgggatgcttcagactcagagaaggggaagggggggcggggcgtgtaaagtcaaataaccgactgtttccgccccctttgaaggcagcagaattccttaaaaaccagctgattcctcttgatggggaatttctgctgtaaataaaaattctttggaaatgggttgctgaaaatgtgttttcaaaaagaaaactcgggtgaatgaaaaatcctcttattccaccttccaaagcccaagatgcctatttaaggaggacgccggtcacccgccgtcaagccggcggcctaggcctaaagaaggcacagtagtgcctacaacacggatggacttgaggcacaagggaaatggacttgcgtgcccttggtaagctctggcggcactcccgaagttaaggacaccggccacaatggaatggagtctattgacgtttccttctccctttgaacactaagcattttcttagttcgtgaaatacgaactgacaaccgcccgccacccccaacaggccctcctgcacaaacacaccctcgagtcaaacccagttagccgggacaacactgagcccccagcccctactacaaccccggcttaggagggaaaaagacgctagtaaacacccgcctttctgccttcaggaacccgaccacgtcccctgctgcaatctctctctcctagcatttccgaaattggggcgggggttgggataagtgcgcagggtgcccgccccctgccaccagcaccgccaccccggatctccagggtccagcctgggtccagccctcacccaccgatgttccacaggcgccttctccactgcggcctcgaacagcaatgcggatcggccaccacccgcgcgccggagaggtctggcgggggaaggaggaaggccgggacggggccgggcactccccaccccttcccttccccaggtgggggagggtggaacgctgccggaggccacatggagccccacgatttcaggggagttcgggagcccccgccgccgcctcggacacgaacgcagaggggtgcgggggccaaggcccacttgtctccaccccgtcctccgatctttcccaggactcggagggggcggggagagagccccgacagaccctgatgattccggaggagcccggtgcctacccctttaaccggcacgggggacgcggccctaacttctcccctccagagatgtcccccatggagggggacatgttccggaaaacgccaccacagcctccagacccctccaacgttcacacctaaaccgggagtggaggagctgcccgagcatccccacgctgcgggcggaggatcgtgcggaagggggagccggggctgaccatcgccgctacccgagaacccctcccaacacgcgtggggaggggaggccgcccgctccctccatcttgaccgccgggggagggggcggggatgctgcgggaggctggacaggcctgacaatcccagaggaccccggctgcgcccaccggccgagcctcggggctcaggcccgagcgagtctcccccgcgctgccggcccccagcccaccccgggtagcccggcgggtcacggggcggggacggcggcgcgggccgcgggggaggggacgccgggcccggagcggagggggctggggtgccgacacccacctgcccaggccgggcctcccgccgccggaggtcgccgcgaccaccgaggagggagccgtggccgaggacgaggagaccgaggacgaggacggcgaaggcgcggcggcgggcgacgctagaaggccgctgccgccgggcttgcggacattggcagccgcgggcggcggctgctgctgctgctgctgctgctgctgttgctgctgctgctgctgctgctgctgctgctgctgctgctggggcttcagcgacatggtgaggggcccatacaccggctcgcacgccgggcggggacagccgggagccgggcgcgccaaggagacgccggaacgcggcggggacgcgcgggcgccgagcggggaggcgcgggttggcgcggccggaggggcgcccgggctggcgagggggagaaggaggacgacgaaggggcggggaggcccgccgagaccaaggagccgccgggagccgggccgaaacgcgccgccgccgttgccgttgctaccaaaacagtctgaggcggagggaggcgagctctgccgggagggaggggggccggggccgggcgggggaggggcggcggagggatacggtcccggggccgcgccaccgccgccccgcccgctccgccgcgccggccgctggagcgagcgccacccgggccacctggctgcggcgaagcggcgagactcggtggccaccgcgggactccgaggagctgcggccgctgagcgcatcggagggcgggcgcgccgaggcgccgggtgggagcggaggtgcggatagggactctttaccggaagtcggaggggtcagacggaagcagaacgtgaggtggccccggggccgggagggacacgtgaggagcgggcggcgcgctgggttgctttctcgggggtcgggtgagggccaggcggcggtccctacccggatccgccttcctcaaggcgggtctgcccttcggggagggcgtgtcggtctcagcctctggggcctgcctggtgtggaggacaggagagaagcatttcttctcctactgtattccttcagcatcttcacttctgcggggacctagtttgcccccacctgatgcaacccagaaaatggactgactgcgagtgccttggggcggagaatgtgtcttgctacgtgtaaagcacctagaaccctgccagattcaggggacacagcatcctgccgttttcctgccgtcccccgcccgccacacagtaggcgctccagtggctcggggcatctaccaggcaggccgcgctgtcctgccctgccggggctggagtggagcaaccctccggggccacccacatctgggtaccttttccccactttttccaccccagccgcgcacagtcaccagaaaactcttttaggtatctgaccttcatttgaacctatgttccctcacttgaacttctttttcctcattcatgagattctaaaggaaatatatgggattgggactggtagaactacggataatgggatctccctcggtagagacagagccgacctcaaaacaatgtgcgaactttagaccttggaccctttagaagttttaatttaacttacccagccagcacagtagactctttttaaaatgtgttgcagttaaactggaagcaagtagaaagtaggtaacttttttttttttttttgagcagtgaatctattgttttttaaagtgaaatgacttcaggaaataataggggaagaaacaccaaaattcccctcaatgtcctagaactgtccagataaaggtaaagacttagataaacgtggagaatgattgaaccagcagttttcagtagtccaactgaaattaacctcctagatagtccaggcaaaaatgatcattgtattctgccaatgtaggaaatcagttttatttcccatctaaggtaaaaagtagatcaagggaccattgcaaaaccctttaaaaattaacctagcctagccaacatggtgaaaccccgtctctaccaaaaatataaaaattagccgggtgtggtggtgggcgcctgtaatcccagctactcgggaggctgatacaggagaattgcttgaatccgggaggtggaggttgcagtcagccgagatcatgcactccagcctgggcgacagagcgagactccgtctcaaaaaataaataaataaataaataaataaagtaacctaaaggaaactggaactaaaaaaccagttgaaacaaaaaaatacctgtacccggctgtggta

SEQ ID NO: 58898 - DNA, 610 bp, Homo sapiens
ggactattagaaccatcctgatgaaaatagcaccaggtatagtttctgcacagctgcttgtccagaaatgtgtgaccttgggaaggtcatcctcattgttcttcatcgaaaacaaggggttatactagatcttctcaaattgcaaggaacctttcagaggtcatgtttcaggaaaatgaaagaacaggccatatgtggaatggcccaatcgctgcctgtagagataagacagccagagaggctgaaattttcagctttcatccagattttggcatgggctgtgagtctatgatttttcaacttttccttctcgtaggcttgtttaaaccctttgatctcattttattgtgcaatattattacaccactttacaaatagaccatttattccaggctgaccgtaaaagtcattcccggctgggtgcagtggctcaagcctgtaatcccaatactttgggagttcgaggcaggcagatcacctaaagtcaggagttcgacaccagactgaccaacatgtagaaaccccgcgtctactaaaaataggaaaattaggacctggcacagtggctcacaccagtaatcccagcactttcggaggccaagacgggcgg

SEQ ID NO: 58899 - DNA, 661 bp, Homo sapiens
ccgtagcattactctagccaaacagagccaggaatctcgccaacgagaaagtgcaggattggcagcaaccgagagatcccgcatggacttttaggaaagattctaggccacagcacggggcctcctccgtctcagccaggataattctggcatcagcccccggcccaggcgtgttcccacataattgaagtcgaatgtgctgggggagaggcctccgcattcctcctggctgtggaatcctcagtgccctgcagttggccctgtttgggatcaaagccagttcgtgttgattttccgcagcatggaaacaaatgcgacgaagctgttttcctgaggcaggcattttgaaaagaggatcttaatttttttccccaaggacaggtggggtggggaggtgggggagtgccacgtggctcctctcttgctgtcccttttgcaaacagttgggctcatagtgtctgcatgagcagaaactgatcagttagaatatgagtgaatacagctacagctaaggttgcttctatcacaaaagataattcctaaaaaatgctgccggaagaccctctggctgcgtgtgataagtcacaatttggttgctctctgttggagtgtttccaagatagcaactctcctttttcctcctaaaattttctgcttacat

SEQ ID NO: 58900 - DNA, 2045 bp, Homo sapiens
cggccaagtatttcttgaatgaatgttagttaattatctgaggaccaaggaacagagccagagctgcattccccactaaggagcttcctcacttgtgttaatggtgtaaaaagctcagactcaagtccagctcactgagttagaatcccagtttcacccattacagataaccttgggcaaatcaattaatcactaagcttcagtttcccaatgtgtaagaggtacatgtcacatccatctgcctcttagggctgttgcaaagataattaaagaatacaatacacaaaaggtgcttagtacagtgctgggatataggaagtgtccaaattttagttatgactatggttagggggcacttcaatggatatcgttccaaaagggaacaatttaattaacccagggaccgtccagcgttgctggggacccagtccctgcctttacgaagcccatagggaagcaagtgagacaaacacaccactcgactatctcgagagggagacgcgccaggtataaactaaatgccctcagacggcacagggagggaggttcggggcagggcttccctgagataacaaacgggaaggcctctcaaaggcggatgggaaagagagggatcccgattacctctccgtgtcttcctgggcaacagccctcgccgcgggcttttcccgggccagtgctttgggaagggaagccctccgggcccagacccggctacagggaatgcggcgaggccgcgggactcacccgcggcgctgaagccgaagccggcggggacaggcgagtgttccgcgagctccaatcggataacaaccagtgacacactcatagggcaggcgctggccggcgcgggccccggcgggctcaggcgaggctggaaggcgagccgagaggccgagcggcccggggccggcagcgccgccaccacctcaatgcagttgccgccgcctcagcagcagcagctcctcgaacagccctcggagccacaacaacctccacttccgcctcccggccgccgtcgctgacctgcggtttacgcatgcgcgcaggaccgcgcacagcgattgggcggcgtggcaggggtcacccactgctcttccggacgcaattttgaggaggtcggagcggaaggacgtcgtggagattgcttgcgctggggtgccacacttaggctgagctgcaggttttcgcacagtcgcgagttaacctctgcttgctccagaggcctcgtcctaatccacctcggctgacggcgcgggatccctggctccgcgaggtctccgaattgtccgagctatctgctatgcagaactttgccccttttgttgtgtttgactcctgtctctaaccctagtctggatggttttgtttctgtcccactttacagataggtacaacgaggctcagagaggtgaagttccttctaaggggccgtagagagtggagagtcgatcgctgttcagatagcgatctggctgggcgcggtggctcacgcctgtaatcccagcccagaggcttaggcgggcgaatcacctcaggtcagcagttcgagaccaacctggccaacatggtgaaacctcgtctctactgaacatacaaaaaattagccgggcttggtggcgcgcgtctgtagtccaagctacttgggaggctgagacaggagaatcgcttgaacccgggaggcggaggttgcagtgagtcgagatagtgctagtgcactcccgcctgggcaacaagagcgaaactccgtctcaaaaaaaagagagaaaagatggtgatctgctggttacgagcatagtgctgcagttagaccggggtcctcctccccaccctgtcacttcacaaatgtttactgagagtctagacacccttgggatgcttgagatacgttggcgtataagataaacacagttcctgtccgtactatgaggttgacctacatcagcagttgtgcagtcttgaactagtatagtcattgcataaagttggcatgatatcatgtcctcatgcagttgtgaggatgaaatggaattatgtatatggag

SEQ ID NO: 58901 - DNA, 623 bp, Homo sapiens
cacgccactgcactccagcctgcgcaacaaagtgagaccccgtctccaaaaaaataataaaaaaaagaaggaaaaagaataaataaaacaagaaaaaaaaaggaatacttagaaccttttctgatgccttgtgactttcagaatttaaaatcccccttgcagataaggccacccacggcggaaggccgggagcgagacggggctgaggggaccttgctcccattggagctgcagggcaggaaggggtgctgcggtcagcagagggcacccttcgcctgcgccgtgtgcagtgcctgcagtcactccctcattcccaggagtagccttgggtcagatgctggctcagatctataactgctcctgtctggtagccaggcctgcccagatgtgcaatggctggaataaagggttcttggaagcaatttgttacaggcaccctgtgggctgtggctggctgtggcacacgtgaaggttgtgtgtcagacctactccctggacatggcgcatggctgcacacaggcaccttggctgagaagatgcacagtcctggtttcactctcctcccctgccctgtcctgtctgcttccacccagctctgcaggccaccagcccccgcctctcgt

SEQ ID NO: 58902 - DNA, 2479 bp, Homo sapiens
tcccagctactccggaggcggaggcaggagactggtgtgaacccgggaggcagagcttgcagtgagccgagatcgtgccactgcactccagcctaggcgacacagtgagactccgtctcaaaaaaaaaaaaaaaaaaaagaataagcaaatcatgcaaatcatcctgttctaaactctgaaccgctgcttccaagaccgtccctgcccttgccctggccgcctctctccttgttaactgggctccattcattctttccatttctctaacacgtgccaggtggtctcatctcctggcctttgcccttgctgttccctgtcatcattcaggtctcacttgtcatttcctgaccatggtacttataaaagcagtgccgtctgccccatccatgtcacctcgttcatctccttcacctccgaaatgatctcgcttttgggtttacggccggtctcttcacctggagcatcagccgggaaggtcagggtcgccctggctcgggcctgttcacattggggtcaaaggcacacattgggggctcaaccaaggcgagctgcgttcgcggggccgggtctttccgcacaggcggagggcggtggcgggcgcggaggcgtcgcgcgagccagggggcagccacgggccgggggtacctagcgccacccgcttcgcttgcatcagctgcgcgccccatcccgaggaatggtagaggcagccccgcccccggcccgcccccgcctttccattggctgccgcgcggggcggggagcggggtcggctcagtggccctgagaccctagctctgctctcggtccgctcgctgtccgctagcccgctgcgatgttgcgcgctgccgcccgcttcgggccccgcctgggccgccgcctcttgtcagccgccgccacccaggccgtgcctgcccccaaccagcagcccgaggtcttctgcaaccaggtgagcccaccggccgggctcgcgctttgttttccggcccgagtcccccgcaggcccctaggaaggccccgcgccgccgtgggccttagtgtactcatctggggctcgaggggtttgcagaggctgacctggaagcacatctgccccctcctctcctgcaagcattttagccccttcgccgcctctgacagtccccgtcccatttccccgtgacttgggccccctctccgtcttcgcccagcctcggtctgttttccagggccaactctcggggttccgttctccccatggtccttgctttcgggtctccgcagggtccccaccctcacccactcagaagacgcgaccaagtccctctttgcaggaactttcctgtcttttccttagtcatcccctttaccccctgactcatgccctcatccaaggagttcaaaaggaaaaaccaggaaagaggtgatttgcagccacgttctccagttcaccatgggcgaggccacgctcggctgcttccattgctgggagtagggaatcctggaggaccttcggccccagggggccgaccccaaggggtgtctgcggcttccaacgccggcttcgaccaaaccaaggaggagctttccaggataaaactgattcctgtggtccatttattgattgctcaatcagtaatactttggaatattttttgttttgatctttgagtttggttaaagttctagacttcacagaggctgaaattggttatgaaagagtttgttttgtttgtgccagtgcatgttggctgccttctctgacttaagctttttctcctataaatggaaaggcgctctgagggttaggttcacacaggccctcatcaaccagtcacttcatagttaatcacagctcctgtcctgtctgcacagcctttgtgcagcactgttctaagcgtctacctgttttgcaatttaaggtaatttttacaacagcctcagtaggaagggactgtaattctccattttacagatgaagagactgagtcacaaagaggtttagtgactcacctaaagaccaaagtcagtggcatagttggggttcacagctgaacttccaggagtaagcccctaaccagaacattccatggtatgttgtgactctgggtgggaacaaagggaccaccgatcctctgggactattgctgatttgggatgctgtagagctggctcctagccagctgctttcaacagcacacctgctggtctggccctgagtgtggctgcaaatctggatataggtgatgggtaaaggcacatgcgtgtgattttaggggatgttacaaaggtcatttgcaagggaatttttaaaaggataaaataaaatcttttgcataacacaagctaaaaaggcagcagctatggctcccttggcagcctgtgcaagttcatgcttggaagacttgagcatcaaaagatctagcagaggccaggtgcagtagctcatgcctgtaaatcccagcattttgggaggccgaggtgggatgatccgttgagcct

SEQ ID NO: 58903 - DNA, 3114 bp, Homo sapiens
cacctcaggtggagaccagcctgaccaatatgatgaaaccccgtctctactaaaaatacaaaaattggccggtgtggtggcatgtacctgtaatcccagctacctgggaggctgagacaggagaaacgcttgaacccaggaggcggaggttgtggtggggcccagtgacaccgcccgcctcagcctcccaaagtgctgggattacaggcatgagccaccgtggccggcccgtgtttttaatcagagaacacaaatgggcattcaatacttcctgcctgcccagaatctgtgggacacacttgagtttcaggtgacagggctataataatgtttgtgctcctgaggtcaagctgagttgagaatttacatgttgtggacatgtgtatgtattccctgctccagtaatcatgattattcatcacctattttccatcaggccctctactgaggacttctacctgcatttcacctttcatcctacccgcaactctataagcctggtagtattgctgtcccgtcttgcgggtgaggaaactgaggctcagggaggtcaagttcacattaagtataactaagggcatgtgtgtgaaggttgggcagggcagaatttgaagcccactttcaaacttataacttaatgtgaacttgacctccctgaataatgatcagaccataagaatgtattaataaacatttaagggacaattgaatagaattttaaaatcagagaggaggagccatgtttgtattgttcacttttgcattcctggcacctagcaccttagcataggatcactgttgggtaaatatttattgaataatgaatggttgccatttacgaaaccatgtttacagttttgtgctccagaagtgaggtaaagggttgcttaatgagaacccagtatttctactcaaaaggaccttattgcaaagtatttggaagtttaaaagagtgggaacatggggacgcatagggagtggtgaaactggctcagggaaagtccattgcagcaagatagaggttgccaaaccgtaagcagaacaagttgaaaccgcgcctgtctggcaaacagtccaaagtggaattgaaactcccatctttgaagtggtgaaaaaaggccctggggtgggggagtggggcagagggctggcgtctgtctgcctgggttagtcttggttcgggagtgtcccgagcaagcctggggagatgactgcccctcgccttgatccccaactaacctggggttctggattatgtgtggggaagagggaatgtgtgtggcattccgtgtttgtcttgaactttactccctggaatcttgtaatacaagcaatggcatctgctttccatcggacataatcacctaaccgcagattagcaagtgaaagagcacatgccgttgggatcatcccaggctgcaaaaccgcgccattagcttgctcactctttgggaaaatacggtgttccagggacggggatttcctaggtaacatgtccagttctctcatgcatcaaagcttgaactgaaatctttctagaatgtatcctgcctccttaaatcagaactactgaacacagtttagcctttcattggagaccctgggcagatgattactgaacacagtttagcctttcattggagaccctgggcagatgataaccacccattgtcatgaggtctgggggtggtggccagaatttcattctctcctggccttggtctgacctccgcccccaaggtccagttgtcctgctctgggcactgaccctgccccagctcctgagcccctcgaccaccacaatcaccactaagtctctgcctggcatggagaacaagatagccaaggtgaagagggatcctgttaccctctaactcagtagttctaatttctacacagtaatctgccccatgtttggaaaaacgcatgtgaaagggttcgccacagctgttgctggaatggcgatcacttgtcctaaaagtgcatttgtaggaaatcgttaaataaaccatggcctgaccgtgttgaggaacgctatgtggcttaacatgaggcagagctgcctgtggaataacgtccaagagaaactgagaaaagcgagttagcaaacagcaagtctattacccccacttagaaaggacacggcagtgtcccggttctctggtctcctgggtcctcccagcatcaagtgcagatcctggcacacagcaggtagaatcgcgagccccccgctctcccctcacctacaccctgcagccactcctcctgtccccaggctcttcctagcagtcacccttcagacccctcagctggccaagcctcctcctgcttctcacttgcttggttttgcttgtttcctgcgccctctcctcaccaggacttcagctcccacaagccaggacttggctcttggactccctgtgctggagtggccagggctgtcagtgaaagcttatggaatgcgtgggtgaatgaatccaatttttacaaaacaaagtgagatgtatttattaaaatatgtaggaattagagtattttgatagaaaatctttatgttttgcctacagtctagattgaaaatgtcaactccagacatcactgtgcttctggaaactataaagaggaagtgggagctaggacatccccccaccacgccccgcccaagagcgtttacgtgtgttatgtaagtcgagcttcgggtttctggtcaggaggttataaagcatttggcccagagtctggcctggtgtttattcaggaaaactgctcctcacttgaagcagaactttggcagaaactcagtgtgagaacagttcctacccagccccccaccggggagggaagccactgagtctggctctgggagaagggaaatgggaaatgtaaaccggaggaggtttccagcgtcctacagcagacccaggtttatcttatcagtggagaagggaggatgggttgttgaaaatgcagcctggttcaacagtgaagggtgattgagaacattctgggctttgaaaggcaaacatgccagggagtggtctttccaggatcctaatctaaatcagaggggccagcccagcgaggaaggggtggggctggtggggttttagccag

SEQ ID NO: 58904 - DNA, 1805 bp, Homo sapiens
cactgcaacctccatctcctaggttcaagcaattctcctgcctcagcctgtcgagtagctgggattacaggcaagtgacaccatgcccagctaatttttgcatttttagtagagacagggtttcaccatgttgtccaggctggtctcgaactcctgacctcaaatgatccacctgccttggcctcccaaagtgctgggattacagggatgagccactgtgcctggctcagaatcaaaatgtgaaatcaacgtgtgttgagtcagtaagtaaaccataaagatggagatttgggaatcagaattccaacctccttgaaggcagacctgggctatggctggaggttggagttgggaaaaacacaggccttggagtcccaaagacctggcttcaaagcctggctctgcctttgctgctgtgtgacctagagccaagtggctggactcttctgtgcccagcatcctctgctgtgaagtggagaggatgaagttcacctcctaggtttgctatgaggtttaaatgggaacaatccaagtacacagaaccgctggtgtggggctggttcttgaggggtagctagtgaatgttagccatgtccatgacacgcagagggctgagtggacttcctccctgggtgggggaggaagaagcttggggatagtacaaggccaaccagacctacttccacccagcccagcctagtgcttctctgtactctcctaaccctgctgacccaagtgctttgctgtgaggcagttgtgtgtgaggcgtgaaccctgagcctgtgctacagggggaaggagagaaggatgcctactcaatggctgcaagctgcctgcccgccccccacgcccgtgagcccccatcttccagcaggcagacccgggaactcccttctcctccacgggcaccccgaggaggagctgactttcagagtcggggagtaaacacccaggacctgctgcccaggcacggcatagtccaacttgaacttaggtctggcagtttcctggctttgaacctgagctctttattgccacacctgtccccacactggaaatgacccagccctcccgtggaaagaaagaagggtgccatttccctaaaaattaacgattgactaactaatatgaaaccacacaagcacgcctccagaaccccagttaatgtttacccatgttcttctccggtgccaagagcctttcctgtgggtgcacaactgcgggttccaccatagagattatgcggaacaaatttcagcctgggaatatgattcctgctaggcccttacctgaacgactccttcctggggcactctgtttccaccctgccatcgtcatggcgttgggcattcactccatgcttggcgcagagactgcagaccctcacatggctttataaaaagggggctctagggtgattcccaccctacagatgaggaaacaaagacacaggggtgaggtgcttgtcccatgtgacaaaatcaggagcaaaagagcccatattcggccaggcgcggtggctcacgcctgtaatcccagcactttgggaggccgaggtgagtggatcacctgaggtcaggagttggagaccagcctggccaacatggtgaaaccccgtctctactagaaatacaaaaattagccgggcatggtggcaggcatctgtaatcccagctactcaggaggctgaggcaggagaatcgcttgaacctgaaaggcggaggttgcagtgagccgggatcgctccattgcactccagcctggggaacaagagccagactttgtctaaaaaaaaagaaaaaaaa

SEQ ID NO: 58905 - DNA, 1142 bp, Homo sapiens
tccggactcggtcaaatgtccactcctcagggtgacctgcccctaccaccacggctggagttctctaccccccaccttagtcaccttctctggatcctcttcttcccttcgccttcatctgtacagtctgaggtggtcttctgtgtttgattgcctctttatttcctgggcaccatgagagcatggtctttgttggcttttggctgtactgtgtcctcagccctagaactgtgcctggcccatcgcaggtgttcattaagtgtttgctgagtgagtgaagtaataatctagggctgggcatggtgactcacacctgcaatcccaggaccttgggtggctgaggagggagtatcgcttgagtccagcctggggaacatagagggacctcatctctacaagaaatacaaaaattagccaggcgtagtggcgtgtgcctgtggtcccagctactcaggaggctaaggcaggaggatcacttgagcttaagaggaagaggctacagggagccatgatcacgccactgcactccagcctgggcagtggagtgagaccctgtctcaaaaaagaaaaaaaacaataaaaagaataatctaatttagttctcacaacaaatttgtgtgggagtggaatagaatgaaggtggttgcaaattgtttgccattccttctagggagaaggggaggctctctcctcaacctgggactctggactgagcctgtgactcactttgaccaacagaatttggtggcagaaatgaggccaagtgacttctgaagctagatcttaggaagcctttcagcttccacctgggtctctaggaacactgtctcaggggaagccagctgccatgtgggaagtcggactagcttgagccagccatgcagtcaggaagcccaagcagccatgtggtgccagacgagtaagtgcagaagccatcttgcacatccagcctcagaggtggatgactattggccccagctgtcctcacactgtagccacacaagggaactctgcccagatgagcccaaccaggggactctactgtgggagataagaaatcattttaagccaccaagttttagggtgctttgttacacagcaatggataactagaacaagtatgaacattctcttcatttttt

SEQ ID NO: 58906 - DNA, 807 bp, Homo sapiens
ctgtctcagaaaaaaaaataaaaaataaaaaaattaaaacttagatgggcgtcttggcaggcatgctacttgggagtctgaggcaggagaaccgcttgaacctgggaggcggaggttgcagtgagctgagatcgcgccactgcactccagcctgggagacaagagcgagacttcgtctcaaaaaaaagaaaaaaaaaaagaaaacagtcggtatccttcacaacaggtgcacacagccagggcaatcacgcctccccggggacactgggcaatgtccagagacatttttggcagcctcgactgcgaggggaagggtactactggcatctagtggatagaggtcagagatgctgctcaacatcgtacaatgcccaggacagtcccacaacaaagaattctccagccccagatgtcagcagtgccaaggctgaaaaactccctctgcaaggacaccccagagagagcagcctggtacatctcagttggggccacatgctttcctgaattttggcattctgcttttgtgctgatgaaataacttctggggcttgcaaaacacatgtcatgtagactgtgtttgtatagatctgggggagggaagctgcaatgcctgggcttgcatagattggcaaccccctagctagctttcttccagggtcacaaacccatgttcaaacccaggtcactagccaggtgctaatggctcgagcctgtaatcccagcactttgggaggccaaggcaggaggatcacttgagctcaggagtttgagagcagcctgggcaatatagggagacccacatctcta

SEQ ID NO: 58907 - DNA, 2390 bp, Homo sapiens
gtcccaactacttgggaggttaaggcaggaggatcacttgagcccaggagtttgaggctgcagtgagctgtgatcacaccactgcactccagcctgggtgccagagagagactcggtctcaaaaaacaaacaaaaacccactgttgttctaagtgaatgctgtcaggggaggggcaaagacacagggaaccccagcgaacagactccttctccgtcccatttagaattcccatgtagtgccccatacaattagcttctgaccacatgtgtccttggcagactgtcccaccctctctgagaaaggatgtgtcttcccctggttgagcccttcagaataggagggtgactcccaatgtcccctggctgtttgctcacaggctggctttccccctggtgtggtcaacattgtgcctggatttggccccacggctggggccgccattgcctcccatgaggatgtggacaaagtggcattcacaggctccactgaggtaaggtgaccctggcctcaagcttgcagcctccttggcccaagctccccctgtcctcagtggacgacatgctcaaggtgagctcccgggtgtcaagcggaggccttttcctccaggacgaccctgtaggtaccaggaggggtggggcagggttgagcccttcgtggtctggttgccacactagctgcccttgggaggggccagtgtcccatgtggactaaggaggccaggcctggccagactccacatagcccagagctgaccgcttgccccaaatcaaagcatcttggccaggtcagactccttgaccaggactgccattgtggttaaaaattagccttgtgtggtggtgtgtgcgtgtggccccagctacttggaaggccgaggcaggagggttgccagagcctgagaggtcaaggctgcagtgagctgagatcacgccactgcactccagcctaggtgacagagcgagaccctgtccaaaagaaaaaaaaagtgaacgtctatttggtgaaattctctaggtctctcgtggtccagttgctcactcaagctgtgggggactctgttctgtgtctatagagtgctggactcttttctcccggcactgagagcttgttcctgtctttctgtccccacagattggccgcgtaatccaggttgctgctgggagcagcaacctcaagagagtgaccttggagctgggggggaagagccccaacatcatcatgtcagatgccgatagtgagtttccagctggagaaggcctggccttgaaggtagccctggccacctgtgttgtggctccagccgatcctgtcgcccccccagtgcccaatggcgttggttgctgtccctcgggcctcaggataagacgccagcgcagggcctgcatggcctggccttggcctgtccccagcctctccctggctgctctctgcatcatcaggctaggccacgcccctgctatctgactcatccacttgccgccatcacgccctttgtcctggttggcagtgggctccgagagcacccctcatctccctgtatctgtctctggcacccagcaggcatcaacccttacagtggtgggaacaggctccattgggcaggcggccaccagggccagggtcctcctcctcactgtcacctttctgtctcctgcccacttcccgcagtggattgggccgtggaacaggcccacttcgccctgttcttcaaccagggccagtgctgctgtgccggctcccggaccttcgtgcaggaggacatctatgatgagtttgtggagcggagcgttgcccgggccaagtctcgggtggtcgggaacccctttgatagcaagaccgagcaggggccgcaggtgagccaggcagtgccgcagggtctgggtgtctagagccagcatgagaagcagagagggcatcgggctcagatcagttgggactgggttcaggtctcagctctaccacacagcagctgtgtgcctttgggaagctatgttccctccctcagccttcatttccccatcccgagccgtgccctgcctcattcacagggtggctgtgatgtagaaattaatcctgggaagcactttgtaaattgcatatatgtaacaaataccaggagtgtctgcaaaagggagtgtgtgtttccaagaccttggtcatcagtagaagtgtatccaccagaagatacacagctctgtgaaccttcgtgtctgagagccatggtatggctagtatagggactttatttcacttcatgttttgagctgtttgattttatttatttatttatttacctatttatattttagagacaaggtctctctttgttgcccaggctggagtgtagtggtgcaatcatacctcacctcagccttgaattcctgggctc

SEQ ID NO: 58908 - DNA, 1573 bp, Homo sapiens
ggaacatccatacctcacgacgccaaacggctaccttgtaaagacgaaaggaggaaatgcaggaaataactccacgtaaggttaatgctccgtaaacagagctgctactgctattatatattctatacaatcctgcgcccttaacggcaggaccctttcagtgcttcagtcctgtcttctctctcctgggttgacctccacagatcctctcagaagagcgttttccaggcgtgaatctccgcagagtggagataaaggctgaggccccaacgcacgcgcactcacgcgagtccgggcctatgacgtcattagcgcagcgccatcgccgcggaaggcccaggggcctgtcctgtatgcggcgtgtcttagggaggcccaggcggacgcctgcaagtcgggtgcgcggttcgggggcggctcggaaaccccagcggaaggcagcaaggggcgcgtggggccgtggagtcacgaagctgggcggcaggaggggcggcctggagctcccgcggggcacagcgcgtgcgtgagggcggccggcggggctgcccggcgcgggtgtcccggcgatgtgtggcgctgaggcggcggcgggagcagcggcgccgagctctgcttcggcttcggcttcggcttcgcggcggtgcaggcggcggaggcggaggcgcaggctcttctttaggacctggcgagcccaggtctaagcggcggccccgcgaggcccttgcacggcgccccgggtcgaggccctccccgcctcgccctaccccaggagcctgcctccccagctggggatgaggctaggaggcggccgcgtggggcccagcacaaagacctgtccccaggggccgccgcctccgccgctgctgctgccgccagcctagagccgcccgccgaagcagagccggcgccggggtcctcatccccaccggtcccgaggggcggctgctgcccgtcgccacgaggcccaggggcccgagtgccgagccctttgctccctcggccgcgcggggacagggctgctgagcagcctccgcctctcccggctgtgggggccccactgagtatgtcggaggagagcgacatggacaaagccatcaaggtaagggggaggtgccccctcttcccccgcgttgtcctgtggcgttcttctcggctctagcctcaaaaagcagggagattttgcagtgagaggttccatcgactaccgggtttcggcctcccccggattccgtggatcgcgctttacagccctggggccaagggttatgggtgtgggtgtaggtgtgtgtccgactcccgccagcttccctggtgagtgtgatttgtgctcagctggaacagaggtgagtggcctggagacactattaagtgtcaatgaatgggacgaagagagccctactactactactacacgtttcgatcactccccaaggccgccagcatttgcttccggatggtctacagaacttggagagttggaatttatccatccctcccgatttgtttgaaatcagccttctggaaatctgcagttggaaaaaggtggttcgccgtacaaaacctgtcctttggg

SEQ ID NO: 58909 - DNA, 615 bp, Homo sapiens
attggacattatattttggtggtttaaaagtgtatggtggagaggctctggaacaagacaaggctgcattcaaattccagctccaacacttactagctgtaagaacttaggaaagtcccctaaccttaccaggattcagtttccttgtctgcaatatcagactaataatatccatctcaaagttttttaaggattaaatgaaaaatacactgaaagcactgagcaaatctatctagaataaatactaaaaattttgtttagtttggagagcaattataattaagagtattgacttttaaaaatccttgctcttggccaggcatggtggctcacacctataatcccagcactttgggaggtccaggcaggtggatcaggagatcaggagttcaagatcaaccaggccaagatggtgaaaccctggctgaggcaggagaattgcttgaacccaggaggcaaaggttgcagtgagccgagattgcaccatcacactccagcctgggcaacaagagcgaaactctgtctcaaaaaaaaaaaaaaaaaaaaaattagctggatgcggtggcagttacctgtaatcccagctacttgggaggctgaggcaggagaatcact

SEQ ID NO: 58910 - DNA, 619 bp, Homo sapiens
tgcagaacaggaaagaagaaagggaaaatacaaaggaagacagggagagcttctgaccttaccaagtcccaactgtcctccagaatgctagcgtctagtggaaaggtcatagggacttcagtcccagctacccttgagcagccgatccttcctagtcaggttctgaatcctgaagcagtgaacaggtggctccacccctatcccagctgggctcctcctatactgaatcctgctctgtaccttgagggcaaggagagaggtagtgacaagcggaggagaaagccaagcagaaagaacaaaaacagaaagaccaggtaacagggaaacaaagtggtaagtggcattaggaattaaaaggagcaagaggcaggagtaataaaaagcagacagatacagaaggggcaggattgagaaaaaaagatgagtcatagtgaaaagataaatagagctgcaatagagaaatggaactaaaaaaaggggtgggcggagaaataaatgggatagaaaggaggtctccctaaaatttgcccttgtttagagacagaagcctgtgatggaaaagagagattgcatattcactcagttaataaagttttagtaatactagtgaaaagctgag

SEQ ID NO: 58911 - DNA, 2451 bp, Homo sapiens
gtttctctttgcctcatgcacgccccctcttatttcaaggtccagctcaaaagtcacctcctgtctacaacttcctctgatgctcctgagcagggatggctgaatctctgtctctttacaataagaaaatacggtctttttttttctttttgagactgagtctcgctctgtcacctaggctgaagtgcaatggcgaaatctcggctcaccccaacttccgcctcctgggttcatgcaattctcctgcctcagcctcttgagtagctgggattacaggcacgcaccaccacactcgcctgatttttagtagaaacggggtttcaccatgttggccaggctggtctcgaactcctgacctcaggtaatccacctgcctcggcctcccaaagtgctgggattacagacgtgagtcaacgcgcccagccggaataatattttacagcaattacactgcactgtttagatcattattcctatgccgcctcctcccccaacaaagtgcgtgccttcagcacacaacggtcttgtttctgcttattccgtagccccgcaggcaaagccagagtctggcacaagccagggaccgagtgactacctgcggaacagaatgattagaattgcgtctggggttcctggagggtgggccttggctgggcggatcccaggagcctggcgtctcccaggggaggcgctcacctcagatcgggcctaagagggccctgcttgccacactgaccgccaagcctggccaaaaagctcagggaagccgcggagccactgcccgcctgggtcagggtggtgacggagcctgactgagaataacggctgaacttgactaatagactgaccgagggttggagcgggtcccaaccaactgcctgacggcccaaaggcaggaagaaacgatggtaggccttgtcatcttcgaaggagaggaaggacagcaaacgaattgctatagcgtccccatgcgcacttggcgcttctcctcaagcggagcaggaacggaactgggcggacccgccggaagactcggcgagtgcgcgcgcgcaggagcccattttcccgcccgcaacgtggccccgcccttttacccaggccctacgcgagcttcgccgagtacgcgtgcgcagcagcttcccctccctcgccccgcccctcacgtggccccaccctctcaccctagacagatgggagcctcctggggtgtccacgtgagcgcgcgtgagtccgcccccccagtcacgtgaccgctgactcggggcgttctccactatcgcttacctacctccctctgcaggaacccggcgatatggctgccgctgtgccccgcgccgcatttctctccccgctgcttccccttctcctgggcttcctgctcctctccgctccgcatggcggcagcggcctgcacaccaagggcgcccttcccctggatacggtcactttctacaaggtaaccggggcgggggacgtcgcgcgcaggtgccgccggggcgcccggaagagcgcgcgcccgtggggagacgctggattccgggagctgacgggaggtggtctgtagcaacggtcccagagcttcccggcgtcctacaggcctagtggactctgagcggagaatgttatgaccaccgggcatgcacgcttcagggccccggcgcacccttgcttttgcagcatttatacttgcatccacccttgcaaagatgcagccgagggaactgggtgccccttcccttcacctgtggggagagggcggtgcctggcgagatccaaccctcgagtcccaagtgggagaaccggagggcggtgcgaggtcgacgccaccgggctcccggctgtggaagctgggaggggttggcggggggaaatgcaggcgcgttagcctgcgtgtccgcgcccctcttcccagggttggattgcagcctgctttgcagtgtgcaaacaatgatcagatatcatacatcttgaatagtgcaagcgtgaagaataagcttcagttcagccaccctgtaaagcaggggtccccaaccaccaggcccgtcggtggcctgttagaaaccgggccgcacagcaggaggtgagcggcaggcgagctagcactacagcctgagctccgcctcctgttacatcagctgcggcattacattctcataggagcacgacctttattgtgaactacgcatgtgagggatccaggttgtgtgcttcttatcagaatctaatgcctgatgatctgaggcgaaacaggttcatgtcgaaaccacccaaccccgtggaaaagttgtcttccatgaaaccagttcttggtgccaaaaaggttggggatagctgttgtaggaaacatcttggggttggcaacaaaatcagtaaaattgggtcaaggcatggaagaatttgccactacctccgcctttccccccttccatttttgcagaattagggatcctg

SEQ ID NO: 58912 - DNA, 1464 bp, Homo sapiens
tctactcatttttctgtaaaccataaagcagttttatgctctaaaaacagtctattaattcttttaaaaagtctaacaaaagcaaagattcatttctagagaagaaaaatgagaagtgttataaatgggaaaacagtacagtagctgtcaattctaaatatacaatgatgactgaacacaggccagttcacaatcctctaccactaccaggttcctctttgctcatcaaagttccctatcagcaaaggcacagacaacttaaaataatctatgaccctggtggctcagagtgtcccacagaacagaaataaactttcattttactatactaaatttttctgcaattaacacttaactaaaacttagtctcatgaatgcatgagttcaatgcacttaatgcacttaatattgatgagcaccaataatgctaggtaaaaagataagaagccttactctgtaggaaatcacaatttagagaggaaggccaaagacctaatattctggagaggcattggagaatcacagatatctaaaagcacataatcttggcctaaatacctaaacatctaataccagttttcttaaatccttagctgaactgacaggccatcatttgtccttataaactatctgacaaagataaaccagctcaataaacgacaccctctcttcctcataacttgatgctgatctcattctgagtcagttctaagtcattgctgactcagtggtcctgcaaggttccaggttcatagaacctatcttgaagccttctcaaagggtaaacatctttgatgagacccatctctgaaggtctgcccataaatggatcagaccagaggttaggactataagggtatttttcccttcccctctgtagttgacgaggttctgatataatgtacctacttgcccatgccctcttgtctggaaatggtttccagtgcccctgctgaaggggtaggactagatgaccatgtctagaccatgtaactgcagcccaccccaggttggacatttgatccaagctgggtaaatcaggtttcttcctggtactctctaactataaaactgaaagccagagtcagtaagttacaaggaacctcaggtggaaaatcttaaaaattttaagtctgagtttaccagtggcagctccagaatttctattttgaaggcactttcggggatgcaagttgattgatgtgcagcaaagaaaaagagttgtctcggccaggcgtggtggctcacggctgtaatcccagcactttgggaagctgaggcgggtggatcatgaggtcaggagatcgagaccatcctggctaacacggtgaaagcccatctctactaaaaatacaaaaaattagccgggcgtggtggcgggcgcctgtagtcccagctactcgggaggctgaggtaggagaatggcgtgaaccctggaggcggaggtttcagtaagccaagatt

SEQ ID NO: 58913 - DNA, 2364 bp, Homo sapiens
aaaaaaaggtgagcctgaaacagtccacaggggttcaaattctagctccaagaaatactaactgagtggccttagacaaattacacaacaacaataaagcctcagtttcctcatctgtttttttttttgttgttgttgttgttaaagggttcaggggcaggaaaaaacagtagccacctcttgagaatgggtgaagattatattagataacccatataaaaggccaaggccagtgactgtcataatgagtcatctataaaccttagctataggattgttgctaaaatcaaatgagatgtgagagtaaaaaaaaaaatcacacaaattatgaaataaaagccggactaactgtggccagaaacaaagttaaccaccgccccccgctcccaaaacgattcccaccttggagagaagcctccaatttagtaacatccacatgaggtctataaatacgatgtctacttttgtaaaaaccactgaccttgaagcttcctcaccattaagtgagatagaccaagaccataaaaccatctaagaggaaaggaaatgcaaaaaggaccaatccaattacacatttcggttattggaaaagggtttctcccaaactcaaaatctgtgatttttcactaccagggtaaatggatgagatgacatcaaggtcttcaagtctgcgggttgaggtaagagttgtggagagggatctgcttagcacagggaaggaaagctgcagagaaaaccacagagaagctgcagaaaggagaagccctccagtagctctgcatgcccctctgacacgagctatcacaatctcttcaccgctattttaggcccaagaccccctccccccgcctcccacgtgtgaccagagtagctgcttctccacccaacagctctggattgggagcctggaatctcgggcctgctcctgactcgatctgggtgaccttgcgtcagccccttccccactccggacctcagtttctcctatgcaccgaagcccacctagtcagacaaccctctaggcccaattcccgtaaataaaaaaaaatctctggtagggaatcttccctcaggcagggcgtcccaccctcgtgccggagccggcttccaccttcggggagatctccggtctccctaggagcggcggtaacgatgcagcctgcgggtagcgcaggtgtctgcagaaccacgcgtcccacggggcctgccaagcaggccagctctgccgaccagctgctgcccagaccgcgccactaccaccccaaggctgaggaaggttgggccggcgcctacgcgaggcccgcggctgcggcctagtggcccgcgcggcccgcccccctgcgcctgcccggcccgcgcgccggccctcagcacccctcctgggctttcgccccagcctcggcagccctcggcgcgtcgggctggcgagcgggctggtccaagacactcaccgtaaatgggccggaggcgcctgtcgttagggtcctgcacatggccccgcgtcgccatgatgacaagcgcagaaccacagtgcgcacgcgcggggcaggaccccgggaaagggctattaaagggccagcgtcgatctcgcttgtctatcacgatagtcgcggtgctgcgactgaacgcgcctgcgcggaaagggaagcatccacccttgccgattgccacctctttaaacgctgttccttcacttagcaggtgggatcaagctggcaagaggaggcagctgttgctgttaaagtcttccgagtcactgactgggaagttaggagaggaggggagaaagctctcaaagttagggttcggctgctcctgtttatcctatttattctccgtcctgaagaaccagctagacttggctgtgattaatcgcagaggaaccagaaactcccgggggagagagacccaggggaaagttggggaagcggggctgatcaacagcaaaaatctgccaaaaaagttcgagagagccgggcgctgtggctcagcctgtaatcccagcactttgggaggccgaggcgggcggatcacaaggtcaggagatcgagaccatcctggctaacacggtgaaaccccatctctactaaaaatacaaaaaaagttagcggggcgtagtggcgggcgcctgtagtcccagctactcatgaggctgaggcaggagaatggcgtgaacccaggaggcggagcttgcagtaagccgagatcgcgccactgcaccccagcctgggcgacagagcgagactccatctcaaaaaaaaaaaaaaaaaaagaaaaaagttcgagagccctccaccacctgttcctggaccaaactgagcgtcaggctgctgtttctcctggttcagtaaggagatgcagatg

SEQ ID NO: 58914 - DNA, 1661 bp, Homo sapiens
catctcaggctctcattcttccactgcaaaaaagcaaagtgctcaaaaaatatggtcacagatctgcagaagtcttgcacaagggcattatcatagcaataagaatgactaataagtattaacggcccatgagaaaagaacaaataccattaattatctcaatatattaagcatattagtaatgtttgtacagaattattcatgcaaatattattagcctgtgtcggggacagttgctaaactcagcaacaggctcacagctcagcttcgtgcctctggttccagatgtgcaggggccagggcttccagggacacgcccccgtgggcctccagggagccaatcgacgcgcagaaggcggggccctgggagcgacaacggtgttatccaatgggccgacagctggagccgcccctggccaatgggcgcgctcctccgcgatgggcggaagtggtgaggcagctctgagggccgttgttcagtgcggggtctgacagaggaggctccgtgtctgcagctagtgtgtcaactcagcgtttctcctctcgtccctggtgaggtgtagcggcggcacgcggctggagatcccctgtggcctccagtttaggaagggtccagcatcccaagggaggggtgtgtgggcgaggggtctctgggcccggggtcgcggctgtgaggagaggatgcccgcgcggcggcatctcaggcacctggaggaggccgcgctttctcctcagggaaccggcgccttggcagcccccggcgacgccgcccccttcgcggcctaggttggtctggtgagccgggaagcgggcgtcgttcgcagcgccgctgtgaccaccgcgtcccgggcggagctgggctcagtgccggcctgggcctagagtccgagcctcgagctgccggcgtggggggtcgcgagtggcctaatgcggcctcgaagccgaaggacccgagtccgagctcgcactccgacccgctggtgctgtggaaaactcaggtggccttccgctttcgtagcctctaaagtggggaccaagactttcacctcttaggattgtagtcgggattaaaagattttcccggtaagcgtttggcaactgctattatttgagaagccgcttacttcttcactccccatcaccgaccttcctggggacgggggcgattggaaactgccttggggtatctggacccggcaggggaagctccgccgcctcgggcagagggacggtcccctctgcggactagagagatctagctgacccccaacaggctccttataagcttgaagacttttctgtgcctcaactcttccgtgcattcgcccgtttccttgaccctttgaagtattgtcagtcctctgcctgaagaatctgaggcccagagaggttaaatctggcagaaccagccagaccttgacccccagagggggaccctgcaggctacccccagtctccttgcatctagaaaagcaagcacctgctacatctgagctctggccttagagttggccagagtgggctggaatagagcacacctgaaatcagtcggacagccttccttagttgccatttcatatcagagtgaatatctttttttttttttgagatggagtcaccttctgttgttcaggttggagtgcagtggcgagatctcagct

SEQ ID NO: 58915 - DNA, 877 bp, Homo sapiens
cactgtacccagcctagtaaaagtattttattttattatttttattttttaaaactcccttatccaataaaattattttaaattgaaaattttaaaataagaaaatcccaagggactggatattgaataaaatgctttaacatgcaggtttgggtgacagtttctgtatactagttttttatttgtttttttgcatgtcatctttaaagcagaaatgaaagagaaagttcatgtcttcctttgtggttttcaggaagagctaaagatggctgaatttctagatgaccaggaaactcgactgtgtgacaactggtaagacattaaatctaagaaatgttagtggaatgaggacagtcaagcttaatcactatcatttcctgatttaaaaactgttagtgaagactggcacagtcttgagttaagctttctattttggtgtttataacccacatgaattacaagaaagagcatctctttcctgatgaaatgaaaccggttgtaaagttaataatcagctggttcctgttggggttttcctaagaacttatcttggtatcttggtgctatacaagtgctgttactgtaagctgacaaaaaaagcaaagcagaactgtctgctatgtttattactttattttccttcactgggtacttctttcacaatgtgctatgtttaccttagcaaactgtggtagaaagagatgtggaataaggaaaatagtttaactcattggtggaatatttgagccaaataacatttttgtcatcatcgttgtctttttctttcttctcagcctaactttggcagaattagaatataattagagcaacagctggttacaatattctttacctgcttggaattaagatttcatct

SEQ ID NO: 58916 - DNA, 605 bp, Homo sapiens
ggattacaggtgtgagccaccacgcccagccggatgcttaactactcttaaaacccaggatctaagtgcttatttctattaagttctattgagtcctctttgccctgtggaaagatgctggggtcaggtcacctccccaaactttgaagagggagctccaatcaatagatttatttctgtgctgctgagttgattttaggtcatggctagttttattctgtaaaagtactactaactgctagtagttgactagtgccaactagaagagaaagatgaaagagtgactcatattctgccctgtttccaaggcaaatatgctgtatgtaatcaaggcacatagcagatagtacattttgtccacggcagtggttagattcaagtacctgagcgcgaactgtgcaagcaaagccccacatggctttatcaggagtgttgtgttcacggccacttctcatttcaaaggagaaggtgactgtatctccttccaccttaaaatttaaggaagggggggaaatgcactttaaaaacaagatacacaatttcaaaagagcaatgaatttcagaggtttactttcaaaaaggaccacagcaatatttcactcctt

SEQ ID NO: 58917 - DNA, 936 bp, Homo sapiens
gagcacatcatgctgtttcattatctacacagcacgtactactctctgaaattattttactcatgaagtcatttattctttgcccttctaccttaacacgtcccaatgaatgccaactccctgagaacagggatccacctgccttgtttgccataacatccccagcacttaggaggcattcaatgaatactcgattgcttgctgaataaacagatcagggccctcccccaaatccaactccgcttctctatggcaactcccacatttctatttacagacccatccttgctactacgatctagttccacttttctaactgcccctcaccctccccaccgacatttctacttgaacagcctcctgtcacctaaaattcaacacatccacctcttacttcattgtcttaccccaactctcctactagattaacttttagcaagcatagctctatttacattgcacaattctaaatatactccttcaaaagcatccaagataaaaatcaatcactttaagcttggcattcaaaagcattacccaatctggccctatgagaaaatcaatagataccttaaaaacaaacaaaacactatattattgtatttgagtactttgaaaatactgcaaagaaaaactgataaaacacctgtgtgatacaagtagggctgaagtttgctgcaaaatggtaaatctgctggaaatccctactttagcaaaggcgctcttcagggtaagaagctgctgatttaggaagacaggaagagctgggaggagtgagaagcagcccaggcttccttcctggcaaccactctggtccaagtccacatcatctcaagagagattattagaccagcctcccaacctgtcttcccacttccacaggcaccccaatggtttactctctgcatagccagtgatcatttaaaaatgtaaata

SEQ ID NO: 58918 - DNA, 857 bp, Homo sapiens
ggtgaaagcatctcatgcactgtcaaggctgtgaaattcaatactgaaagcaaagaaggacttctgaatgttaagacttctatcaaatatacttggcctcttcttcattcacccaacccaggtggcagtagtcacaaggtcaccaaatgatacattcgattttccttacctggcacaagccaaagccaccagggcagcagcagcattttctttttgcttatgtgggatgtgtcggcctgtgtcagaagtctcctctagccaagagcacagcaaagtttcaattccattgagacagtcagcaggctccttggtcaagctcaaaggctggcagtcacgaaggcagttcaatagcacctcagcagttatgttacagagagaggggtctgttctactctgggactgaataagggggaagaccagcaggagccccatcctcgatgtgaagggcgcttgctcaggttgctgcaacaagccctggcgtttgagcagggccaaagtttcctcatcacctgaactttccctttcatgctgttcttctaaggccagctggcgctgggcattccacagtcctcgcaaggcattcaggcggtattccagcagccgggcataggcattgctctgattcccacaaacagagcgcaaacgttctgctaattccgacgggttcttggtctcaaaggttaaaatctaaggaaaaagacgatggagaagtgggtaaatattactttcaccaaagtcatctaaggaagaaaatatgtttaatgatatcccaaaatagtcaacgccaaaaattattttaattacaatcaaatggaaaacgtatactgtaaagccagctctttgctgatggaattgtt

SEQ ID NO: 58919 - DNA, 1604 bp, Homo sapiens
gatgagatctgctgttgcacctgccacggctctgaacccgggatgcttggcgacccccggggcacacaaaaaggccctgcggcctaacgcgccagtgacccttccccgagagtgcatggagggccgctggagcatccctctcgctgtccacagcgcccgcttccctgacaaaggccccgtgtcaatccatccgagacacaacacagagaagttgctggattgcccatcgcggacccgcagctgccactaccctctcccggaaaaaaaccaaaccaaaccaaacaaaaaaaacagaactagggaagaaaaggatgggagggtacacagcgtgaaaatcaaaatgttcccaaagctaagcaacctgggtgtgccctggaagtgggtcctgggggcccgtgggggaggggagggagggcccgggtggtggcggtggctcctctggggcatgaaggccgagccaggcgctagcctaataaaatgccgggtgtcggaacgctcaaaagaaaaccacaaatgaaatcccctgcgggcgccaggccccgaggagggagggagggagagcggggcgggcggtccgcagacctgcggccgcggccccacctgcccgccccgcgcccacacacacctgccccggcagccgccgggaggcgaggccgcggctgaggcgaggagggggcccgacccgggggtgccgggcgagtgggtcagtccgatggcgggggccgggggccgcctcgctcacctccaggtcggtgtccgcggcctctggggccccgaggatctcgctgggcagctcggccaggtcggtgacccggatcagcccgtcgtgcaggaagatggtctcttccttcaccgagagccactgcgccgagtcagcggccgccgccgccgccgccgccgcggccgccgacgagcccatggccccggctgaaggcttggcgctgaggagcagacgcccggccgggggaaacggagcaggagccgccgcgatcaccagtccatggcagcggccgccgcgcccgccagcggcgccccacttgctgcctcgcccgtgcaactccgccctaggcggtccgagtcgccatacccccgaccccggcccgggagaccccggccctgccgccgccgccgccgccgccgccgccgccgccctcaggagcaggatccgcctctgccgctcggcaaccaactgtcagtgagacgccatgttgggggcggggctcccggcatgcctcgcggagcggacaatacaggccccgcccgccgctccgcccaccgctccgcggacgaggccacccgggtggcctggacgtccgcctagcccttcgctgccgcctgccctcggcctgacctccgccggccccttctccccctggccattcagggtagccctggctttgcagcgcgccagggaagaggacgccgcttcccccgtcctgtccctactcaggtgtgcaccccttgctcgggcccgcgcccccaccctgggcagagcatagagatcactccttgttttcacgtttaaatgagatgcaagcaaaaggctggcgcagaataggcgctgcacacttgttcataagcacttggtagaatcacatagtaga

SEQ ID NO: 58920 - DNA, 1664 bp, Homo sapiens
ggcagatcgggaatacctgccaattcctctgacaaggacagggttgcggctgcaatggggcttccccttcttgggctttttagctttgaggttaccctttttcaccttgccaccagcatcaaccttcttggcttcgggtttcttctctttagtatctggcttctcaactttttcacccgccatctaaaaatatttttttgtagataaaaaaaggcatttcaccagtcatctctctaacaagacaataatgaacctgtacatgaatgggctgggctccccagactacaatccctcccccggtaagatacaggccttcctctcaaactctacccattctactccaaccttcactatgactcatttggggtttgtctccccaatacactataaactttttttttgagaatttgaaactacctcacacctattaggttttttgccaaatactgagcggtcagaagtccgtacaaccattattttttattactgttttgcgaattagaaaacttagatgcagaatgtgtccacaggttagaagcaccaagaccagaacttgaaatcccttactttcagtacctttcgtcttaacccttaagaccagtgtctcttttcaagaaactcgatttaggaattgcggacacaaacggaatcagcccaaattgagccagagaaaaagatcgcaaagaccaagaggcgacttccggtcggggacgctgggagacgcgaaaccttttggcttcagtgcggaaccccaacgtggctgcgacaggctcagtgtcatcctctggaacccaggaccaggaacacagtgcacgcgccgtctccccgcttcctctaacacccaccagtctgctacgggtccccgaaagggcctcgttcccccagcccaagagagtggcgaagaaccggagggagccactacggcattctacctcaccctctttgtgccctgccgcaaacccaaacaacaaaaatgaagcgtctggaaggcctctcagttagccttggacatgtccgacccctgtaggtgtcgactggatgccctccaggttcggatggcgaaggattgggagtcctgaactcaagtcttgcagacaggcccgcgattcttaccttgcaagatgggaaagagaattaaggtcccggcttccggtctataagcaatcatgggaagtgcgagtctcacttccttccggatctggggcatcatggggaatgtagtatttccccgttaagaaaaaagtagtaaatcctaggccgggtgcggtggctcacgcctgtaatcccagccctttgggaggccgaggcaggaggatcctctgaggttggcagttcgagaccagcctggccaacatggtgaaatcccgtctctactaaaaatacaaaaggtagccgggcgtgggtggtgcgtgtctgtaatgacagccagtcgaggcgcggaggcaggagaatcacttgaatctggaggtggagattgcagtgagccaagatcgcgacactgcgctctaggcaacagagcaagattctcaaaaaagaaaaaaaaaaaaaaaagggccggacacggtggctcacgcctgtaatcccagcactccaaagatcgtgccactgcgtgccaccgcactccagcctgggaaatagagccagactcagtctcaaaacaataa

SEQ ID NO: 58921 - DNA, 2227 bp, Homo sapiens
ttcagactcccaagcagctgggactacaggcgccccccaccacgccaggctaattcttgaatttttagtggagacggggtttcaccatgttggccaggatggtctcgatctcttgacctcgtgatccgcccacctcggcctcccaaagtgctgggattacaggcgtgagccaccgcgcccagcctattattatttttttaggcagtgtcttgccctgtcgctcagggtgtagtgcagtggcgtgatcacgactcactgcagccccgacttctcgggcttaagttatcttcccgccgcagcctccacgcccggttagttttttgcattttttgtagagatgaggtcttgcttttttgcccaggctggcctcgaactccttggcttaagcgaacctcttgccgcagcctcccaaagtgttgggattacgggcgtgaaccaccgcgcccagcctactatctttatcttacagaaagaaaagaatggaggaaaccgaggctcggagacagtaggtaatttccccaaggttccacagctaatgagtggagcggcgatttgtggaacgaaatgaatgaaatcgatgtggcagcgggcccggacgggtcggtggcgtagacgcggagcgcgcagctcacacctggcggccgcggtttccaggaggaagcaaggatgctttggacactgtgcgtggcgcctccgcggagcccccgcgctgccattcccggccgtcgctcggtcctccgctgacgggaagcaggaagtggcggcgggcgtcgcgagcggtgacatcacgggggcgacggcggcgaagggcgggggcggaggaggagcgagccgggccggggggcagctgcacagtctccgggatccccaggcctggaggggggtctgtgcgcggccggctggctctgccccgcgtccggtcccgagcgggcctccctcgggccagcccgatgtgaccgagcccagcggagcctgagcaaggagcgggtccgtcgcggagccggagggcgggaggaacatgacatcgcggaggtgaggagccccgaggggcccggcgcgggcctcggcccggccaccgccgcgttcggttagccccgtccggaagggggcgccccggccgggcttcgggctcccgccccgggtcggggttgggggccggttccctcctcgtcccctcgccctccaggggccgggggccggccccaccgcgcccccacccctcgggtccccattcatttcctgcctccccgagttccggctgcggcagccccggggatgcccgtcaggcccggggcaggtagagccgccgagggaaccacgggtgccagcggccaggctcagcgccgcattcctgacccattgcctcatgagaattgcctcatggtgattccgaaataaccctgctcacttggggaggctccttgggacacgagaggggagttgcgcggggccgggcccccagtggtctagtcgttctggctcactgtgccactttcgtgcatttggggacttcacgcaggacccctgacccttttatatgcctctttgtgtcttcttttcctcctacccctcacgtgccagaaatggaaaaactgactgtatctgcagccactagaagtatttccttcctctgcgatcttcgctttgggagatggaaaggaagggagccgcatctcgttatttaatccttcactgcaaccttaacagtcaggtcactttactggtacccgttttatggatgaggaaaccgaggcccagaagcaacatgctagtaaatgacaagatttgaaacttaggaggattagtgagttaatgagatcctttgaaaggtcagggtaatactactactaatagctaacatttgcttagttctgaccacagccctatcagatggctactattatccccattgtaaagatgagtaaaccgagtttcagaggttaagtaaattgcctaacctcacagctagtaggtggtggagacagaatccctacttttaatcactatgttgcttctattattttgtaactattgctaaccatttgtaagccttaattttgttgtcaaacagtagtgtgacctgttgttttcagatagtgatcctgctattttgtatagtcactctatataccactcacacttaagacccattgtctattcttttccatgattgttcaattatggtcactgtctcagacatttaaaaaacgattcaagctattgaggc

SEQ ID NO: 58922 - DNA, 758 bp, Homo sapiens
tatcccaaaaatatctgccaaaaactatagacacttctggttgcagtgacttattccttccttcattcagcaaatactgattgaacaccgactgtatgtctggatctattctaggttttgggggtggagcagtgaacaaatcagtctttatctttatagagtgtacagtcaagtgggagagacaggcagtaaacaaagaaacagttcaatattcaatctgtgagatggtgataagtgctacagagaaaacaaactagtgtaagataaaaagggtgttttgataggcctttactatttaggtctctttgataaggtggcatttgaacaaagctctgaaggaaataatggagccaaccatgcatataacctcagggagaacattctaggtagagggaacagcaagtgcaaaggccctgaagtgggggtttgtttaccttgttgcacaatctgcacacaggccagtacaattggaatggatgggaaatgtaaaagagagaagttgaaaaggccaggtgcagtggctcatgcctacaatcccagcattttgggaggctgaagtgggaggaatttgagatcagcctgggcaacagaaccagacctcgggctaatttttgtatttttagtagagacagggtttcaccatattggccaggctgatctcaaactcctgacctcaggtgatcctcctgcctcagcctcccaaagtgctaggattacaggtgtgagccatggcccccagccgtatctttgtcttaaaa

SEQ ID NO: 58923 - DNA, 1143 bp, Homo sapiens
ggcacagacaggcaaagtagcttggcgaaacagaaaggaacttagaggcaggccctgattagctcagagactagaaggccttgtgcgtcatcctgaacagcttggacttgatcttgaaggtggagggagaaattgaagggtaattaaacaggaactgtaggaaattcaccttgcatagtgattgctttggccacgtgtgccctgccaccgcccccccacctcagtgaagtgtcatgcgaagttgggttcgtaaatgaaggcccgaatgctttcctgacaagtttgttttaaatcaagctgctaattagtcccagtccccctcccccggtatgtatttttttgttgatgtcgtttcacttcatttagttgaagtgattgattcagttcagtgtttgaacttctttttgaacctcaccttaataacctgtctaaacatcaaggttaaaccttcttgctaacacagcagtattgcttggtaagactggctcacagtccaaggaaatgcttgcccagagagggcaaactgccttaactccttaacctgagctcattaaaaaaaattcaaatgactgattccttgtcacagttctacctacattgtttttatttttgtccaggtttcagctagttaaatgcttttgtgatgagcttatgtccaggctgaaggttgcattttgaaactgagcgtcaaataccaatttaaagtccagacctttacacttgtgaaattcagataaatgaaatggaaataaaacagggctgctgtgttgtgaaatatgactgtgtttttccttgtaggactctttgagggtagccattttggcattttatatataaattttcttttcttagcctaccttttactttcttgatttgcctatttgtgatttcccattaaacactaggctttttgtaaaccaattatcccttgaaattgactttttttttttttgagacaggatcttgttttgccacacaggctggagtgccgtggctccatcatatgataaacagaaagagagagagagagagagagagagagagagagagagaccctgtcttatttaaaacaaaaaaagaagaagaaaaaaagaatatagatcacagctgttatttgtatatgctacgccaatccttgttggg

SEQ ID NO: 58924 - DNA, 605 bp, Homo sapiens
gttaaatgcagtgtttcttaaactttcttaggggttggagagacctggcacatagctgtcccgattttgccccctgcatagtggttaataggcacatcatttctgccactaactatcccagtgacttcagataagtggcttcaccctctctcagcctcagccttctggagtgcatcacgggatgataacagtgtctgcctccggagttgctgtgaggactgagtgagtaactatgcatagagaattcagctttgtacccggtacaatttctatgctcaataagggcattatttcctaaccctgaaccctgagcctggtgaaaagagattgcataacatatattcctgagtcacagtggtgcaattttccagtgtttgcagatttagggcactcccttggggtataattagagtcagattttggaaaaggttgatccactcagtcatctgttttcttcttcttaatttaaatacagggcatactgcaaggtgctctccccaggttgtgctgaataattaatgccagctctgataatcctgcctgacttaaaaatggttcattattaccgataacaaccatgacaatttactgagagctcactgcct

SEQ ID NO: 58925 - DNA, 1553 bp, Homo sapiens
aatgcttcagagccttcatgccccgacagcatttccatcatcccactcctttagggagttataatttattaatagagacatctggcgagtatttattatgtgactgttgtgtgcatgcaatgaagaatcaaggtgggaggcaggaaagatatggaaggctgtcctttgccttccattttgccctgtttgtatttcagggggaaacatctatgagggcttctacctggagtctgggctaatttccttttgtctcggggtccaccaatgctggccttggtgggtggcttcattctgacccctcatggtgcaccagagcaggtgccttcaggtagcagatgaagcacattgagaaggccggggccggtttctcaagtcctggaccatcctctctccagtcatgattcttggcaattccctttctccttgtgagtctcaggcatctgggaaaatgagcaggttaccacagtggtctttagactttttcttaccagtgaaagtctttctttgaataatactttattcagaagctaaatctttgaggcagataagagtggagctggataaagacctttagtggctgaaagcattaaaaatatcatggtaaacattatacaactggaatttaacataatgctaaactgtaaaataagggtaggaagtctaacaagtttcactcttttttttctttttttttgccatggtgaataatgtatcaactttcgctgtgtaacaaaccatcttaaaactcagtgacttagaacagttacttgttctcagggatctgggcttggtgagtggctctgtggactttggctaggctcatttatgcatcaaagggttggctgatctaagatgccagtggctggaatgatacattcttttccacatgcctcaccttccaacaggatatcctgggttttctcatggtgatgacagggtataagagtaaacagaaacacacaaggcctttggaggcattgcctctggactagtgcaacatcactcccctgcattttatttcccacagcaagtcctaagtcttggctagatttaaggagtaggaaaatagactctagagccagacgtggtggctcatgcccagaatcccagcactttgggaggccgagataggcagagagcctgaggtcaggaattcgagaccagcctggccaacatggtgaaatcctgtctctactgaaaatacaaaacactatctgggtgtggtggtgcatgcctgtagtcccagctactcaggaggctgacacaggagaattgcttgaacccaggaggtggaggttgcggtgagccaagactgtgccactgcactccagcctgggcaaccgagtgagacaccatctcaaaaaaaaagaaaagaaaagaagatagaccctgactctttggtgatcaatttcaaattcacatggcatagggcatggatacagagaagagtgaaatattagggacatccttataataaaccatatttcatgcttttactaaaatattaaatattaattttttccccaatgtttgtcgctttttttctttctaaa

SEQ ID NO: 58926 - DNA, 2039 bp, Homo sapiens
ttttgttaattatgatgtattaatatcaattcatcaattgtaacaaatgtatcacagtactgttaataatagaggaacttattggcaggagagagagcttatggaactctctgcacattcagctcaatatttctgtaagcctaaaactgctgtgagaaataaaatccaacctgggcaacatagcaagaccttgtctctacaaaaaataaaaaatgagctgggtgcagtaacgcatgcctgtagtcccaggtattcaggaggctggggcaggaggatcccttgaacccaggaagttgaggttgcacgagtcatgatcatgcccctgcactccagcctggataacaaagcaagatcctgtctccaaaaaataataaaataaaataaaaatctactaattgaaagggaaaaaagcatagtataataccattcttaacaaaaagaaaagagacctgtgtttgtgtgtgtgttaacatttgaaaaaaatctggaaagctctatatcaaaacgtttatagaggcaattttgtagtgttagaatcatagatgatctttccacttcctggtttttctgactttttttctttttgcagtgggcatgtattgctggaaaataccacagacaactgtgaaaggatttcatcaacaacaaaaaaaagataaagaaggaaacacaaaatctgttaaataagatttatgttggctggaggttaaaatgcatttccagagcagagttcagagaaaggctgggctgcttgttgctggctaaaggacaaagggtaagtttcaggaagcagaagagtgagcagatgaaattcagcactgggatcaggggagtgtctgatttgcaaaaggaaagtgcaaagacagctcctcccttctgaggaaacgaaaccaacagcagtccaagctcagtcagcagaagagataaaagcaaacaggtctgggaggcagttctgttgccactctctctcctgtcaatgatggatctcagaaataccccagccaaatctctggacaagttcattgaagactatctcttgccagacacgtgtttccgcatgcaaatcaaccatgccattgacatcatctgtgggttcctgaaggaaaggtgcttccgaggtagctcctaccctgtgtgtgtgtccaaggtggtaaaggtgagtccaggcctgcctggccaggggaggggtggctgaatgtgcaagagttgagattgagaatgagagagagagagagagagaagcaaaaacctagaacccagggtgcaaatgtgagtacagagagctgagatcttctgggatggtggtttcttatttatccacacagcatgttaaaatagattctggggtgaaatcctacatccctattattaacaagtgaccctcccccctacttcccgctgaagtttatgaaccactgtcctgggcgatgcccatttcagaaatagggaactgaatcccagctctggtaaacagtttgctaattcgtggccaggctaggggctcaccatttctgcagtgaagaatcatatgttttgaaagcaaatagcacctgctggctgcaagaccttgagcaagtcacttaactactctgtgttccaatttcctcagccataatccccaatactgttgcagtcttgccagtgcaccttaatgtagcagcttctcactgaattagtacccaaggttctttgtcctgcatccaagaaaattaaggaacatggacacaaacgtgagcttggagcaaaagttcagtaagcaaaagaagaaagctgtctccactgtggagagggaagtctgagtggattgccagattgcagctgaatgcaaaaaacttttataagaaaccactctcctccctgtaactgtttgagaaactttttatcagtaaagctgtgcaacttcccttaccttatgcagctgtgggtatatctctaggcaagcataaagcgctgcttctcttgtatgtataactgtggatttgttttaggtaagtcccactccctgcgccagtttcaggcaggccgctcctccagggccc

SEQ ID NO: 58927 - DNA, 779 bp, Homo sapiens
ttgcaatggttgcttcatgggagacttaaacattttcagtggtgatatttggctatagcattataggtgatctttatacttttctaaattttctgtggccacgggaaataataaagacacttttcttgcacagaaaaaaaaaacttttgggaagtatttctcacagctaagatctgatagtttacgcaaagttggcaggcacaggctacagaaagctctggggtgctgttgtttggagctgctggttcaaggacaaattcacaagatttggaaacagaggaccaagtgtgtaaggacgagggaaactatggtataacattgaagcacctgagctggaaatttctgagccctcagagataaatttcctcagctcctccctgccgagaaaacaaaactaaaaagagttaatgtttagccaacagaaatgagagtgaagttcacagaagaaattagggcacagctggaagtgttcaaaatgaggaaacgttcaatgtcaagtttgagatccagggttgatgggtgaactctgcacgctcagcttcatgttaggtctcccagctcaacgagggggtgaattttggtgtactgctgtctttgaggccctgcgtgaactctcccacaccctcccccttttcctcatacaaatcccctccttgcacacccctcacgcctgtctgtgaggtgccagggcccctctcccagccaaccgcaggccagtattgcccctccccaaacttcccttcaggcagatcaaacccagggctctggagtcacactgc

SEQ ID NO: 58928 - DNA, 1477 bp, Homo sapiens
gtgtgtttgaagtttttaaagatggaatttttattggaactgcattacacgtataaattatttaggaagagttggcttctgaagagggcagctctgtgggcttgggctgggtttgaatccagccagacaactttccagctgtgttaccttggacagttacctagttcctctgtaccttgacttcctcatctgtcaaatgggtgatgataatagcacctacaccatggtcgttgggaggagtcagtgagagtctccaagtgtgctttattatcgttggtggtggtagtggtgtttagaacgcatccctcagtcagacagcgaggtaggacttctccgtttattaaatcctgaccttttttttccatgtaaaacctgcacgtttctgaaatgctcagagtacgttactcagtatgtacccatatgttctgtgggtatactttgttaggttgtgattagttcgttggagctggtggttgcagggacggctggaagcaaggagatgaaggagaggaagtcgtagctgggaaggggaccaggaagtgggtgtcaggtccaagagctgctagaaagaaacgaaactgaaagcagggaatttcccaagtttggggaagacaggaactgcagcgcccctccccgtttcacgccacgcgcgggaccgaggacctaggacctggccagctgggcgtggttcggagagccgggcgggaaaacgaaaccagaaatccgaaggccgcgccagagccctgcttccccttgcacctgcgccgggcggccatggacttgtacagcaccccggccgctgcgctggacaggttcgtggccagaaggctgcagccgcggaaggagttcgtagagaaggcgcggcgcgctctgggcgccctggccgctgccctgagggagcgcgggggccgcctcggtgctgctgccccgcgggtgctgaaaactgtcaaggtgaggtcccacctcggggtctttatgtgtccaaaggggagtcctgggaggacgcttaagcctcacataggcttacggtgggggtggctttatccgcttgtgcacctcattcatttctttaacaaatacttccaatgtgccagccccgtgctaactcccccgaacatacgagccaggtaggtactcttaagcccgcttgacagatagagaaaatgaggcacagagaggtacagtgacgtgtccgatcctgtaagaggcccagccaggattcaaatccaagtagcctgattcctgcatctctactctcagaggctgcttcttatccattcattcactcattcactcattctcccagtcattcaaacagactgtgggcctcacactatgccagaccttaaggttacagaagtaataacactccgcgtaacagccagagtagcccaatttattgagacattatcaaataacaatgaaaattatctcattaaatgagtattacctcatttcatccccacgttcagtgagg

SEQ ID NO: 58929 - DNA, 2104 bp, Homo sapiens
gccttctctgtgaattattattgctgggccaaggcagctggctgggagtcctctgcgagttttgttttcaaagctctgggcacaggagttgcatgtctgtctcctttctggctcacacacttggggtgtgttttcttgcccttgcgaggctggacaagtgcctcatacggtccctcggctgtccacaagtgtgctgagaaactggacacacagaggttcccacccgctgaccacacgggggcctgtgtttacccagaagcagaccaaaacctgagtccagctaggtccctgctttgctgtgtgtccctgagcaagtcagttccctctctgggtctctttttcctctctgccgctttccctgaatgtgagttccctggccactgagaacagggggaaagggacagagcctcaaaagatgacctgtgcgcccctgcttctaagcactttgcaggtattatttaatcatcaagctaatcctacgagagagctgccattttcccccagcttacagatgggggaattgaggcgcgaagagggcaggcgatgtgctcaaggacagacatctagcaggtatgaagccctcacaatggggttctagaggctgtttagttaacctcaagttttggggagcccctgaagggctggtcaccacgctgccggggacagggaaagcctctgagcttgagtcagttttggtttccctgctggggtgcaggagtcagtaaaccttgctgcaaggggcggggaagagcatttgagcttaagttagttttggtttccctgccccggatgcaggagttggtaaactcactgcaaggggcagggcagagcctctgagcttaagttagttttgtttccctgtcccggatacaagagttggtaagctcgctgcagtgggtggagagaggcctctagacttcagtttcagtttcctggctctgggcagcagcaagaattcctctgcctcccatcctaccattcactgtcttgccggcagccagctgagagcaatgggaaatggggagtcccagctgtcctcggtgcctgctcagaagctgggttggtttatccaggaatacctgaagccctacgaagaatgtcagacactgatcgacgagatggtgaacaccatctgtgacgtcctgcaggaacccgaacagttccccctggtgcagggagtggccatagtgagtccagggctgaggttgggtctctgggaggcaggagattccacggcggcagcaaggccgagctactgggtgctgggtgcctattatgtgcgaggcccacacttgggtgggatgtggtgtaggagtctcaggctctggagcaggcgcttgctccagagctgtgtgacactgggcaggctacttaacctctctgtgcctcagtctctgactctgtaaaatggggagaggcataatacccacttcagagtatcgtaaggcttgagcacatcatgttcttagcaaaagactggcagtgctcagtgaattcactgtgattactcactgcgattttcttctatcctctccacagtacagaggagtaaacttagggaggctagagaactttgttcaaactacccaggttgccttgtggtttctccgcagcaagaaggagtggcttttatcagttagaaatatttggttttgtggacacaaatctcaggactgaggctgaaaattctggacctctggggaggaagggggactggggagatgccaggaccctagaattgggggcgtgggggtcctgatggcccaatactatcctcttagcctcctgagctgctgacgtcccttctctgctgctgccacactttttggtctctaccccttgcacacatccgctagtgcctcaataaagaaatctagacacgtggtgtccccagccctggcccaggccagcaagctaaggcaagtttggttaatagctattgtcagaactgggattttaagcctgggtaattggcttgagggcatgcatgtttaaccactacactatcctgcctctcaatttttttttcctcatggaagtaaaacagaaaaagtgcccagatcaaagtgtccagcttgataggtagccacaaacaatgtaactg

SEQ ID NO: 58930 - DNA, 1138 bp, Homo sapiens
gactcctaaacatcccactccctgcctcacgctctgcttggggtcagaaggccccttggggtctcgggagggcctggccgaggatttggggcgccccgagactcgcgtgtcagcgccggtggcgctcagggccgagatctgtctcctccccttcctcctcctccgccccctcccctctccctcccggagcacggccgaggcctcctcccacccgcgagatcccggcggccgccagccggctcctgcgtccgtccgtcggccgggcagtctgtccacgcgcggaaagctcggcgcggcggccgaggggcctgggagggaacgggcgcggaggcgggaccgcggctccctcccactccggggggagcccaggaggcggcggtgctggagcgcgagccggagccggagccggagacgaagagaggcggtgagaacgcgggtgcttagggaccccacccccggctcccgctgggggcccgcgagcggctcggggacgtctgggctggggaagcggggctgttacccccagggcgggaggcagagacgatccagctcctggcttcgccccctccgcgacgcgacccccgaggggccctgggccgcgcctgcagcgccgcgcatccccgtgcttcccggcgcaccccagcgcacccggcatccccccggcagggcgagggccccgggggaagggaaggctccgggagccaaggagggcgccccccaggcggagagtctcggaaaaccgcgcccccggcccctgccttccctccaggcctgccccaagggaaagcgggcggggcgaccccgtacgccccccttgctgtcccccttcggttccccattgttctcagccgaatgctctcctgggaaggggggagggggtgctgcgctctcctcttaaagggccctctcccctcttgtctcctggcaggtcgcgagcacgagtggggtggggcgtgcccacgggcccccgcccccctcgtccccctcgtcccccagcccagctccggagccgcagtccaggcgcgccgcccgagggtccacgccgcacccctcccccgtgcgttctgcggccacccaggccttccaggacaccgtggagagggaacaagggggcagggacgcccccttcggcaggagc

SEQ ID NO: 58931 - DNA, 631 bp, Homo sapiens
tatctttttcacgggtcatgaaatattcttttttttcccccaaccatttaaaaatgtaaaagccattcttacttcctgagctgcacgatagcagatggtgggtggatttggcctgtgtgctgcaggttcactgacccctgccccacatgttctgaacctgagcatggggtaagaccgtgctggtgccacaggacacccagcatggcttatccaccccttgtggtgtgtaccaaggtacacgtgcgtgtgcgtacacacacacagcaccagtctgctcgcacaatgccgacacacacatgccctgtgtatgtgcctcccgtgcagtgcagccagcggaagaaagccccggtgtcaggctggggccacaggggagaagccaggctctggccccacaggggctgcggtttgttcagccgtgccccctcacctttcccctgctgggctgttttcactgctccctgcagggggtgaggttccctttgaagccctccaggtccagagcccagagtctggactggaaactggagcccctccacggggaggcctaatgctgtgaccctgagctggatgatgttagatcaatcacggtggtgtcccaggcagagggttggagggagagtcagagctgggc

SEQ ID NO: 58932 - DNA, 1055 bp, Homo sapiens
accacccagatgggaggagcttttcccatcaccggggaaaacacctccagaattagacaccaactggggacagtgaggcccagagagggtgagtgacttccccaaggtcacacagcctaccagtcctaagctagagcccaggccccccagacaggccttagggatagaaaacaaggtgacatttaatgccagggctgagagaaccccttcccccttcccccttctcccttgagagcgctcttggggcttgttgtcagggtctagcccaaggcagggacagcctgcactaccctggaggcctccagggctcagctcctggttacaggaccctttgggaccctctctccagcctcctcactggagactagggctgggcctgatgccaggggcaagaaagactatgtgtaggggcagggagcggcccatctctggtagcagcaggtccagctaatccatatgtgggtgctccccaaccaccagtcacgctgtctgtatttctactattgcagacccatggtctctggctgcttggctaactccagaagcctgttttgaaactaaattcatcgctcgtatttggtagtcattggtggcttctcagtaccaggtcctgggctgggtcttggggactcagagagaagggcaaaatccatttcagagtctaatctatccatttcagatcagtttcagagtctagtgaaggtgaaggcaaatgcatatcatggaaatagcctttgaaccctctgactcataaggacaacagatacagacctaaaacccagcttggccccttgctggctgtgtgaccatgggcaaattccttaacgtctctgagtttatttcctcctctgtaaaatggggataagaatagtccctagctgggagggttgtcatgaggacataatgagatacataaatgagatatgtagataaaagcttggaggatactactttgcacgtagtaagcactcatgctcgaggaagaaaaagatttaaatgcctcactaggcagatgcacggtgccttcagccatgggatgtgcatggtgtatgcct

SEQ ID NO: 58933 - DNA, 1660 bp, Homo sapiens
gctcgttctatctctgactccagctctcttggtatctgcctcagtttcccatgttggccttggcctgtctctgacagtctctttgatcatgtatgtctctctctgtctctctccatcctgctgtcaccctgtctctgccccaggcatgaagcagtcactggcagctgtggctgtggccgcccccacacccggtctcaggggcccagcttgtgcagtcctccagctgacactgaccaaagcccctttctccagttcagctggaagaagcctggaatttttctgccaaacatttttaagcaactagggaggagagagaaggggaagacaacaaaggcagagacacaaaaacaggccgaggcagaggcacggagcccatgtttgtcacaggcccctaactgcctgggggacgcagaccctgtggccagcacagcagggtgccctgaaggccagagtggggtgtggtctgctctgggccaccagcctgaggcccagcctctttcccaggctgaagaaactccagccccttcttagacccattgttctggctgaaaatctaggccatggccactgcggaggagaaggagcatttccaccactgctcccttagaaatcttgagatcgaagtccaggcaggtcaccaaggaaccagctgcccaccccctcggcctggtccatggccagcctgggccggagaggcggacggatgggcaggcgggcagcggcgggcgctgcggggtgcagggcccagcggggaggacagcagctgccctaattactcctgctctccaggttccaatcttgtttcaaaaggactccagggacacagcctttaataactaccagtaaacaggcaggaaaatcgatacctggtaaatagagccctggagagagggaggcctgggctagctggccctgacgggctcccagagtcctttgctgcagagctggccaacgctgatgttgagaatcctcctcctggcctgagggtcctccccagggacccctcgaagcttggcctccaccctgggggctgcttgctctccaatctccactccctctccatcaagcccagattttcctctttcccactcctccaagtgccaagtaggttgcccgtctcgcttgcagatgtcttctttgcaccaggctttgtgcctggtgctccaaacatagttgcatatctgacctagtagtctttgtcctcccaaaagtgatctaccaatgaggatgactaagaacaaaaacaaataatgacagtgtgaggacagacatgcaataaaagactgctgcgtttgccaactatagcaacagaacagagaagcccatgttggaggagatgagcacatggagggctttgctggatgaataggagtttgccaagtgaacaagggctgggggaggatgaatgtgggtaacatatgtaatatcagccattgtagctgtattcattgagtgcttactaaatgctaagtgttctgctaagcacctttgcctatacgttatctcattttgtttccccagtaattctttggggtagatattaatacccccattttatagataagggcactgaggctatgtgtggtaccagccaggatttgcacaagacctgagagattttctttttttttttttttttttttttttgagacagagtctt

SEQ ID NO: 58934 - DNA, 915 bp, Homo sapiens
ctctgttcctgggggctgcagtcagccccgttggggagtgatggcttgcaagagaatgacttcagggtccttgcctcgggctggaaggggtgggggcggtgaagcagtggcagaccctcctagtcctagtctccaagaatgcagaggtgaaagtgcccttctctttcacaagagcacaaggcaatgcacacatctgctccctggcacaatgacaagaaacaaggaactcaggtgcagagctgggagcctcgagggaaatacggaggagctgggagacactgtgatcagctcatcaggatctcagagcttgtcaggaccctgtccttggggaggagggtcaggttctaactagggaaaaacagggatggaccccagccttaaatcagcctctctgcaacatgccaggacgcccctgtagttctggtggatgctgcggcttcgggcaacccctgctggccaccctcgggatagcgccgtgtctttcctggtccacttgatcccctgccaggtaggctttggtttctgtcccaccccctagtgacacaacaccggaaacgagtccttggaggcccttccagttctgccagtcacatgttcccaaacatttgtactccgtggttcattctcagacaaaacctcaacccaaactctggcatataaaattgcaagccaggcactgactcacacctgtaatcccagcaactaaggaggccgaagcgggaggctcatttgacgccaggagcttgagaccagcctgggcaacatagtgagaccccccatctctacaaaaatttaaaaattagccaggcgtgatggcttgcacctgtagtcgcagctgctctggaggctaacgtgggaggatcactgaagtccagaagtttgagggtgcactgacctatgatcatgccactgtac

SEQ ID NO: 58935 - DNA, 2569 bp, Homo sapiens
gctgacgtgggaggatcgcttgagcccaggaggcggaggctgtagcaaggcgtggctacacaactgcactccggcatgagcaacagagcaagactctgtctcaaaaaaaattgttttaattcgtttcccagaggtttggaggcgtcacactgtctcaagccacgcagtctggcctccccttaattcaacctcccaagaacgctccaaactctcaaagtcagatcttctgcacccgcacttttcattgggcgaaagggagccaggatccgccccacgagcaggaggcagccaatgagagacgcgcgaccaaaacccggcaggaaggcccgcaggctccagccccgggatcccaaggctctggccgcggaaccctgagcctgacaagccccgagacacgtgctcaggccggcggtcccaagaccggtcctcgggtcggcagcctccctccccacactctgcggagcccaatccccagctggggaaactgaggcctcgaggcgctgcccggagccgggtctcgggcccgaacatgcgtcccagccccacgcgcctaccttccgggcccgggcgtcatcttccgcctggatctcaaactcgccgtcctccgagtcgctgccgcgggcctgggaggccgcgcctcggcgcttccggagccctttcttcttcctccactgggccatggcagctcgcgaccgaggtccagccgccgggcccttgtcggccgccattcgggccgcgcgctgggaacgcagaagggggcgtggcctgaggagcgcaccaactgcgtgggggggggggaggtgcggtgaccacgtgacctccgctgagctttcgccagtgcctgcggccctcggcggcctagtacacacgcacctgagtgagtggcaccagaggaccctctccatgtttagggacctcctgggcctcaggagcgtggcgcccgcccctgggcggactccccccatccgcgggcgcgaatggtccgggccgcgtccgcagtgctgctggctgctccctggttgctgggtgcaaagtgctgggttctgggtttctggattcgcgggccgttcacacgtagcctgtgccggctcctcgggtgagtccgtccgcgcgcggtgccccgggacggcctaggctgccgggggtccggggccccaggcattccgggctgcagattgacggggatcccggatgcaccgcgcgcccccgcgccctcaccgacgggtccagacctggtgggaagaaggtgcggggacgggtccctgaggatcccgatgcctacgagccaagatgctcaggtaggagaacaacccaaaaatgcagggacctcgggcactttttaatcgggtcattgatttgggagtcgcagaatgtggggcggtgggggcggcggtgatctcccgatagcagtgtagccaagtacacaagctctggactcagatttcacttccaccgttttagctttataggtgtgacctacacatgtgacttcacctcagttttgtgatccgtaaaatggacaaattcgaagctacttcacagtgctgttgagaggattaaatgaaacaatgcttgtaaagctctttgcaggaggtaggcatgggatccacgctggctgtcattgcccccacccccatcagtacacataggaaagtgcctgtctcccctaccaccatagtgtgttttctggttggtgcctaaatagacacaggtgtcatctctccttcaccgccagagtcattctgtaaataattgccagtagcccccctttcaccaccattatgacaactaaaaaaaagccaaagaaatttccaaaatgccccctgaagttgacagctcccctttgagagactggttgagagagaactaaacccttgggatgagaacttcagacactaccggtcttcctccattagcacttctgtggctcaggggtgctactctgacctcctctcacagggagcctcggaagcagggcctggccggcagagcacacctgctgtcaccagggaccacaggcagcatgaagacccccgtggagctggccgtcagtgggatgcagaccctcggccttcagcaccgctgccgaggtggctaccgggtcaaggccaggacgtcatatgtggatgagactctgtttggcagcccagcaggcacccggcctaccccaccggacttcgatccgccctgggtggagaaggctaacagaaccagaggcgtgggcaaggaggcatcgaaggccttgggggcaaaggggagctgtgagaccaccccctcaaggggcagcacccccaccctcacaccaaggaagaagaacaaatacaggtaatggggtagggagatgcaaatcctgtactcagtgcagccacctggattccagttacagctctggtgttcacctgctctgtgaccttgggcaagcatcttgacctctctgagccagtttactcatgtggaaaataggaccaattattcctacctagggggattgttgatggattaaatgagagaggggtctgcagtgcttcgcacagtaacctaatacttagaaagctgtcaataaatggta

SEQ ID NO: 58936 - DNA, 803 bp, Homo sapiens
tgcaatgtgcattttaaacatatagaatgtttaagcttcctggaactttcactaacaattagttactcacgcccacctcagtttttcctgaaacatccatctctcttttgccttcccatcttcccctttgtttccacagacataggccagaaataacctctctttcctggctgggcatggtgactcatgcctgtaatcccagcactttgggaggccaaggtgggtggatcacttgaggttaggagcttgagactagcctggtaaacatggcaaaacgctgtttctactaaaaatacaaaaattagccaggcatgatggcgcatgcctgtaatcccagctactcgggaggctgaggcaggagaatcgcttgaaactgggaggcagaggcagtagtaagctgagatccaaccagtgcactgcagcctgagcaacagagcaagactctgtctaaaaaaaaaaaaaacaaacctctttcctcctcccaactacagtaaaatctggcagtagcccaaggtgacactaaagggcaacggacaccaggctgtggtgtatgtaaggcagttgggggtggtgaggatgggggcgacttactttaccatctaatgggggctgctgctgctgagccctaggagatatgcagacctgggatatctggatgattagatttttttccagaaaagggagagtgttggatttctacatggtagccctcagttttttaaatgctgacaaataatttaaagataattgttcaggccgggggtgatggctcatgcccgtaatcccagcactttggggggccc

SEQ ID NO: 58937 - DNA, 3121 bp, Homo sapiens
cgccaatctcagaaggcgagactcggtgtctgactgacctttcttttcaccattcaatttattgttccgctcagttgtccccacctcctgaagtctgaccaatcagaagcaccgccattttgacctttcaccaatggaaagacttgggactccctctgggttggactcaacgagtaaggcggggaacaagggaggagtaaggggcgtggattcttcgtcccgccccttcttaaggaggcgggcagggagtaccgcatcggcggcgggcgagacctgcggaaggacgtgatagttggccaatcagagttcatcacggtagcccagttagccagtaggacgctgtgaaggggaaatggggcggggccagcggggttgagaggacggtaggcggtggataggagagctggcgcagctgccctggtggcagtggctgaagtggcggcggcttcggcggctgcggcggctgcaacagcttcgggctcggggttttggcggcggcgccggcgggctaggctgcgcggtgcggaccccggcgcgcggtccgggttgctggggcggcgcgtgtaagaatccgagggatgcgacggcttggcccgagggagagggcagggatcaggggtcagaggacgcggagtaaggggttgcggcgcagcactctggtgtgggaggtgggccgtacgggcccagagggggcgcagggaagtctccaccgcgcttctctccgtccagcccgggccggggctttgcaccctctctcctcgcccccgacttcttagggcgaccctcacgtgggctcccagccaggggctgggagcacgtggagctggagccagctgtcctgcctccttcttcctccctccctcgctcttctccctggcgcccttaggtgaccccacaggagtcttgtgcctgggtcaggctgccccagcggacagcgggatggtagctgaacctcttcccctaggccctttccccagcgctggccagttgggtcctctgtagaggcagaagcaaagcccgcggagggaacactggaccaggacgcaggagtcccgggttctagccctactcctccactgtgtgaccttgggcaagtctcttcccctctctgggcctcatttttgtctgtctggaaaaatgacgtgtttgaattcaaatcaggggactggttctagtcgtaggtgtatatagggtaatggttaagcaggcagggtccctgattcagactgcctgggttgaaacttataaaaggcaagttaaccactccaagcttcaatttcctcattcctaaagtggggatattagctaagataggatttttcaacagcagctcagttgacattttgagccacataattctgtttcgggaggtctcacctgtgcattgaagcaagttcagtggcatacctggactccacccaccagcaatccccccactcccaagttgtgacagtcaagatgtctccagacattgccgatgtccccatgggggcaaaaatcaccccagttgaaagccagtgggcaaaggcagtacaggcaggcaagcagtcatatattaaacagttaaacaaccgtgttgaagcatttgaatgcgaggactttaatctatggtggcagatatcatgaaaattatgcatgaacaacccccctgcctctttttttttagctcatcattaatggtagtgtattttatgtgtggcccaagatagttcttccagcgtggcccagggaagccaaaaggttggacagccgtgagttaaaacatagaaaccactagccattatgataatggtaacattaagaaacctcttctctgtgagttaataaattctcctgccttcaaagtaaacatgggagataattgtcaaagctgagtaatggatacaaggaagttcacgtatatattctctgcacttttgagaatgtttgaaaatatctgtggtaaaaagttaaaccaaaacgacaatacaaccataattcttaagactgccaaatagtagtgtctcatctgggatttcctcttctgcctttccactgctgagatttaaaagcaaaataaatccccagatctggaggaaacttaagaaaaaaaaactcacaggaagtgtgctgggcagagagctacgggcttagcagcaagtagaatgatgtttactttcgctgccttgtttcaaaacgttgtactgttccctgtggatgcacaaggatttgcttggagttgttccaatgattcgaggaagaagtcagttgctcagctgccattgactaggtcagttgggaggcaaagtgggttgagcccagagcccacagcttgaggaaggaacctgctgctgtttgcaagttcaaaggtctgcagtcagatctgctgagtctttttttttttttttttggttcttctcagcggaaacgggaatgtgcataaataggagctgtaacaggctagctcggagtgttttacttatttagttatttttaaatttttagtttatttattttttgagatggagtctcgctctgtcgcccaggctggagtgtagtggcgtgatctcagttcactgcaacctctgcctcctgggttcaagtgattctcctgcttcaggctccccagtagctgggattacaggcatgcaccaccacacctggctaatttttgtatttttagtagagaccaggtttcgccatgttggccaggctggtctcaaactcctgacctcaagcgatccacctgcctcggcctctcaaaatgttgggattacaggcatgagccaccactcccggctgctctgagtgttttaaattgggagttaaggatgagcacttttactgtattaaaaaatactcaccagttaaaaaaaaatactcttttccccttcctcggacacctaaatctaagagaacaactcctatataaaaatgatataaaaatcatacattttggaagtatgtttctaactgttctgagaggctgcatggtaaagctgaagtgaaagatgtattttaaatctgtatatatgagcaagtatatattgatgattgaagctaggtgctgcctaaatacatggcccagactttgaggaattatagtgtaatggctgggaatacaggtttggagtcacaccgt

SEQ ID NO: 58938 - DNA, 3731 bp, Homo sapiens
ataactaactgctggggtccagggacattgtttttcctgtacagcacattagtatcttagtttcttctctcagcttcttactgggtcattttttaaaacctcaatgacttgtgggtgtaattcaccaagcctggctgggaagaagggtaggacctgtgcaagtaaacaagagttttcagaggaggcctgctctgccttagcatagtaggcctttgatatttcatgcttggattttggccttgaccttctaccccagcgtccccctgtccctgctgtctgaggagcagtccttcagtccttttttttgagacagtctcgttctgctacccaggctagagtgcagtggcacaatctcggctcattgcaacctccgcctcccgtgttcaagcaattctcctgcctcagcctcccaagtagctgggattacaggcgtgagccactacacccagctaatttttttgtatttttagtggagacgggggttttaccatgttggccaggctggtctcgaactgttggcctcaagtgatccacctgcctcggcctcccaaagtgctaggattataggcgtgagccaccacacccggccctgagcagtccatctaaaacacaagcccaacctggttgttgccttgttttaaagcttcctgggactttcccatccctctatgggggttggggagggcaagctcttcagctggcaacgaagccttgcgtgttctagtgccttcttgcttgaccagtcccatttcctgcctcagtccacagcatcatactgcatttagttcggtgaatcccctgtgcattcttaaacctttccaccttgctggcaagtcagtctagaatccctttctcagcctcttgtttgctcgtggcctccagttctgtcttgaaaatcctgctgataacaccatctctttgaagccttcactgaacttccccttcctgacagagctaattactcactacccttttctgcttcggtatcttgattaggcttccattattacaagtagattatagtggggtaattacacatttaaccatctgatcacctactaggccctgagatccattcatctttttttttttttttttttttttgaggtggagtatcactctgtcacccaggctggagtgcagtggcaccatctcagttcactgcaacctccacctcccaggttcaagtgatcctcccacctcagcagctgagactacaggcatgtgtcaccacgcccagctaattttttgtattttcagtagagcctctttccttggctcccaaatggttacctttttgctgtgtccccacgtgattgtccctgagtctgtgtgtctgtcctcttctgataaagacaccagtcctattggattagagctcatccatatgaccttgttttatcttagtcacctttaaaggccctttctccaaacacagtcacattctttcaccatgttggccaggctgatctcaaattcctgacctcgagtgatctatccgccttggcctcctgaagcgctgggattacaggcatgagccaccatgcctggcccatccatttgtctttgtatcacatagctcagtgcccacaatatgcaggtactcaacaaatagtggtcagaatcaacgtacttggatttctggggcctcgcagcccatgggagtggcagtgtaagggcccgagttagaggtgggcagcctccctcctgccgcctctcctcaccattgctttgagtcccattgctctcagcacagctgagtgtcctggtggctgccatcactgacctttgtctttggttgctgtaaacctttgaagtactaaggagttggcagaatgcagatgcaggccatccgcggagttggcaacgacatgagcatgggctactgggaacgaagcaagctttctaaggctgagtcaccatcaagcctggcctttgttttggcccagcagccgctgaggccttctcagcactgtacctccacgctccatgtctggttgggcacccctaacaaaacaccatggactggtggcttaaatgacagaaatctaatttctcacaggtctggaggctggaagtccaagaccaaggtgtcagcaggtttggtttcttgcgaagcctctttccttggctcgcaaatggttatcttcttgctgtgtccccacatgattgtccctgagtctgtgtgtctgtcctcttcagataaggacaccagtcctattggattagggctcatccatatgaccttgttttaccttaatcacctttaaaggccctttctccaaagacagtcacattctgagctactgggggttaggacttcagcctatgaatttgagggggacacagttcaggccatcacactcctacccattcttcagaggcagggactgaggaatctggctgtgctgcctgtgacctttaaccctatgtgagggccttatccctgcaggaaactggagggtttgggtttttctccttatatgggcaattgtggatttaatccaagactcagacatctttgggctctaagtgcggctgctgcagtgctaatgaatgactcacaggcagcatggtgtcaggttgataaaggaggcaggtatgagcagaggtatttaaagcctggaaactaggaataaccttgaaaacagtcagcggggccactgttagagcagtgtagagacagaccacagtccacaccgcgtgacaggcggtggtctcacccaccacattcagggaatcaggacgagtctgaatgtagtgggcagtccaaggaatttcccagggtaactctggtcacactcagctctgccttctccctgcctttaaagccagctgctgcctaagatgggctggaccatgtgccttttctgagtgaaggaaggattgggctcgcgggggctggctgaggtctgagcaggatgctccgtctctgctttggtgccgggttgtttatggttttcaggtgacaggtcctgcagctaaggcccaaggtcacagcgcagagagctgacctctccctccttcacgccgatgcctggcacatcatctggagttccctaggacacagtgcagcctcagcaatgtggaggatccctgccccctggcaggggcccccatgtggcaccctggtccccttttcagggtcttcatgcagccagggcgagttggcaccaggctcagtcaaggtgggccagagctgttggccgcagggccgccgtagccaggaggagttgggagagatcctcgccggctggcaccagagaagaatacaccccgaggtgtgcgctccatcactgatgtctgtgccgtggctctgcctctgaccagatggccccagcatacttgccaaagagtgaagaagcccaaggggcttgcacagcttttgtcacttgtgataccatggtgagtggagtggttgagctgagtatagtgcttagctgctctaagcctcagcctgctcatctgtagaatgtgaccatgatggcatctaccagtagagtcgtcatgggggattgagtgagagcatgtgtgtgatcacatggtcagtgctcagccggtcataggcattattatcatggcagaaactgggcttccttggaatatcctccatgagcagaggtcctgaacccaggccacgattcagatccttcttgcctcactcctggcacagcaggtggcccctgccaagctgggacgcctccgtgtagcagctggagaccaagcagcaa

SEQ ID NO: 58939 - DNA, 1284 bp, Homo sapiens
ggaaaagccccgggcactttaagcaggggaatgaccattgtttttcagggtagtgtctgaacattcattcatgctgccctggcaagagcagttggcaatgatggcaagaccgggcagtgtggaggtggcccagggacacggggtgcctactgtgttttgcctgaactgtgttttaagaggctgcataaccaagcagttgctgtgcacgtacagcttggcatctgagtctcccaccccccggcaccccatgtttgttacctgcctggtgcctgtaggcatttgagtttgtagcccctggttgaattctgacggtacagccctttggctggacaccatgcagctcagccaggggagtagcagaagatcaactatggacaggtgtgacttaggaagaggtggagtttggggtgctggggagagggaccgaacatcccagggaggggaaatggcataggctgaagtaaggaggggggttgcagtgagtcgagattgtcactgcactccagcctgcctgggtgacagagcaagaccctgtctcaaaaagaaaaaaaaaaaaagaagtaggaactcttctgagacccacaccctggacggggccagagactagcatgctgggggcagattggatttgggtgtggttacatgcactctggggtcagacccactgagtttgaatccagccctgacttctcctgctgggactttgggcagatgatgtaacctctctaagctttgatttcctcatccgtaaaatgacactaatattagtattaccttttaggactgttctgaggtttatacaagatagcatgcctcacacaactagcacagtgcctggcttatacagaatgagcattgggtggatgtcagccattataattagggtcaggggtcagagcaggcatatctgttttacagagtgcctaaaatgctgatggcaggagtttggacctggttgagttgggcatgggagctgctaaatgtgtttgggccagaaagcaagtgatgacagagcatcttcctgctgacatcttgccagctcgggatgctgtctctagccaacttgataagccctgagcttagaaaccctggggtgggtcagccctgaataggggttacttttccctctggagattgagaggtggatggagaggaaactgccaggctattctgcagtagtaggagccggatttggcatttttctctctgtgtctgtctccctgaccagtcactgaacttccccaggtcccagaagctcagctcagtagctcagttcctacttct

SEQ ID NO: 58940 - DNA, 2353 bp, Homo sapiens
gacagagtctcactcttgcccaggctggagtgcagaggcacaatttcggctcactgcaacctcggcttcccaggttcaagtgattctcctgcctcagcttcccgagtagctgggattacaggcatctgccatcatgcctggctaatttttgtatttttgtagagatggggtttcaccatgttggccaggctggtcttgaacttctgacctcaggtgaactgctcaccttggtgagcctccctaagtgctgggataacaggcatgagccaccgctcctggccactcctgctcattctttagggtggcttcttgatttccattgtattttcctttattcacaatgctccttttgggctgccttccccaccaacagaaagggaaactgaagcaaaaggaagggaaggccgaaagcagtgcctggccattgactgcataggaattcagggccctggagaagtggcaggcctaggccatcaagctctctgtgggatgtagctgtcctccagctgtcacttccccaatgtgcccatgcttgcttcatggccgcctcacctcttgttactcttcttctgaacaaagccacctgcagcagcagcagcagcagatccaggtgctggggcgtggccagtgttcatggaagccgggtccagccagcccccaggtgtttctggttaaggactagagcggacttttgatctgtgctgagtggatgccatcagctgacacatcagtagccttcatgcagcttgagtctcaagccaaacttgttcttccgagcactggctttctgctgacctcttgcaggggaaccagagcgcaccagtgcacagtgaaaaatgcctttaatctccatttgctcttctccggctcccttccttgtccctgggtgtttcacaattagcatttcagatgcttccaagtgaatatggaacagatgttcgcacaggtgctgtactcttcactgggtaaacagtggcgtttgcgtgcctctgcgtgtgtgtgtgtgtgtgtgtgtgtgtgtgtgtgcgtgtgtgtgtatgagacagcaggaagcatagggcctttacaaatgttttttaaagcgtctaaaacactttacacatgacgggtactcaataaatactttgtgagtgagtgagcagtggcagggaaagccctttgtttcataataaacccagtggcatgggagcaggaagtacaattccaagttgggtcttgaaattcatggactaaagaagaagtcatgtcctgcctcaccaagaaattacccgtggacatctggcaaaccggggggcatgctgtagggacaagacacagttctccatctcaggaaggaggattagacaataaaaatgaccgtggcggcccctggcaatttaatctgcctcacgaatgtgagctggccacggctgtgctgggaaaaggaacttgcggttttgcccatgcagaatgtttgcagatgggttagggagttagccaggactgacctccttggctgtgtttttccaagtagcacacctgatcaggttgctccacaccattagtccccagtggctcaagtccaggccctcagcatggctttccgcctggcctacacccccagccttgcggaaacagtggagggaaaggtgagggcttggctgcccgtcgtttcctccctctgtgaccttgggcaagtcactcagcttctctgggccttagtttcaccctctgtaaactggggataataatcaagtcttgtttgtagggcctttgtacacttagaagaattaattaacgtaaagccctttcaaccgtgtctggtgtgtggtaagtactgaatgcgaatcgtggctgttacctttgcccactgcgtcatcctggtcactggtctctggcactttaagcttcagaattacagaaccctctgcagtttctcagacgtgccctgctgttgaagtctctgtgctctctgaatgactatccttgtttctagaatgtgccactcaccccatccccatccaccctgtgaatacctcctcatccctcatgcttgaaatgccagccctggcattcccctgagttcctccctgccactggccaccagcccccacggagggcccttgtcatcccagcccattttagatctcagtgcaccagagtcacgatccttcattacctactgatggagagttccatgagggcgagggccatggtttcaccttttctaatccaacacctagcacaatgcctggtatacagtaagtgctgaataaatgtctcctcaaattaaaccatatgtgtttgcatgtaggtggtcagtcttttaaaactacatctggccgggtgcggtgcctcacacctgtaatcccag

SEQ ID NO: 58941 - DNA, 1728 bp, Homo sapiens
caaagaaaggccccagtggtttacgcagccgggctgccccctgcgcctgctgggtgaggggtgggtcgtggaagccttcccctcctgcctgttctttcctgctcctccccagtgcatctttatagctggcatatggaaactgtttctatttatctggcaccaccaggacgctgctgcatgctgtgctccagcaaacagaaaccttggattccctgcagggtcatttccgatgtggcgtgcaaagcagccagctgtttcgagggagcgtctgggccctgtgacatcagcatgtgggagtgttaccgtgtgtgcaaacaggtcattctggtttgtctgcctgtcctctgcaccgggatgtctctcctgcttcgagtcagagtttgcgttgttgttttgtattctcatgcctgtcagttcagctgtttctttccactccttcccgtcctctgagtggttttacgttctctcctccgggctgattgccaggattcagggagggaggttaaggggctggtgccacataaatctttagtggccaaagtctgcaggcctgcaaggctgcgcctgtcctcttggtctggttttcccaagagagctgtctgcccagggcaccagaagggcaggacaaaatgtttcccttcgtggaactttccccagaggcccagaacagagatgcagaatacagtcttcctggttgccaagagtgttcctggtcagcctcctctggtcctttctgaaacctgcatgtggagcttgctggctgtgggagccagggagactgcaaatcctgcccgcctgcccacgctgctgctcatctccctccctcctatgtccggcccggttgcctcccaggaaaggtaaacatgcagaggcaagggctagctgccggccttctggaggaggcagtggagggccagcttcctgacagccccgtggtgaggtcgtcctgtcttctcaagctgggcccctgcgacgtgccccagttcctgcctttccagctggcctggaagaacccgttctgctctgggcaagaacagtgccaaggtcagaggccaaaggtgttgcttcttccgtggtccgtaatgagcaccagttggagagggccagccccggcacacagaggaaggggctggactggggtgatgcggggtgagcctgcccggtcactttgttggctaggatgcttcctgtgctttctgtgcctggtactccaaagatgcgagtgccagtcattgacctggaggttctgcccagggtctgtgggcagtaggaggtcagaacaaggcaccaggccactagagcaggtgggtgtaaacaactgttggcattcgaggctgcccaggtagaggtcctggagtgaacccagtgggcacgatgggcttcagtggggcagagtgtcctctagcttcacacacagtgctgatgactcaggccagctgggggcccctgcacatgctcttagttcccacgtggagggtattcattttgaggaagctgggcctgccgggattggttccccagcaagcaggggctcattctcccagaaaccactccatctgcactcacaccctgactcaccaggctcacatcctgacttaccaggacttggctatcagcctgtcccctttgatctgccccttctgccccctgccttcccgctttctgggcctgaaatgtcctcctcagaaagctgccgagccttcgagcataccttctgcgggaacaacg

SEQ ID NO: 58942 - DNA, 747 bp, Homo sapiens
tcgggtggatcatttacaatgcagatttacagatttctctcagattcacttcttcccaatgaatgcgtcatttcttggtgccgttgtttactgtgtgtaaactactgaatttcaggattattgtgacaaacccaactcagactcaatgggatctgtttatcagcttggattttggaaattaaggggtagatttcaggcacagctggattccagaggtgcagctggtgttagtgttatctattggttattgttttgttgtctgctgacttccttctcaggcaagttttccccatgtggtggcagaggcagccgccagcaacaacagggaaagagcccctccttcctaattggcctgggaacagtttcaagttcagctgtcactggctggacttgggtcagcagctatgcctgaatgcccaagggagatgaggggcttattgccaggcccaggtcacctgcctgggaaccaggggtggagttggccagagccaaacaatgtggacagagagcaaggaggggatgttctacagagacagatggcccagtgttgctgggagaggagggcgtggctgtcagcagggaagagcaacagatggccctgcaccaggggacaaatccagttgtttttaatttttaactaagtaggatattaatatgcttccaaaagtcaaaggattcaaaaagggtctgtctaccctattccttatagcccttgtagggcgactgatttcattgacttctcatttt

SEQ ID NO: 58943 - DNA, 1325 bp, Homo sapiens
catgtttgtgacctttagtgattgtgattcccgctttccccaaaggtaccccctgtcctacgcttatcattcccatgcacgtctttatattttacttcacatttacatttccccaagtgacaaagaaatgataatgctttgcatacttaaaaaagtctctaagtggttatataatatgggtgtccgcttctacacattgccctttcgctcagcactgtgtttttgaaatttattcctgttgatacatgtagatgctgtttattcattttcactggagcggagcaagtatgccaaagcttgtttatctgctcttctgtcggacgtttttcttatcacaaatcccaccgcagtgaacactcctgtgtgtttcccggtgctcacgcttgagagtttcccaaaggcgcttgcctgggccctgagagacggcaagcttcagcttcactgggtacagcatggtcacaggctgctcactcaggagggcttagtttttcaggtggggctgactgtgacagccacacaagagtcacagggcatagacatcggaagccgtggcactcagctgggaaagccgaggtcctttcaccaggactccgcagatggtgaagacagtggaactccagagccctgactctgaggctagagccagggccaacccctcccggccctcgtgactgccttgtcctgagtcatggctctcacttcctcccacccaccaccccactcttggtagaattttgtttgtgcttctccgggggtaggggctgatttcccctgagggcagagttcctcccttttcccactcaggatttcagggactcagggagtggtccattcctggagggaggaagtgaatggcattcccaccctgggaccctggctgcagggagcagcggatccctttggaatttagtcagctgtcatgttctcagaacctaagattgcgaaacagcagcctggattccagatccagcctacagatgggttttgtttggtctgaaaactttgagccagcattttaaaattagattttacacaaaaatacagacttccagccttttgaaagaacagagccgatagtgcccggcacattgctgtagggcagcaagcgtctggtgccagcagccctgctcccttccaacagagcatgtgttctcagggtgctgtggtccccagcagtccctgctgctcttcctgacctgctgcgttcatttgcatgtatttgtccagtccttttgacaccaggttttgggacctctgctctaatccttttgtttatctgtttccacccacttctaggtttctacttgttctcccctaacccttca

SEQ ID NO: 58944 - DNA, 1574 bp, Homo sapiens
gctggtcaccaccatgtgcctcttccctcaagaccagggccaaaatggcttcaatatatttcaaaggaattaaactggaaaaacaaaagtcctcagcaaactaaatttcctgttttggctttttcatgtgttctacgatgagtatgtcttatttttgcaatcaggaaaccaaaccccataaaaacgtttttttctttaagtctgcgcaggtgtttctcaatgtactggcagcctgaggggagggagaggaggtagggaggggaagagaggtcagaaaggcgcctgtcccagccaggttccttacctgtccacggaagacacggcccttcctcttctatggttctcccgaacccctccaactggagtccgagttactctatttggcaccaagttcaaacaggacacccctggtttcaaattcgtctcggccacttactatctgtgtggccttaaggaagtcacttcacctctctgggcctcttattcctcatgtgtgaaatggacacaaatgctggccgacgcggtatacaataagagctcaataaatgttcgcgtccctgatgtccccaacacctgaagatcagcatgcgtctcgtctctctttgctgccgatttattttactgattcactagtgagcatttattgagcgccttctgtacgcgtgggccgatgcccagcgctcggatggtcgccgacctgctaagggacaggggcgggaaatcggggctgcgcttcccaggaaagagacctcaggaacatctccgtgctccgtttcccgtccggacggaggctgagaagtcgaactcggggcgcccgggtcctccggccgtgcggggaggcggctctttcttacctcgggccgggcctgggaccagcaaactccgaacctcgacctcgcagggcctcgcagccttccaggtccctggccgccggaccgaccttgcgccagcgaagccgccagtccgggtgccccgcctgctgcagcgtccgggcccctactcttcccgtccgggcccgccccggctcgccccgccccggtctcggccacgccctcaggacacgccccctcggggctcgccccgcccctgcccttaaaggtacagctcccggggagcttcgtagggtcttcccactctccaccgtcctctccctccgctttgaaactgagatacaagccgatgggtaaggactgcaggaagccggagagggacatttagagggtgaaactaggaggttcatttcccgagggtagaggaaccagagggtgtcaagctgctcctggtaatgaatggtgacaaagaggtttgggaaaatcccaggtggagaaagccccaccctgcccaggaaagttctcgcggtttcactgaaatccttctgagatcctaattgggttcaacattcccctctagtagcatagctttttttttttaatttaaattttaattttttaagccagggtctcactctatcgcccaggctggaatgcagtagcagctgtcacggctcactaaagcctcgacctccgaggctcaagcaatcctcccacctcggcctcccaagtagctgggactgc

SEQ ID NO: 58945 - DNA, 1904 bp, Homo sapiens
actataggcgcgcctcactgcgtccggctacttttttgtatttttagtagagacgggggtttcaccatgttgcccaggctggtcttgaactcctgaactcgcccgccctggcctcctggagtgttgggattacaggcgtgagccaccgcgcccgacggcatctaggttttgagtagtagttagacagctttttcccacacacatgtaaaaagggtatttgagggacaatgggaaaagttggaataaagactgcattagataactgtattaaataaatggcaaataccattaaataaatctggccgggcgcggtggctcacccctgtaatcccagcactttgggaggctgaggcaggcggatcacctgaggtcaggagttcaagaccagcctggccaacatggcgaaaccccgtctgtactgaaattacataaatcagctgggcgtggtggtgcgcgcctgtaatcccacctactcaggaggatgaggcaggagaatcgcttgaacccgggaggcggaggtggcaatgagccgagatcgcgtcactgcactccagtctgggcgacatatggaggttttgtcttgtctcaaaaaaaaaaaaaaaaaaaaacttggggaagtgtgctaaaccgggtttgcgtaggtggaaggggcggccgggctctttaaggtgggtcccgccccgtaggcctcccctcgcgccagcccctcccatcccggaaaggctcagcccaagcccggccccgcccgccctcggccccgcccatggcagagcgcagtcacgtgacccgggctgcggggcgcagcattgtgcggtcatggtgggccagatgtactgctaccccggcagccacctggcccgggcgctgacgcgggcgctggcgctggccctggtgctggccctgctggtcgggccgttcctgagcggcctggcgggggcgatcccagcgccggggggccgctgggcgcgcgatgggcaggtccctccagcctcccgcagccgctcggtgctcctggacgtctcggcgggccagctgcttatggtggacggacgccaccctgacgccgtggcctgggccaacctcaccaacgccatccgcgagactgggtaagggttggcttatccccacgcggggccatcgggggagggggatgcgtgggcgccggacctcgcctgttcccgggaccggcctcttgccgggtgggaacgcccgtttctctgggggtcagctactcccgaggctgcagcaccgccctgcgggccaagtaccctgtttgggagctggctactgcggcatccctcacctcatggggccagtcccttgccttcagccagtggtgacagtacttctgtccccaagaagccagttccctaccaccgaggccgcagtgcctgcatctggatcaggtccatggctggtgggtaaattctatcctcacggggacctgctcccttccctagactttgcctcctcaccccatggaggccagccccctgtccccaggcctgaggggtgatgagaactcagcaggagactaattcttacctgcttggctgtggcttgctcgtgggtgccagcaccctgcctcccttccagtgccaggtcagcaggactgaacctgggttccaggctagtccaaaagcagagggtccctaaagtcacatagacccatttagtatcctgctagggctctgctcctcccttgtcttctgtgtcctggtccaaggggaagtccttggctggatgccgtgtttggcagccatgctcaccatctttattgctggaacccaggctgtcattctgatgtgtgagtctcacctaactcctccgcctgtctgggctcccgtttccccatctgtggcccagattttgaggatgtgctctagttgggtggtcatgtgctg

SEQ ID NO: 58946 - DNA, 2829 bp, Homo sapiens
cctccctctgtcacccaggctggagtgcagcggcatgatctcggctcactgcaacctccgccttctgggttcaagcgattttcctgcctcagcctcccaagtagctgggatcacagacgtgcaccaccacgcccgaataatttttgcatttttagtggagacaaggtttcaccatattgggcaggctggtctcgaactcctgacctcaagtcatctgcctgccttggcctcccaaagtgctgggattacaggcgtgagccaccacaccgactgacttgacattaaaggccggtgtaggtcaccaaggcctggcctcagggacaatcggggtgggagtcagaggagccggccacgaagacccttttcaggtgggtttggggcgcctctctcgccgtttgtcccaggcggtgccatgggatgccttcaggtaaaaggacagggctccctctgccgcggctttccgtgaagtgagcatccattaactgcatccagcctgccccaaggatccctgccccaaggatcgcaagacttcagaagaggttgtgcccggggaggaggagggagggagccctgaagccgctgtctgcccactccggcagtcggaagccaccttccctttcacttggttcacagtaagtgctcagtcgatatgaactattatgaaatctgggctggacaccttaagtgcaggtcatcctttcaccgtcacaaccacctgaggaggaaggcgctatgctcatccccattctacagatgtggaagctgaggcacagaactggacacaaactcagtgtttaggcccaaatggctgttttttaaaaatttgagacaaggtcttgctgtgtcacccaggctggagtgcaggggcgcaataattgctcactgcagactcgacctcttgggctccagcgatcctcccaactcagccttcccagtagctgggactacaggtgtgcaccaccacactatactaattaaattctttttttaggtcaggagttcgagaccagcctggccaacatggtgaaaccccatctctactaaaaatacaaaaattagccgggcgtggtggcacacgcctgtagtccaagctactcgggaggctgaggcaggagaatcgcttgaacccaggaggtggaggttgcagtgagcccagattgtgccattgcacttcagcctgggtgacagagtgagacctctgtcttaaaaaaaaaaaattttttttgtagagattggggggggtctcactctgttgcccagctcagtcttgaacttgtggcctcaagcaaccctcccacctcagccttccaaagtgttgggattacaggcatcagccaccatgcccagccttgacagactctttctatgtctccctcttcccctgggaaaccacaggctagcccgggacactccagtcctgaggtgggactgaggatggggccacttacccggcaaaggtgatgggtctgagcaggagtcagagccaagccagcgagggagggatcaactgagtagatagcccacgaagagagggggctgaggacgggtggacagtcttctgaatggtcccaggggctacttggtcctgggctttattcctctggcacctctgggcagccaatggggccctggggctggctacacccccccctccctcctgccaggacccacccccctggcttgaggccactgaggctgtcagaagggaggtggaatctggccaagctttcttctttggcagcttcctcctgcctttcccacaacccactcctcctccctctttccacttcccctttctgtcctcagtttcgtgaaaggaaaataaaaaattgggacccccaactcactatgccaaaagaaaaagaattaagctaaaagctgagtcatgtaagaaactgcctttcctttagttcctaagcagatagcttcagatgaaaggttaaatattggctccgcattttgggaggccgaggcgggtggatcacctgaggtcaggaattcgaaaccagcctggccaacatggtgaaatcccgtctctactaaaaatacaaaaatcagccgggtgtggtggcacgtgcctgtaatcctagctactcaggaggctgaggcacaagaattgcttgaacctgggaggcagaggttacagtgagactagatctcgccactgcactccagccttcacaacagaaagaaaaaaaaaagttaaatatctccacaggtcgctactctatgttcaccttatcttatgtaaagtgccgatttattgagatcaagacaaatacataattggctacttccctatctgcccctcttctcttacaaactgtggatttggtaatgtggccatagcctccttctttcccctccagcttgcttttctcctttaaatactgacacctaaagtcatctctggagaaaagcacagacctgtctcccaggtgcattcttaaccctggcgaaataaatttctaaatggattgagtcctgtctcaatctttttgattctttttgatttacagattggagactcatgaaagggaccctgggtggaggtggccctgacctttgacaagtctcctactggtgcttggtgggtcttgctctgtcaccctggctggagtgcaatggcatgatcttggctcactgcaacctccatctcctgggttcaagcgatgctcctgtttcaaccccccaaataactgggagtataggcatgtgccaccacactcagctaattttttgtatttttagtagagatggggtttcaccatgttagccaggctggtcttgaagtcctgacctcaagtgatccacccgcctcagtctcct

SEQ ID NO: 58947 - DNA, 2263 bp, Homo sapiens
gtggaccacttgagcccaggagttggagaccagacttagcaacgtggcaagaccctgtctctacaaaaaatacaaaaaaaatcagccaggcttggtggcaagtgcctgtagtcctgctacttggggggctgaggtgggaggatcgcttgagcccaggaggtcgaggctgcagtgagccgagattgtgccactgcactgcagcctggggaacagagtgagaggctttgtctcagaaaaaaaaaaatagagatggtcatttttattttctggtgcttaagagggcattagggcattcatgtctgtagctccgggtgctggagcacaagggtgctcttctcttacctagttttcctttaaaaggtcttggatgactgggtgagcctgtagtcccagcactttgggaggccaaggtgggcagatcacctgaggttgggagttcaagatgagcctgaccaacatggtgaaaccccttctctactaaaaatacaaaaaattatccgggtgtggtggctcatgcctgtagtcccagctactcgggagcctgaggcaggagaatcacttgaacctgggaggtggagcttgctgtgagccgagatcgcaccaccgcactccagcctgggcgacagacggagactccgtctcaaaaaaggaaaaaaaaaaaaaaaaagaagaaagaaaaaagtcttgggaagcaagaaggaaagtgcaagtcaccttctgttcatttcgcagatggacaaactgaggcccagctccatctaaaacaagcctgaaatcctaggaggaggatggtggagtcccgccagggagctttgtcaagtgcctctgtcatctccacttcctggatcagttacatcataccctccagggaagtgtcccgggggatggccagatcagcctgtcctttgtggcaggaggtggggattctgacggttgttttcacagctcgggaggacaggcagctctcacctctgtttgccctccctggccagtgcagccagctcctgagtctcgtggttaactaaggtctcagacctcaggctgaaactgctaccctgctgtgtgaccttggggtggtggtcacctaagttcccttagcctcagtttcctgcctggagagatgggaacgatgatagctactaggtattgtgagtcttatagataatggcagcctagggccaggcaccgagtaaggactcaaagaatagcagctgctattttaaaatttaatttaattaatttatttttttgagatggagtcttactctgttgcccaggctggagtacagtggcgcgatcttggctcactgcagcctccgcctcccaggttcaagcgattctcctgcttcagcctcccaagtagctgggattacaggtgcataccaccatacctggctaatttttgtattttaagtagagattaagagattaagtttcaccatgttggccaggatgatttcgaactcctgacctcaggtgatccgcccacctcagcccccaaagtgctgggattacaggcgtgagccaccgcacccggccccaaacgtcttgatgtgtctttctctgtcacatgcactgcacctgctgcagcaggaaggccaggtggccttaccttcaaaatacccagaatgtgaccacttctcaccaaggtctgctgccgccaccctgcttcaagcccctgagtcctgtgcctggacccttgcaggagttccgcactggggtccctggcagctgattccccacacagcagctggagggatcctattctgctggagtcaggtcacattgctgctctgctcaagagcctcccatggctcccgtcttacttggaataaaagctgaagtcctgacggtgcttcagcctccaaggctctgcgtgatgtggctccattctctttctgtcctcttcctcgccgactgtcccctccattcattctactgcagccacactggcctctctgctgttcctgctgcactcggggcaccctcctgcctcagggcctttgcacctgacctttcctgcctgtctccgtcttcccctagatatcagggtgtctcacccccttacctcctgtaaatatttacttacatgtcaccttcacagagaggacttccctggtccctctattgaaaaccacacagcctgtttttgtttttttttggtagcacttgccattatcttacccgccatttccctggttagtgcctgttccccaactccagctgcaccccactagactgtgagctccaggagggcagggtt

SEQ ID NO: 58948 - DNA, 4300 bp, Homo sapiens
tgctcaataaacatcggttaattcattaccaagtgaaatgaacaaaatatctgagaagcataagaagaagaagaggaaaaatgctaaatgatcacccgtgctgtgcaggcatggggctggggagcatcgcagtagctctgacagtgggctcttgtaatgatcgtgactgaggagctctgggagaccttgctcaaagtgcatacagtgtctgcgggtggtggctcatgcttgtaatcccagcactttgggaggcctaggcaggcggatcacctgaggtcaggagtttgagacctgcctggccaacatgatgaaaattcttttctactaaaaatacaaaaattacctgggcgtggtgccatatgcctgtaatcccagctactcaaaaggctgaggcaggagaattgcttgaacctaggaggtggaggctgcagtgagccaaggtcacaccactgcactccagcctcggtgacagagtgagactccaactcaaaaaaacaaaaaacacacacaaaaaagtgcattcgggcatatggcccctctcttccggagggagggccctctgagatctttctgttagccccttatacctgctctaagccagtatgtgtttccaccgcttgcccagctttcttactacccagttttcacgcattcatcattctaaatgcaaaagcaccccaaatgttctaaagactcagtgcttgataaggcccctggaacgttttttgccttctgcccttccttttgcaggactggtgtttctgcacaccctccactttctccagcccctgtgcaagtaaggctccaccccagaccccctactcaaggacagtggttctcaaagtggggcgattttgcaacccgggtgtgggcattggccaatgtctggagacattttggggtgtcaagcctgggatagagggtgctattagcatctggtgggtggaggccagggcggctgctatgcacaggactggaagatgtaacgtgatctcctgcagtgcacatgactgccgctcacaccaaagaatgatctggccccaaatgtcagtagtgctgaggttggggaatatggggtgagtccacctccaggtggggcacttgtcatcagataccggttgagtcatgagtcctgggtctggggggctgggaggtcagtcaattaccagaatgcagaagtctgaaaaacatctcaaaagaccaatctaaggttctataatagcaatgtttctataggagtaattggggaagtcacaaatcttgtgacctctggtcatatgactctctctctttttttttttttttttgagacagagtctcaccctgttgcccaggctagagtacagtggtgcgatcacagatcaccacagcctcgaactcctgagctcaagggatcctcctgcctcagcctcctgagtatctgggactacagctgtgccaccacacccagctcatgtttttttctgttagtagagatggggtctcagtatggtgcccaggctggctttgaactcctgggctcaaggaatcctcccacctcagcctcccaaagtcctaaagttatagtcgtgagccaccactctcagccctcacatgactgttaaacagtaagggattacagagattgcacttagattgtagcagaattcaagcccctttcataatctcaatttcatgatcttttattagttttacaaaagtgatttcagtccctgagcaaggagggggttagctttgttttttttgttcttttttttttttttgggacagagtcttactctgttgcccaggctggagtgcagtggcatgatcatggctcactgtagccttcaccttgtgggctcaagtgagcctcccaccttagcctccttaagagttgggactacaggtgtgcatcatgcctggctaatttttattttttgtagagacagggtctcactatgttgcccaggctggtcttgaactcctggcccaagcgatccttccacctcagcctcccaaagtgctgggattacaggtgtgaaccaccgtgactgactttgcttcaaagttaaactataaattaaattaaattctcatggtgggccaggcatggtggctcacacctgtaatctcagcattttgggaggccaaggtgggaggattgcttgaggccaggagttcgagaccagcctgggcaacatagggagactctgtctctaaaaaataaaaataaaaatgaaattggtgggcacgcacctgtagtcccagctactctggaggctgaggtgggaggattgtttgagcccaggagattgaggctgcagtgagctgtgatcttgccactgcactccagcctgggtgacagagtgagaccctgtctcaaagaaaaaagaattcctcccatggttggcttggcctatacctgggaatgaggatggccagcccatgaggctagaagcaggctggagtccgcagccagtgaggctagaagcaggctggagtccgcagccagtgaggctagaagcaggctggagtccgccgggctgaacttctcactgtcatattctttgcaaaggcagtttcggcctctgtgaattctttcagctcagacgctgtggctgtgaatttctatctgttgggacaagagcatccaggttggatgtggggtccctggaagattggtcccatggcctatttgctgggcaagctggagcaagttacttaacctttctgtgcttcagcttctcccttgatcactgattcctttccttttcaagggcaagaggacagagggaaagttcctctgtataaaggtctcaaaggtaaacacttacaaggggtcaatcaaggggcggttaggtgttggggctgcagtagggagaggttaggacagcgagacacatagagccatgtccctttacagaggacagtgtgccccagctccagccagggggaatgtgacctcccagtgtgagaccctctctggtctccagtgctccagtgatttgtcatcttggccagggttgatgagtctgagaacttaggtaagatgctctgttgtattgggtgttgggagacctgcacccgaattccggcacagttattactcactagctggggctgcctgagcctcagctcttttgccatttaggggaactaagccttcggccttgggaagcatatgacgaagagtccagggttaaatctgcaaattgggaaaggaaaggctaatctcaggcgtcagaggcttcgtccctcttctccacgcaattcccttgccctgggaacaggaaggtcagccaggggtgaggatggtgtaatgaagcttaatgaataacccaggggactggccggggtgggtgttttgcggcccaaggtgtcagggacaggggctggctgacgaacatggctctggtggggacaggtcagtgacctggcccacctctccagcctcatctgctctccaatgcagccacgtggcttccccagcccatcctctttgtcacccaagccaggagctctggagcctcgtccctctgggtctgagccctgactctgctactgctgtgtgaccttgggaaagcgacttggcctctctggccctatttccacaatgtagggtttattataatacttacttttccaggtagttgttagcattctgtaatataatgacatcatggtactttgaacgcttacgtgccacctttgcaacttttgccatattgtcccatcacctcttttatattagcaatacaaaacaatagcagctgggcgccgtggctcatgcctataatcccaccactctgggaggccaaggcaggcagatcacttgaggtcaggagtttgagagcagcctggccaacatggtgaaaccctgtctctactaaaaatacaaaaatcagccaggcgtggtggtgcaagcctgtaatcccagctacttaggaggctgaggcaggagaatcccttgaacccgtgaggcagagtttgcagtgagccaagatcgcgccattgcactccagcctgggcgacagagtgaatggtgagactctgtctcaaaaaacaaaacaaaataaagcaaaagcaacagcagcgaacacagagcactaactactgtcctaatattttcctgcattaatgcatttgatcctcacatccactgtactagggaagtagtgttttatccccatcttacatttgagggaacaaggcacagagaggttaagtgacttacaaaaggtcacagggtcacacagtgagaaagtggcagaacaagtatttgtatcagagcctggctgcaggtctgtgttttaactac

SEQ ID NO: 58949 - DNA, 3403 bp, Homo sapiens
tgtatacacatatatatatacctacatacatacacacatctttcctaatgcacacagaaatagattgccaactattaaaaaacctttgggggctgggcgcagtggctgttgcctgtaatccgagcattttgggaggctaaggtaggaggattgcttgaggtcaggagttcaagatcagcctgggcagcacagtgagacctcgtttgtaaaacaaacaaacaaacaaacaaacaaacaaataaacagtgtgggttacgctggacagcatgcacgtgttggtgtacagtagacatgcactaaatgcagctagtctgcttcttgtcaaagtctgagctgtgtgctgagtctctgcctacttcaagaagccctccctgatcttgccccatccccagctaccctatggggactttctgccctctgtcatcttaggaagtgttattgttgctaccgaattgggtgtcttcctctcccctccatgctgggggccacttcaaggcacaaactggattttatcacctctgtgtccccagtacccagtccaggacaaggcacccaacaaggatggatgtgtgtctaaagcgaggatgggtagaaacttgccagagtccacattaaggatcacggccaagcagctccatctaaccccaagtggctgggagttaatcatcaaacctggggagatcagaaacagcccaagaaggacacacaacatctgtgatgccaggtcttcctgttcccactttccacatagggaaactgaggcccagagatgggcacgagctgctcaggttcacccagtgagatggtgcagagacaagacatgaatttgaccatgtcattccccccacctaaagccttctgtggctccctagtgcccctgggtaaggtccaaactctggattggtacaggcatccctgtggactctgatctctgcccacatctccagcctcaaccccacttgcttccccacccctgccttctccctcccagccccactggatactaccctgaccctggaatatatcatgtttttcatttccagacctttgcactccctgtgcctgactcctggctccactcagacttcccctcctccaggaagcctccccagccccccagggccaggcggggtgcctgctctgggttccacagccctgccccaccctgccagctgctaacatctgatagcactaataagtgctctctaatggccctctctaagggctttgtgaaggcagaggacatgctattttgtttgaggccaaagttccagggattggcacatagtaggtgtccaataaacatttaatgaatgaatgaatggtcagtcattcatctgagtagcaaataattgcttgggttctcatgctgcgtgtaaaatatccgagacggagaggtgcttcagacaaaaatatacctttcccatgtcacaaataataattataataattgtttccttggccaggtgcagtggctcacgcctgtaatcccagcactttgggaggcagaggcaagcagatcacctgaggacaggagttcgagactggcctggccaacatggtcaaaccctgtccctactaaaaatacaaaaattagctggcgtggtggtgggtgcctgtaaacctggctacttgggaggctgaagtgggagaatcgcttgaatccaggaggcggaggtaacagtgagccgagatcgcaccattgcactccagcctgggggacaagaatgaaactgtgtctcaaaaaaaaaaagttcccttgtccttgttttcccatcccagacctaagctgaccccaacagtggttcagcatccgggacaatcactagacctaaaatgagaagacatggagatgcctgcatcccggaagagatggcccagggccaggggtaaaggctgtctctgccccttgctgtctgggaagctttggccaaataagttcccttttctgagtttcagtttgctcatctgtcaaatgagacagggtggtgcatgagtcataggcagtgcccgggaaagcggtgagggttgctctcatcccctctcctcctccgtcttcacccggaggcttagggtctggagctttctctttaacaaaggaggagggaccaaggttgccggaagctgcctgaagctggacagagccggttcctggaaagagctggttccctggcaggctggagggcaggagctggggccacgctggtctgggatagttgggcagggaggtaaggggtctggggccagctggggcccctggggctcagtgtgtgtgtgaatgagaggctgatgagaggctgcaggagtttgggaggctttgggcaaagtccaagctgagcaggtgggagtgagagggcctgagcgtgttctaggccctcctgggaatgtcgattgaattcagggtgccctgcagaagaaagtgttgtgctggggaccctgaagggcgagagtgggttctgcctgccagaggggcagggttgggcattctgccagccaaggggccagcccgaggtgtcccagccctggcaccagggatttggctgtggagtgccaccaaggtggcctctggggaaaggctttggggacaagtgaggtggacagcactggtggtccttacctcaactcatagatgtgacaggtaaggcccagtgacaaaagtgacttggccaaggttggcatgactgggacctgagcctgagccccctgctttcccctgggttattccacagcagggagacccaggtcccccatttcagccctggtggctgccatacgggacaagaggtgtgtgtccctgggccaagacagctcagtcccagacctcaggtgcctgatggggtctggggttgataaggctgttggcaacttggggctttttcatttaactgatgcctgctgtcctcttgtgagtcagtataaccaagagggctggggaagcctggaaactgagccaggagcatttggttccaaaggacaattggcaataaatattaaatgcatgcagctttcataatagtaacgataacactagtatattagagaaagtatagcatcgcggttaatagcacagatgccaaagacactgcctggtgtgaattctggctatgctgtttctaactgtgtgaacttggataagttacttaatctctctggacctcaggttcactgtttataaaatggagtcaatggtgagttaatgactcatctgttgtgagccaacaggtggctcacacctgttatcctagtgttttgagaggcagagacaagagatttacctgaggccaggagttcaagaccagcctggacaactcagcaaaactgcatctctataaaaattaaaatatcagccggatacagtggtgcatgtctacagttccagctactcaggaagctgaggtgggag

SEQ ID NO: 58950 - DNA, 948 bp, Homo sapiens
tatctcttggtgtctctcactatctctctaggtctcttactgtctttgggtctctctctgggtctctcactatctctctgtatctacctctgggcctctctcagggtctcattgtctctctggatctctcactggctctctgtatctctctctctctctctgggtctcactgtctctctgtctctttctgggtctctcactgtctctgggtctctcgctatctctctctgggcctctctatatctctctctgggtctcactgtctctctgtctctgactccaggcctacgactcagccccagggacagcatgtggaagcgagagacagggagagagacaaggcgtccccgagtcgctgagtcccagccggagagtgaggaggcgccctcgggccccgccgccccacccggcccccgcggccgcccccagcatgtttgtccagggcaggccgcattgatccgccgcggccgtgccaccgtctggtaaatcccggccgcggtaatgaacctccccgcacaccgctcacaaagcacacactagccctggccccagcggttaatatttaactgaataagggccataaatatggaaaatgggacttttaattaaataagcagcttttaaaagggcccttgggcgggagaggcttttgtttaaatatgattgatttgacatgtcctttagctctcacactctctcgagctcccttccgacgttaactcttggcccccggccccggtagcaagttggctaggccagaccctgttctgctggagggagggggctccctgctggaggaagcggggtacggtgggaaggaggtgccctgggaactgggattgaaaatccggctgcccgggcctctcgcatttggcttcacccccattacaagctgcctccatttcgcagaatgcgtatttcaccctaaaagaaggggctagtgggcta

SEQ ID NO: 58951 - DNA, 861 bp, Homo sapiens
atttttgtagaaattggggtcttgctcgttgcccaggctggtcttgaactcttggcctcaagccatcctcctacctttcacttttgagtagctggaactatagttgtgcactgccatgccaagctaattaattttttttgttttttttttttttgagagacaggattttgctgcattgccctggctaatcttgaactggcctcaagggaacctccccccaaggcctcccaaagtgctgggattaaaggcatgagccactgcacccggtcgcaggtgtgttttcttgagccaaaggcctccacttgccctgtccctccctactccttccccaagcactggtccatccaggcctccctccgctccctccaggccacatccatgctgtgggcaatgtgacgcccatcaggcccagtaaacaccggaaatcagtgaagcagggagcaaaggtcggggtgaggccaactctttttggtgtcaaaggagattacgagtccggctctcaaagttgagggctggggccaaaatcagcctgtgatcccaagtgggatgagttcagaggtcgccagctggttcctttgtgtgtcaatattaacatgagagtcacctaattggggtgggtcagccagtggccagagccaggacacacatcaggagaagagaaagggcccgatcatgccccaggcagtgttgggtgcttggcataagccagctcattcattatattaatattactactaataatactaatataggagtagtagaagaatatcagtggccacatacattgagtatctattaagttcaggcttggtggctggcacttaattcattaactggcctcatcgttccaacctctctaag

SEQ ID NO: 58952 - DNA, 1846 bp, Homo sapiens
atgataagagaatcaactacacttgaaacacaacaaagctgaatttgggagggaaaggaagtgcagctacgctaaaaatcctcatcccacaaagcgaggcatcaagagacactgtctaacctgatggaaggagcagtaatccatttaaaaacaaaaaaacaaaacagaacaaaaaacagcgagagagagaaaaaaggatgatccattcgagcccaccgcatctaatcatctaatattacgtacattcacctattttgcctaccacgtgtcgggttctgcgctgggctccagggaaacaaaaaagtatggctgggtcaccactccccacttactggataaatgctgtaaagccctttacccactccgtattcctacttgccctaaggatgggagtgggaattggaacgcaggtccgcagattaatattccccatgtcttccccaacagtttccagactgggagaggaatataaatacagtgtcggaccatgtcccgggtcaacaactaaaaaacagtgatcgaatgaaagaggttgtgggagcagggtattcgccacaaggtgggagttgtcatctccccgagaagaggtgtgttaggagtcaggtaccaaacaaccggccgtgaaaccgtaagcagtcactattcctctttcctcgggatcaaatggggataagcccaggatcccgccccctttgagttcagaattggcccggagtcctgccccagagcaaaaattcttcgatcacctccaggcatctcttccctacctcacagctcccggctggtctcatttcagattcccaagtcctgcctctgcactcaccccattcgggagattcttcacgatcagtcgcgacatggcgcagggtccccgctgttttgattccaacacgactggtcagcgtcttccaccaagtttcacgctaccgccctgggcgccgccatctttaccgagccggaacacagtcacgtggctgagaccttggcctgacctgtccggaagtaggcgtggctaatccaaaactactcagggaggtcacaccccacaaggggtgggcctgggcgcttgcattttgcgcaggcgcagggccttgggcggattctgtgagacgccaatgcagcggagaaggcggcagggggcgccggtccctaacatgcgccggtttagctcggtgttaagggtcgcgccaaccgggcaatcgcgttctctcctttttcttattttatttttattattgagccttaggactcccctgagaacgggggcaagattagggacccttgccttcctcgtagaaatggggaaagtgaagtttagagagattgccagccaacacaaatcaagtattgagccttttgtgtaaatacttggaatgaacatgttggaaataaacgctctcattttgcaggcagataaactgggaatcgtgcgtgtaaagcagcttgctcaaagtcttataactatgaattggaaagtcagattcgagctagggactgcctagggccctacaatgagtctctacgccttcaaccccagccccacaagcattttgcctcccttcctaatgtttggaactctcagctggccaatcttctagctgagagatcttggccaaaatggcctctgagcctttgtgtctacttctataaaatgggaataattctttattatgctaggggttaaggaggtgagaacgtgaaagggatgttattttcctattgcttctctgagcattctcggtacctactcttggatggagacatcctatgaaaacccctattttcactcttaaatgacggtatttcctttctgtttccccacagtgcctcagctgcactggacgtt

SEQ ID NO: 58953 - DNA, 651 bp, Homo sapiens
aaagaaagctatacccccatctcatgtcagggccctttgattattcctacaataagatggaactatctggtggaagggcttccaaccagcaagactcacagggtctgagatctaagactgcaattatgatgtaacctctgggtccaacttggaatgggtcttggaaagttggttgaatgaaatgttgcattatcattgctcaactctgcctactctggccacaggcaatagccttgcccgtaactcccattatctgagcaaccacattttgtgccatggaatgccaacctcatgacctctgttgattaaacctggcggaggcccatgcacatgtctgagagtctgttatgtcccaggtgaggtcacccaagtttgtagtctgggccttggggtaaggcttctaaaactttcttctcacctctgccttagagatctacttctcttacttctcaacatttgtctgtgccgtttcctttgcatagaacacatttcctcccctttatgtggcgacctccccacaacacattggggtggcaatgactgtagcactgaaaaaactgagatccaatcccagtccagcctcttactctgggacttgggcaaattatataacctcactgagactcagtttattcatccttgataggttat

SEQ ID NO: 58954 - DNA, 1555 bp, Homo sapiens
agggcccctttcaggtgccctggctaagagggcagggaccagaatgaggctttgcatgggccaataagatggtgaaaatatctcggtaatcaagacaaataatattttaatgcagtatatttaaaacgccaaaaatgaatacaaaaagaatcccacgatgaacaaaacgtaaaaattttacattaagaaaaaatcaataaccaggatagcgccctcttacctgcagcccacgatgttactaaataaaatgagatttaattctgctcccttagccttattccttttgaatttcctgtaagggccacattcacaaatttccacctcccctccctgggcgtccccttccccacagaggtgagctggggtgagaagcacagaagctgttgggaaggcgaaggccagcggaagagaactcgtgcgggacttttcaatttttcatcttgtttctaactccatctagcccgtcctccttaatcaataaaacaagaattaggtctcagatccaagagtcgctttctgtcttccagtttatgactttggccacctcgcagtcttttagggtcgccggaccggcttcctggaatacctgaggtcgcagattcaggtagtaaacagatgtggggtccaccctccgccaaatgggcggggcaagttcaacatcccgcctccccgaccttaagtgcgcagggcgcctggtgctcgcttgccgaaaacgttaaacatttttctttgatcccgctctttttttggggggaaaaatgtctggggaagagggaagtagtgggggagtgaggtgcctgcccaagcgaaattttgatgcccgcctgcctctggctccagctccgccctcacggaagggggagaacttcgaattccagaaccggaatccttgcctaatttttttttttttttttttttgaaattgatcgattttatccgggagcttcaaatcgaaaccaggagagaggctttgaaatgtcaaagaaaagctacgaaagaaaaaaggggtggggtgaggaggaggaggaggaaggggagggagattaaaaaaataataataaggcggggaggcaggcagaggttttctttcgaagtgtaatcgcggcgctgcgtacctttgtaagggtccttaaccttttcacccttttggtggtggcggtggtgggctcctcgtagctctttgaaaatctaatgggagctatggaccgtctgcctggaaaaatgccctttaggtacatgcttggcgggagccgggagtgaaaccgttttttgcgcaacttgggaaagtttttgcaatattctctgctcagccatttgagttggaatggaaccgttcccaattttaatttttgaagagacagttttgcctggagtaatctaaacccattttggcggggaggggagggcgaggggaatttcaaaatttatgccttcttcaccttctggagaaggcaagatccggcaggcgacgctgattagctgggggtctccgatgcgaccccggactcggagcaggaaatcctgggtgctcctgaagctccgcctgccccgggtt

SEQ ID NO: 58955 - DNA, 915 bp, Homo sapiens
tctcctgtttcagcctcccgagtagctgggactacaggtgtgtgccacctcgcccagctaatttttgtatttttagtagagacatggtttcaccatgttggccaggctggtctcaagcttctgagctcaagtgatccacccgccacggcctcccaaagtgctgggattacagacatgagccactgtgcccagtctatttaggttatttccattctgcacattttaagtcacttatgaatagggtgactcctttacgcagtggtttctttatgctgtgtctgagtgattcctgaagcttgaactgagtggcagggacacagtgtggatatttacattgagcaaatgaagactttggactctggccccgcacagagctcctcactgtcagcctggaagtttgttttttttttttttcccacactctgagctcattcccattgtgaaaatgagaagtcatcaagaggtcacaagatgacatgagatgataatacctgtaggggaatgttgacttctaaagaaaagagaagggatcattatttaccgataacctaccatttcatggcatttcccagcacagtgtatgtagcacaactccagttcaatgccccctgatatttaatataataaagagtctcatggcccccagaggttacatcacacaggaagaagacaaacatgagcataaacaggaagattttatacttctcactgaatctctctcaccgtttccctcttgtctgccaggtaccaggtgccagaaaatctcccacctcccttgtcccagtaaaaggataaagcattcagtggcccctggtagctctttttcaggttctcacagatctcaaacaccctatcccttcccttccaccagaggacttgacgccccacccaaagcacactccgacccacttccca

SEQ ID NO: 58956 - DNA, 2523 bp, Homo sapiens
tagggactgctgctcccgcgagtcatggcctttgtccttgtagacgcggccaggttaaaaaacaaaaacttccaaagttgtggagtaaaaaagagagcatcctggtactggcaagttgtccccagggcagaatttgaggtgtgtatgttggggaaggaggtatcctttctctatcgacccatcgcgaattcaggttatcccccgccaggcggggtccagaacaagggtctagagatttctacaagcagcaaggaacttgtccagagaattacgagccagggttcccgcactgaattttctaacattctttggaaacccagaggagggcagggctgtttttctcatctgaggcacaaacgggagtgaaagtgatatccaggaaagaggggaaggcagcttcttccgaggctgagaatggggctggggacggaggaggaggggagtggggctgggagtggtggggatgagaaggggcgaaggcgaagcgcccaagttccggaacccgggaggcgctggggtgccgagccagctgcggcgacctggacgcattcgtagacgagacagataggtggcactcgaagcccagaaaaaaggcgaaggcgcctgccctgagtggcctctggggcggccgcagccaccataaagcctgcggcgagattgcgaccggcgccaggtgagtaataggcagcaaaatccagagagactgcgagccgttcatcccctccaccccccgcccatcagcgctacaggagttactcattaacatcacaatatacaaatgagatacacaggagattaaaaaaaaaaaaaaaaaaaaaagaggaacgccagtaagagaggctggacacaagtctgagcagggtccccaaatcgggggcggggggagagaagggaggaggtaagcaaatttggactgagaaagaagagaaaagcaaagcatttcttcccttttggaggctgagttcttttttccccaattcgggagagcgcaaccagccaactaccaccttctcagaggcgcggacaccgcgcgttgtcgctggatccagagctgcccccttcaggctgtagccgctgcgcagaaggagcgcgccctggaaatctcccagtcctcgggggagccccagcctcaaaggtccccagggcccgtctcagctcaggccctgccacccccgcagcgcaccccgcccctccccccccccgcgactccgcaccaacatactctggttgtctgtcttccctcccacccccggagacatcgcagaggaggctgtaggggtccccacgtgcctggccagagatggaaggggctttgccccgctctccaaaaggtctcgacctcgatcccttccaagtacaggatgagggaagggagggggcgtcctcctctccggtcattcaagaggcctgaaggtgacagggacttggggccgggctggcgggctccagggggtggcgggtggggggtggggagggaggcagccgccaggcaggctccagctgggtcttcacgtcatggcccccagggcaagaaaagggctaaggactaaccctcgaaccttcccgtgccgcccccgccccccaacagacacacacctcggaggcgaggctgggggtcgggagaccaaaagactgacagtgcctcatcattttttattgaatgtttcaaagataaattgaacttcaaaaggcaactccccgaacagcctggagacgggtttgaaggggagactaggggaggatgtcagcctcctgggtgacttttgccgtggagggggtgaaatgtgcaccctggaattacctttcccctttcggggataatttccctcctccctcgcgtgacacagctaagttttcgcggagctggccgcgctttgcacgcacaactcgggatggatggggcctcgtaggggcgccttgggccagccgggttcaatttgaggcaccagggactgcaggctgtgtggggggttgccgagtggaaaggcgttgcgtcttgtccacttctacaacctggagggttgctgcctagccaagcccgctcggactgctggggcattctgctggccttttccccgagccaaacacactggtgcaagaaggtattttcgacttggattcgccagattgatgtcaaaactgagggcgagcttaaaacgaaaaacattcgtacttgccgagcttacttttggtcggattcgggtgggaaaacctgacttagggagcacatcagtctttttccattaaaacttaaaagtatctgaaattacccttctttctgtattctcatcaggcccctttccgtctccctgctttgctccctaatttaaaggaaaagtaatttcagattgaagtggctcccttcgctcaagtaagggacttttgtttttagctttgtaacttgagtgacatctcattttggttcgctgggggcggtcttaattatttaaaggcgaagggaagggggtaaactcagaacaagaagatactaaaccctcccctgactgtccatcttcaggaaag

SEQ ID NO: 58957 - DNA, 4446 bp, Homo sapiens
atgtatcacataatattgaaaccaagtctaagactttatattgtgactgataagcttacatgtttcagagtgaggcaactggttgcaaaatcgttttcttccacaactaacgtattaaatattctcagtttcgccatatttagacgtcccaaggttcaaaacaaatgcattgtggcactgcaattctctacattgtctaacaatttcttcaatattttttttgtccttgcttgactttacagattgccctcctgagagcaaattcttgcccatgtctttttctgtgggtatctagatctaaacaggttggggtaagatttttgtaaagcgcggtcagttaagactagaattttccaccacccattgatgagaaaatgttaaacttatcaaggaaatgaacgtcaagttgcacccctccctgctgcagaatagcaatcccgctgtgggcgaagtgaaactggacttcagtgagttcccagaacgaattttgcagacttcggtgcactcctgggcctgataaccgatctgcccgtggagctgctaacacattcccccacttcttaggccagtccaaaaccgcaagactgtgccaccacattgctgttaatttcacagaagggttggcattctgtagtcttgacttaaaaggaagcaaggaagcactttgctggaaaactgactaaatgtcttgtgagtttgaggaggattttatgccaaactttggcctcatttagcttggaaggagacagaacgcttaagatatcatgaaggggattttatttttgtatcaactttatgcctttacaggcttcaatgctattacaaaaaaaaaatcagtgattttaaatgactattacaggatcttctcttccaggcaggttttggtcaggcaaggacctttaaacattatgtaaaatatggttgataatattcacacattaaaaaaaaggtgtgtgtctcctcactggctccttaagtctgcaaacataatcttaaattatgcaaaattgcctgctgaactcgcccttgggttacagacacgtgaagtagtgtgggcaaacaaaccaaaatgcccttcgatttctctctgaccagggcagcagcaggcccctttagacccagaggctagactggagggcagaaagggccggggaatggtgtcaggcctcccaatacccacacaaaaggaaagggctttaagtttttctctctgagaacaaaataaaacagacaacacaacatcaacaaagaaataaggatgttccaggagggtttgaagagtgagtttcttgcagtagagtgccttttttttttttctttcctgctccctgcagggatgtctgtgctccactgaaaaattctgtctgttcgggagggaacccaggatgcagaccaaatgcaagacccatgcagatgcccaggtaagctgaaatttcctgccaccggggcagggcctggaagtctgtgcatacatttctaggggaactaacttttcgtccaagccgtaataaccgaccaaccgactgttctgggagcagagaaataaagggaggaaaaaactctccaacagcttaggggaggaggcccccactgcttaccttcccgacttggtaatgaccatctcggtgccccgcttgtgaaactgatcccaaagttctttagcctccaggtgcaccttggggtcgtcctccacctcttcttcgggctccatggtcttcaaaggcctcagatgcgcctggggccccagggaggagaacgggatgccggtctcggccgcccccaccaattgatccatgatcggcttggccagggcgcccggcagcgagagcgccgccgcgccgttgggaggcagcgtcagcgcggggaagaacggcggctggtgacccagcaccgcgctcatggcgaagtccggcgcccggtgaggtaggaacggatggtaggccatgcttgtcccaggaatgaccggatctctcatggagaggctcatccactccaggcggggcgctgggctccagccggggacaagtccgcagctgctgtgttttgttgtttttttgttgttgtttaacagcagcacataattcaaaaggggggaaaaagcaaaacaaaaaagaaagaaaaaagaaaaggaggcagaaatcacaactaatgcacttcaaagggaggaggggaagtgtcttttggagaatgggaggccgcttttaaagagggcaaggcgaaaaatcagcaaacatagtcgcgcgggtgaccgtccttgtgccttgcgtttttaaaaagccgctcctgaacgtcggtttcagaagcgagaggagcgagcagggtctcgactcgcgcccgagccctgccgctgagctcgaaatagacactccagccctgcgtcccaggaatctctctccagcccctaggtcttttgttgcaaatgtgaaaggttctcctagaagactttttacctttctttttcttcttcccccgccccctatctgtcttcctctccctctttctcgctggtggcgtctgcagctgtgctagacccggctttaacagggagcgagagagcggaaaaagtctctctcctttaaaaaaaaaaaaatctgatttaaacccccttctaccagcgctatcaaaacttgaattgcaaactggcttccgttcgccgccctcctcctccttcctctgctccgagcctccggagggtgtctcggtttcaatccaaatcttgctgggctcttctcccgtgcctctctctcttccttgtcctaaaacgtgagcgaattcgcttcctaaatctgtgtccaggcgcgcagggcagggaggatttagagggggaaaaaatggaacagagggaaagagagggaggggagagagagagagagagagagagacggagtcggagagggagggagcgagagaaagcgagagctcctcgccaccctccgccgcctctagaattcaccgggcgtctgctcggcggctctagaaggtcgggctgcgctgtgggctgcggggagccggaggcctcttgattggctctttgacgctttcggaccaattgtgttgctgcataggcgtggttttcacaggtcgagtgctgggggatagagctgagttataaaaagaaggtgtcggaaactgtaacgtcgcagcgccgcatcggtactactgcctgtcctgtgaatatgtcaacatgatcagagggcgggcgggagccactggggagcgcgcgcgcacagagtcgcctctaggtggcttatcgagagatcgctgcagcccctgagctcgctcgctcgctctggttcagcccacgtctgaaatgcctcagtcatccagccggggatcgagggaggaggcagggccaaggaggaagggggagggagagagggagggagccagcgagcaggcgagccgggcggggaaggcggagagcgcgcccgggcgccgggcaggggcgctcgcctctcttgcactccgctcgcctctccgaccgccgcggccggttctctctccagctctccttcttctccccgccccgggcgagccgggcgggtggccgagcctccccgcgagctgccatccggccactcggttctacaaaagccggcggcagccgagaagcgagcgccgagactccaggcttgcgtgctctccagccccacgtggagccaagctccgcccggccgccgctgaagggctcccgagctcgggtgtctcggtgctggtctcccctgcgtctgggctgggggagcacaaggatgcggccatatctcagcacacgcatgtgtgggcttcctctccactgcgccccacccgcagccatgtgcgggtacccaaacacccccggtgtatctgtactcgaacacgcgccaacacactgggactgaaacacacaccgaaaaacacgtacacacaaacacgtacacagcctgcgcggctggccctgcctgagctcctggggaagatggatttgggatttttatgaaatgcatttaccagcccttttggatctcgtctttcatttgcatgcgggcccccatattccacctggatgtgggtgtgggtgtagagaagagaatggaggatctggacaaagcgagcacagcgagagactgggttctgagcctgtcccctccaagccgctgccctcacctcgaggcccggctgggtgcacagcacagggtaaggggtgggcgattgggttgggggaggcgcgccagcctggtatcttctctaggcatcgcacttatctctcggtgcctcagttctttctccaccccggggacttaatctggccagaagtcggggagggagggtgaatttgtaaaacaaaccgtgaaacgcccccacctcagaggcgagttgactgtttttagtacgggtagggtgggggcctcctcttaggcggacgggagggaaacgaccggatcttaccaatcgccgaattaccaactc

SEQ ID NO: 58958 - DNA, 1514 bp, Homo sapiens
ttgttttctcttcctttcaaaaatttttttattttagaggaaggggaatgaggaaggcgcacgcgcgcgctcacacacacacacacacacacacacacacgcagaaagagagaaaatgtttggaattgtgaaagtgcctttcctagtagttgcttttactggcgcccgggcctcaattcatttcatctctgaaccagatactaaaaatcctccaggcgagtggagaggaccggccttcctggatcgggaacctgccctctgtcttccctcgcagcgccctttcctcctttcgcttgggaaaggaagatttcgagccccaggaaggagttgggagtgagcgacagcccagagcgtcccataaggtccttttggccatgtttctgccccggggggcttcacctagatcccccaccccaccccttacccctgttgcaaatacgtaagctggacgcgcctcggtgcggatccaggcctcgctgagcacggaaccggagaagcagctcacggcctcggattctactctcacccaagggtggaagggggtgacagggctcggatcttgccccaaacgctgcacaggcccgcaggagagcaaagaggtctcggacaggctgtccttccccagctctcggtcgcgacaaggtcccgacaggcccgggaaccggcgaaccgcctgcaggtaaccctgcgctgggtacctgccttccctctccagctaccggggcggggcgcggcgcggcgcggcgcggcgcggcgggctgcccgggtgggggatgaagaaagcacggcggacccagggcagcgaagcgcaggtctttttccttttgagaactaagatcaagattgcagggattcagttagaagccgctcacctacctccacctcccaccctaccctgtccgatttgtcttttgctgccgcattgattgctaccttcccccctcccttcgcttgcaaaggacacatcgggagtggacggtaaagaccttgcggggagccgtggggggcggggaggagtaaccaaaaatgaaagagaaatgtaggactctctgtctcccaaagtggtggaaaagcaattgcaaggagatggctctcgggagaataacaggctcagagagaacgcagccgagcgggggaatcttcgtgcgcgaagccgggagggttgcggggagggagagttctcctctcccaccgctggggtgtgtttttacatgttttcttagcagcaagttttataaacaggtcaaccctacgctgccagcccagggagttggagcctgtctccggcttctagtgccgacacccctctttcccattcaccccttgcaagccaaacgcgcagagttgggagggaggggaaacttccttccacttctgatgtgggggggacatttgcttttgaaaggctttccttgtcttcagacggtaaaatacgagttctccacatgtctgagtctggtacctcaagcatggatggatggggaagtggggggcgctgctctaatgacctctgc

SEQ ID NO: 58959 - DNA, 662 bp, Homo sapiens
ccctctggtttccagcaggagaagcgcttcggaggagggggctaggggcgctcaacctcccgggttagaggaaatgcaagttgggccaatttcgcccttccagactccgaggcggataggcccagggggcagcggccttgcccggcggccactgccctcctcctcccccgcgccccctggctaggctttgaagagctcattttaagaacttttccattttccttttggaggcgtgtttgttcttctcagtcacctcgctttttttttttttatgagcttcagcgctgatctgcacgttcttccctccgtgtaatttcaatttgaactctccccagagcggccttttccctcttgttgcctgccaagtcgtttgaaggctaagcaaacattcttcctccctcccgtccgcgcgagtctcggtctacacccgcgaggggaggcggaggcggttactccgagagttccggtgggttggagcctttcagcagccgccttcagactgtttgggaggccgaaaagcgggaggggaggtgaaacaccggaataaatgcccctacgaccgctcttctcaagggttatggtgggcgtgtgtgtgcgtgtgtgtgtgtgtgtgtgtgtgtgtgtgtatacattccgtaacccacattagaagtcttgggaag

SEQ ID NO: 58960 - DNA, 1054 bp, Homo sapiens
accacatctggtctgagaagacaaatcttaattatgtgtgtatgcatgtgtctatatgaaaatggaaagcccagtgcggtggctcatgcttgtaatcccagaactttgggaagctgaggctagaagattgcttgaggctacgagttcaagaccagcctgggtgaatagtgtgaacttttctcaaaaaaaaaaaaaaatcaataaataaattttaaaaaattgaaaattgtagatgaaagagtgggaaaaaactaaagtggaactgggagaggaaaccacgcatggtgcaggagagagctggagacggactcagagccagcttggaatgagcagtggcaccaggagctccctccagcctgttcagaaatagtttccgggaactgtggtgctttccccgcccctgctctagggccagcggggagatgaagctgcccgcatcgcttgtcttggctgcctctcagctgacactgctgacaggctgctttgatctcaggttatcagggctaaccctgtgccctgggcctgctctgccagccccgcccacgctcccctctgctgaaagggcattcagtaaggccaccaactgttgggagggaggcccagtccgcgtgcctggttggccttggagcctgggtacttgatgtaatgaaggcaccatcttttattctcaaaacagtgaagaacaggggcccagctggggaaaacaagcttttgaagtgtagtcacacgaaatagtgccaccaaacatctatggaatgtcatatgtttatgtcctcatgctgtctggaccttcacccccaaaggatgagtagtgaaagaaagaaaacaggatgggcagccaggaagatttttttctttcctttttcccaacttttacacttctaaaaaaatcttttcttttttcctttttgtggagaacaggatctcgctatattgcccaggcaggtctcaaactcctgggctcaagctatcctcccgcctctgcctccctaacagctgggatgacaggcatgagccaccatgcctggccttctccgcaacttttattttggat

SEQ ID NO: 58961 - DNA, 670 bp, Homo sapiens
tgaatggtggacaaaggctggggctatttggggttgggaccatgagattttcttcagggtgcattggagggtgattttacaagctgtcctccgggtgaaggcctggcaagctggtaatgtgagggctaatgacagttctgatcaatcacagcttgcctttgcagcggcactttcatgtagaggatccccaggccttctgtagccactggctaaagccaggacctgccccacctctgccctaatagcactactcctttaatagacgacctttcatcccggcatcaggcagagcttaataatcatgatctctggcccctgctccaccccagcctgcagtttattggccacattattaaccttgataatttctgccctagaggaggaactgtggcaccaaaggagctaagggacttgccccggactctgccacaagctctggctcccagatcagcttcttctgatgcccagcctgctactctatcctgtagatgccctcctgggaggttgagaagtggcacgttcagggagatggactgtgcttttacacatacagcatgactgatgatttttttttttgagattgaaatagcttatttaattttttacccgttgattggttttattccttccaatagattttaaattcttttttaaaatttatttattaaag

SEQ ID NO: 58962 - DNA, 641 bp, Homo sapiens
acccaaatatccattcatccatcatttgcccatccatttctctaacataacaggtactcagctagacactgggcatgaaaagatgaatacatcaacagggacaggaaataacaagaaacaaacaccatattcaaagctgggaatttgcagagtttcacaaaggaactattaacaaaagtgtgggctgtgtttaggaacaggaatagcacaatactctgggactggaaacattaccagccctaggcctgaagaggtgagagcagggagcagtttttagaatctggagacagggtttggagaggtctcctgaccagctgtggcctttggtacagacacagtcaacctgtgatgacctggcagggagtggactcggggcatagatcccttgtcaacacagtcacccctttctctgatctcatgccagagtaagagaaaacattgaattaggccatacagggcagcctcctgagcacagaataggatgaagaagggtggagagtggatctagagagccaaacggaagacatccagcacaaccgcgtcagtgaaatcatatcactttccactcaaatctttctttctctctctttctttctttctctttctttctttttctttctctctttcttcctttctttctt

SEQ ID NO: 58963 - DNA, 2059 bp, Homo sapiens
gttcagatgcctacatttggttgtggttcagagtagttgcttgttgtaggcatcctctaagatggctctcaatgaccttgccttctggtgtccaggcccttgtataaatcctaccccccaacccccaatgccactgaagaagtctggcctgtataaccaataagacattgcaaaaataatgttgtgcaacttctgaggctggatcacaaaagacattgcaatgcccaccttgctctctcttgggtcacttgctcaggggaaaccagctgccatgtggtgaggattctctagcagccccatggagaagtccatgaagtgaacaactgaggtctccagccaacagccatgggagtgagctgtcttggcagtagatcctccagccccagtcaaactttcagatgagaccatagacctaggtgacgtttgtaactgcagccttatgagcagccctgaaacacaaccacccagctaagccactcctgaattggtgacccacaaaaatgagtttataaatgcttggttttgttttaagccactaagttttgaggtaacttgtcatggggccacagatcatgaatactatgctcagtgtaaatttcttgaatgaataaggaaactgatgcataaatcaatgaatgaataaaagaactgtttttcaggctaattatagttagctagaaattagctccatccaccatggactaagtgggtgacttcaggcaaatataatcttgctgccctgggtctcagtttcttcatctgtaaaatgggatgataacagcagtagccacctcagagagctgctgtaaagattcaggaagaaaagacaggcaaagacacttagcatagtgcttggcagggatcatactggattatttaacactcagcacaacccatgcataagcagtcagaatggtcaccacctggcttgatatcagccctggggtggggcacatgataaactctccagaattggtagctgtcatcataatcattgccaccaggctaaaggctaataaccttagtgcctgcagcaaggagctctcaacttagtgtgggaaagagacaagcaagcaaacatttacactagtgtgatgaagggcataggaatgtgcaaaatgatgatccattctgctacgggaggaaaatgcccatataatcacagagggcagaggtccagaggtctctggcctgagcctcaattccagctctcagacgcttttgagagttaacgtttgtttccactgtttcacccagtttgggaacaaataaattagttctgagcggaactaaaacctagctccaccactcgtctcctattgtgaccttgggcaagtcacttagcctctctgaatctgcttccccatttataaaaggggaaccattaaagttgttaactcctagcaagcacttaagacagtacgtggtgctatttttgacactggtaagtgctttataaatgtcatgtgggttactattgttaccacttttttattatttaaggtgctgaattagaccccttcttcctgaaagacactaaaagacactctgttctcatggaaaagatggctccatgagagatgaatcttagttttccttcccacacataccatacacagggccctcttgaacttcaaagagaagccccgccaggaagctcaactcgctgtaagtgtagcaggagaaatatgggagccggcttccagggccgctgagcagctgtttgatatcacaccagggtggccaagactttggggacgggcctgtttactcctcacagataacatctcaagtggactgtggggaaggatgggaaggacgctcagggtcagccttcacctttgtagttgtttaaatatcgattataactcatctgagactgacttatgctagggtgaggagcgagtgatgtgtttgaagatatcccatagatttgcttgaagacttcatttagaggatcttaaatctcttaacaaaaatgggtggatctcagccatcgtttttctggttaagaaagtgctcagcagcacttttgttaataagcttcatggttgaaaac

SEQ ID NO: 58964 - DNA, 724 bp, Homo sapiens
gtgtattgaatattccttgttctgagatggggttggaggttttgacttgccattcagccttgttgctttagctggctggaaacaattgctgcgcaaagtaatatgtgatgggagagcatcaattcttggcacctgtttgggtgctggagtaataaggctacggctgctgctgctaacaaaaaacagtaacagcaaacattcactagacctttatcatgtgcaaagccaaatatttacatgggctatgtcatcgaatcctcagatcaccctataaggtaactgctgttttagacccatttaacagttgaagacagtaaggttgagcaaagtcaggcattttgtcactaagtttcaacacttggtcatttgggaaactaaatccctccttcacaacccccacttttttttattgtagtaatggcatttaacataagacttccccttttatacaaattttaagggcacggtacagtattgttgactctaggcaccatgttgtacagcagatttctggaacttattcatgttgcataactgaaattttacacccgttgaatagcaattcccccttttcccctgctccctgtcactggcatccagcattctactctcatgaggcaccaagccagtcatgagggatccacccccaaggaccaaactccccaccatgccctaccaggccccaactccaacactggagatcaaacatttacataagatttgg

SEQ ID NO: 58965 - DNA, 1846 bp, Homo sapiens
ccgggcgtggtggcacgtgcctgtagtcccagctacttgggaggctgaggcaggagaatcacttgaacccaggaggcggaggttgctgtgagccgagatcataccactgcactccagcctagggacagagtgagacttcatctcaaaaaaaaaaaaaaaaaagaaaaaaaaagatatcaccatccctcaacagcatacccggaagtcctttttatcatgcctctcatatcttatcaaatggactaatcttttttctttatgaaaatgcaacttagcaggttaatccaccagtttacttaccttaaggatgccccatgtggatctctcagccagcttttatgatcacaacctccttcactaaatgttgagtgattttcatttcccgtggtgctcacataggtcactactttagtcaaggctctttggggtttgaggaatatatttctactcacacaggttcaagctaaaggaattttcattgtaagattatcctcaataagacagaataatgttaataataataattattattaatagggttattaataataggataaatcccagaggccaaaggcaggaagaggaaggacacctcgagaaagctggaattgagaattacggagtaaagggcaccatttctgcccctatctggggccctgtggcctttctcattttttctcccttgtggagtctgctgtatcctccttttctcacctagtctgtcattcctcatagtggcaatggccatggtctcattactccccacatcctgacctggtgctactggtgaccctcaccaaccggcagcttggtttcccaattctaaattctgagaacagaatttatggtctgagtcatgtctcagtggacagtgccctgtatgacacatccgtgactggccagtaggcagatgatctcctataggtcaggtttcctcccctggaccagcctggggccaggaacacagtgggggctgtgggcagtgattcatccaggaattctggaagctagttaacccctgttttactccacatgattagggtaagacactggctagtgtgacccacgttttttgttaaatagggaggacacacatctcacgttcaactggctacagcctgggtgctcatttaattcaataaatgtgtaccaagggctaattctgtgccaaggaccctgtccagcactaagactagtccaaggtaaattctttcttcattctaaaacctctgaattcatctgtagaacataccacagaggtttatcatcatttcttacagcaaacacagtactgaggagaacaatatcttctgagactcctgcaatgatgaggtctatgcagcaatctgaccctgcactgcagtaatggcggggaggcacacatgctggatgtcaggtctgtcccgtatttgtatattgtcatttgatgggtcatttaaaactctaagctattaaaataaatggtattcttatcatgatatgaattctattcttagctcatcgtagtgtacatgtatttaaacaggactttctgatggaattttggctaaggttggaaagcaaccagtctaaatattcccaccttccaaaggaaggtgctaaagcttctgctacctggatggcacttccaaaactgcactccagcctgggtgacagagctagaacctgtctcaaaaaaaaaaaaaaaaaaaaaaaaaaaagaaggaaatcagcacaaagctgatctttccaggccacaggaagatttgctttctctatagctcccttccttacatacacaggtgcacactcacactcacacccaaacccaccagtagtgtggttctgtgaagggtggcccagacct

SEQ ID NO: 58966 - DNA, 1309 bp, Homo sapiens
ctgtggatgggttaaggtgtagttcttgatgctgcagttcaaggtagcaaaggtccttgattggagactttccaccattcatccccctcacatgtcaggctcttatcgaactgagtacctagcctgatgaagagcagagggataaaaggaagaagagatgttctttcttccttttagatttttgtaacttttggggaaaagggagtggagagggagagacaagttcatgggtcattacaatgttgagtgataagtattttaacataaataagtacagagcactgagagaaggggcttttaattcatactcaggataggaaggctttctggcatgaaaaacggttaatagaaagagctaaagggagtgggggacatggggcgaggaaaacatttcagggagtgggagacgcgtgtgcaaagccacagaagagcgagtcattgagaaactgtaagctgtgtagtgttactgggatgcagtcatggccaaaggcattagcaattgacggctatctattttatggccttctccctctgctcccaccatcctatcctcttctcaatgctctattctgcctcagcacaatgaggagtacaaggggcaaaaggttgatatttggcaagtacttggttcttggttaaatccatcataagaacccacacatacttaggttttccaagaaactcagctcttgccttcttaatacaaacaggaaacagaaaactgctacccatactcagtggtaacctggacatttccagattgagtaaataagatgacatcatgggaggagaagacataagaaagcgtggtgtgtttcactgcaatgaaaagcagccttctagggggaagctggtccgcacccctcaaacccgttctcccccatttctctccctagtgtctgattctttctgttgcctctgtgactcactatttcacaaggtggtttacttgtattccctctccggtgatgcatcattaccagaaaataggtctcatagcgcagggtgagaaaccaaaaggcaaggggtaagagagagtggttgcctaatgggtgcctcatgaaaaactggttgtgaaatctgagttcacaaccccacctgcaatgccctggatgtctgatcatagaggcctggccctgtgtgccaagagtgagagcccatagtttgatgtcacagaaagctgggttaccacaaactttattttgtctgatattcatattacaaaaccagcttccttttgattcgtatttatttagaatttttaatctttaattttcaactttctattaatttatgtatgcctcaggaa

SEQ ID NO: 58967 - DNA, 885 bp, Homo sapiens
cttctgcactttcagtactccagctgcactgagtgccttttgattccttgaatgctgcatcaggcctcagacaccaggcctttgtccatgctgttccttccgcctgggttgcttttcccttcccaagttgactcctacaccgttttcagatctcggtgccagtctcccttctgcaagaacctttctgggctcctgctattgcatgtgcctggagtactgcatcctttgcctcttgcaaatttacaaccataccttgagcattggtttgatgtctgtttgcaccatagattttaagccttttaaaccttaaacttgcttgtttttccccctcgtattgctccactaaatgtagcgtggtgcttggcacattgtaggtgctgaataaatatttgcagaataaatgattaaaccaacacacataataacctttgttctgtgcttgatcttctggtcaaatttttgcaagcagtagagcccttccagaaatgacagagaagaaatgcagttgtgatgtgaagttagggcatgcagaattctacctattgtactttgcattctcaacaggagccttggaagaggcggcaagggtggcagttcagggacagactgcctgggctggcgttctgatttgccgaaggtagtaagcaactatctctgtgaccttgaacaaagtactgaactgcatctctgtaaaatggggagaataatcattctacttcataggattgttatacgctataagcgctaacatatgtacaaccctgagacctgagcctagctcacaataagggctctgagtttgctgttgttattgttgttgttgattattacggttgttgttgtttttattgttattagaaagactccactttgtcaggctgctct

SEQ ID NO: 58968 - DNA, 2091 bp, Homo sapiens
ctggtccaatatagatttttctcaagttggccacctaatacacggaggtgtgattcaggtcccctcagcagggctgtagtgacattgtgacatttgaactaggaattggaggaaattgatgccatatatcagactcaatgccagtagcttcttggggatatgtcaacaaaggtcctgagagatgataacacagaattatagaaaaggcctgggtggaacagtcttcagggaagaaagagaaactgggtcctattcataactgagcagtagaggtcctcaagataaaagcaatgtttggggacagctgcttaatgtcaactctcatgtacttcccttaaagcaattccaagtgaagtttagagacagcaggtgccagggagaagaagattagtcttcacaaagcccctactatgtgccagtcctggtgtgagctcagcgatcattttatatcattcaatctggcgatttttagccctgtctgcatgtaagactcatccaaagagatttttttaaagacagaagacacccaagacccagccccagagattctgaatccactggccttagggagcctggacaaagctgtgttccagaacacttaaaatgatttccatgtagggctggggttaagaatcactggtttaatctttgcaacaattctccaatattgaccttactctcatctgccttttagagatgatgaaaccaaggctgagtggctaaggaactaagccaaggccatccagctagcatgtgacagagcttgggttcatgcccagggcgtctgactacaaatttgttactctttctactgccaaagtggtcagggtgaatgggccctgtgaacaccttcaatcccactccttggtcatgtagacctggtaaagatcaatgccaccagaatccaggtggtctctattcaaacactcctcccagaggaatgagctttggggactctagtttgcacactcatattgaactcctaaaaatggaaataatggtggaggtggggctgggtcaagagcaggataggaacccagtgtctggaacttaccttcatcctttttctgatccgagggcttgctgggacattccccaatatcctctccatcttggactgcacttccagggaagaaggaaccatgcaggttcctacaagggaccttaggctcctgaggaggaaaggggccatttagccttcctgactctttattgctttaattagctgtttggtgacctgacagtctctttgatgcacgtccagcgtcggcctgtgaaatacggggaatgtcagcttgtcgaacaagggtcagctagactatcaatactgttgtccatcaggcagatccaggctgggtgttggcctgcaatgattaagccatctctcccctccccctggccaaagtgtcggtggcgtgtggagcatggcccgtggctggaggcgaggtgacggtgtcgaggccattgggcggctgacttcaaaccagaggcccagggcagcaaactgcagggagaaagcacagtccaaggtaaacaaactataacaaacccaaaaaaggtggccagtcaacaagtcaggacaagaggagggtctctgggacacccagtggggtgctcagtcttcaagttaactctgtctgcactgctggcttctgggagcacagaaatttgtcctaaatcattacaatggtaagtaacacagaccaagaaacaaaaactgtaaggtttgaggcaactaaaacatcagtgtatattcatagtgtgacgtggctaacaaatacatcgaagggatctataaatgcactaataaaggtatactgactgcattaaaggaggggattcattcatttcccgagtattaactgagcatgtattatgtgccatggtttaatctagttgctgtggatattacagtaaacaaaaaagacataaatccttgctctcatggaactttcaaggcaatagaaacagattttaaaagaataataattaattataaggtatggtaacatgtgcaataaagaaacaaaagtgactgggcatggtggctcaggcctctaatcccagcactttgggaggctgaggtgggtg

SEQ ID NO: 58969 - DNA, 639 bp, Homo sapiens
agctgcatttacatgaactgtctatactataccccagatgctgggaactttctagaaaatagactatttgacttggtggtcttactcccctgatgccactcagtgccgaatttcttcctccttgcacgaggtgtgccttaggctctgtaggtgctttttatcttatctggccctttcccccctcactttgtgagttgtcacgtttgtcattctaggataaactttcagccggtgcagcacgtactttggggtcattgccctgtgttaccccaaggattgttcaaatatttgtgatcttgtcaagctccctcttactggatgtgtgtcatggcagtgtgggaggggcattttattcgggggggataaatgtgagccagtgagtagcaagcagcccttcaagggaggccatggaaggcaggtagtaaatacactacttcttggcccaaggtcgtatgcaggtgaccttcaagaggaaagagggaggttagcatttattgagtatttcccatgtgccgggcacttttacacacatgggtacaggtgttgttcacaaatgcactgaaaggattctaagaaccatttcactgataagaaaaccaaggctgaaagtttatcagctgttctacaggggttctgata

SEQ ID NO: 58970 - DNA, 661 bp, Homo sapiens
atgagcacatttcacccatctcctgtgctctagccggtctaatccagatcaggcagcacccaggtcaccatcagcacaaaagcccaattgttcaggttctgttctcactaaggatgtggcccattgcagccaatgggggacttggccaagcgtcaggcactgatggaagactcctctcttggctgctggctgttgacaagctaagtggctgcctcggtcacgccaggatgtaataaagctgcccggcacccaggatctgccgacgaagagagtgcaagggcagtggaaagagacagcctccaaattccaggaatcacatggtgtttattctgaggccggcctcccatcacccactccactggaagctgctgttgtctggaagggctcaggctggagagaatccagattaaataatagtgtaataaggagcacgtctctgttttggtttttatagactgtgccatttcaaagggacaagagcaaagtcttcaagggcacttattggggtccactgaaccatgatctaattaaatccactggagaaaaatatcttgtttaaaaaaagggaggtctgcattgttttttggagaaattagttagtcttaagatggcacttatttttgtgggtactagaaaaacacagactgaatactatattgtt

SEQ ID NO: 58971 - DNA, 526 bp, Homo sapiens
ggaagctagagttgcatcatcctgactcaggtcagccagtgtccaccttggcaattggctgcaagctttgggattggcatgagaaggttacgttgactgggccatctaaccagcagcctgagggctgggcctgagcagcaccgaggaatttcacacatggcggtgccagcctgggttctgttctggaataacacatgcaagtgacagggaaaactcgtgagtcattgagctaatctcagctcttttaaactgggtgcctggaagatgagcaaagttctgacttcagcaccatcaaagaggttatatggcaaagtcaacagtttcaacagggaggaaaaggctgaatcacccaggccattgctttccccttgcctgagtcaggagtaaaggattaagtattctattttagggagttcctaagtgctcctgaggagagcttccaatagaggtgagtaggttcctattaactctgcaacacacctttcaagctagaatccatttattttacatttccattattgggcaa

SEQ ID NO: 58972 - DNA, 1060 bp, Homo sapiens
aaccttcttattaatgcatctttcttcccttcccttctcacttcggtactagagttttctagagtcacttgcctgataaatcacttgcactggaatccttgtctcagagtctatgtctgagggaacccagcctaagaaacagaattatatttacaccacagggcaagaacttgccttaggacacagtcagtgtagaagaggtagagcttaaaagcagagacagtgagataaatattcctgatggcatcgtgttgggcatctggatacagccatgcctgaaagttgcactacacttgagcttgcccttagacaaaatgtgtaagagctgggattccaaggacttggttgtgagtctttttatactgtcttttatggtcccaaatatccattcccactgtacttgcattagctcatacagcccttggattcattccaagggctactggactttgcctttaccaagagacagttaaagccaccagggtggcatagttcaaatccttcactgtaatttcatgtaaataaccttctggcagcttccttttcactgttgtgctcttgtctgccagccaatctcaggcctgggcttcccccaggagatgttaactcatcgtcccttatctgcttgactgactgtcatcttgacacatcattgagctggtgatgaagcccttaattagttcatgtctccaggccgcttctattgccacctcttcttctgtttgctctttctaggcttctctcttttcttccctttaccatctccaaagagaaaattctaccaggtattctatgctaagcactttgcagtactgatgaaatcatcctctcatcagccctctaaaatggcaactatgatcctgagtttacagaagaaaaaactggcccagagaggttgcacttagtggtgttagtcccagacaagacctggttcaagtctcagctcttttactttcttgctgagtgaccttacaggagtaatttaaccttaaagttttattttcctacaatagaaacaaagaaatactgacctcagggggttgcagtgatgaatgaatga

SEQ ID NO: 58973 - DNA, 1286 bp, Homo sapiens
atggtagaaattattgttattagttattatttttatttagataattttgcctcataagggaggctgaaataattataatatttgtcctgaaaagtgtagccagagagtatgatatgaaaggatgcacattgcattaggacccatgagtcctggcttctagttccagctcccatccccactcactgtgctacattaagcagggcatttccccaatctgggcgccgggtatcacgggttacctctcaactcagctgttacaagtcccttccgtctagaggagagcatcaaagccaggaaaaactaagcttccctaaacctgcagtgctttacctgatggagccaaactccatgtagcaaacctaaaaccttgatgctgtgtaaattggcacatacacacagcttccacgtggtgatgactatcaaaacaagcttttgtctaccccacagggtcagcctcctttctgaaaatcaagcagctgactgagtccaggtcaaagtcccagtgggagtgagagcccagagcaaagcgtgcacttacattccatgatgatgatgcttggtgatgaatgaaccagcttcttggcaggaaggaagttcctacaggttgaggtgatcctcctagcaatgtgtttatttgacagcctaaggcagcaaaaattcacagagaagagaaaagagagaagaaaagggcataaaagaaaggttatttaagaacatcaggatcctccctggccagccaaacactcataaaactagagcagaagatcatataaacacattgtgaaaaaataaggtaatcggagactaaaaaggtcctagagaggtattaaggccaggaaacatgtactttctctaccttagtacttaggctcattaatttttatttaatctacttggcacataataaatactcaagaaatatttgtgaaatgaatgaactacaggaagaaatcattgttgactatggctgccaatgacggtgtcacaggttaaatgggtggtgggagctgggtacaatttgaattgctagaaaaagaaaataattcagaaagaccatcaattttaacaaagatccccatgagagaacaaacttggcttgttctgttgggagttaaattattcaaaagagcctagactattttgcagacaatttccctggaattttagtgattcaatatcataaaggttgatttcttattcatgttgtatgcccagcaggtaatgtaagggggctctgctccacatagccattcaaggatccaggatgatggcaggatccgttgact

SEQ ID NO: 58974 - DNA, 1476 bp, Homo sapiens
gaaaacatgacctaatacaagggctcaggcaatgtattagaaataaaggcctgtctgtagccctggccatttcttttccttttttctatttttgggagggggtggtgatttggaagaaaaaaattctgtggttgatatccaatgaagttaacacttctcggccaggacttctattacatgcaaacatcatgaattataattagagaacagcctatttacacatgaaggtacactgggtcaagtgaaaaactctgccaagaatctcagcttttggctgagaaatattggcaattggcataaagaaaatggtcctggaatgggacagagctgggaggagccaggagatctagttttcaatccatgtgacattagcaaatggatgtattgacatgcaaagatttcccagtagattaagttaaaaatagcaatgtataaaaagatgtaaagtatgattttgttttttattaagaaagacagtgaatgtctgtgtttttatgtgtacctaaaaaatcagacttatgcctactggattaccaaagtgtttattcttggtaggcagagttactagaatatgtccacttgccatatatgtcatatttctatgttgtttgaagttttaaacaaatataggtcacattataattagaaaaggttataagagtatttccagtaaaggaaaaggcagtctctatcttacagagttcacttcttcttctctagaggaaacctctatgttgagttcagacacacctgctttataatcctggctctgccatttacccagctgttgacaccaggaaaaccactgagcctctctgagtctatcctctattctattacgtaaggacgttcctttcttcctagactggcaatgaggattatgtgaggtaatgtttgcacagggcctggcctagcgcctggcactcacaaagtgttcaattaaagaaaagaaaaaatgagtgccttgtctttttaacaagtacaatggacaagatctaaactttagccagggatgtcaaaccatgaccaagggggatgcagtggggtgcctacttggtatgtagcctgcagcttggcactgcatagacaaaaatccatcagagcacgtgttctctacctaaggcacttacttgctaggtgggagactgataactgtgattagtaacattttttttttttttgagatggagtctcactctgtcacccaggctggaatgcagtggcacgatcttggctcactgcaacctttccctcctgggttcaaacgattctcctggctcagccacctgagtagctgggactaccggtgcatgccactaagctcaggtaatttttctttgtatttttagtaaagtcgtggtttcaccatgatgtccaggttggtctcaaactcctgacctcaagtgatctgcccccattgtcctccaaaaatgctgggatgacaggtgtgagccactgttcccaaccagtaacata

SEQ ID NO: 58975 - DNA, 1290 bp, Homo sapiens
aaaaaaaaaaaaaaaaaaaaaaaaaaaaaaaaagaagaagaataatctgctatttaaaattagagcccaagaattaattggcaaaaaaaaaaaagaagaagaagaagaagaaaaaagaagaagaatctgctctttaaaattagagcccaagaattggcaaaaaaaaaaaaaaaaaaaaaagaagaatctgttatttaaaagagcattcccgggtggccctgatgatggagaactggggtgagcatgcttacaaaaaacactaagcgtttgcttagatgaatcatgcactgaaaagcaatgaaagacgtcatgggaaaggctggcaggaaactcatgagtagggaggagccaagtcatgtccctggcaggacagtccttcagccactttagggtgtccctggaagggacagtgactagataggcatggtggagtgttgagaacaacagatctcattgggaaagcgtctactatgtgccaggtggttcccttgggttaactcaattctttcaacaactcttacatctgtcccctccccatcagaatgcagcagggaggagcagagcttgcctaccaatgggcgggatgctggtgtcagggtttgtgttcttgccacttcttcgcagaacccgcatgaagatccgggagtttggggcatggaaaaactgggacacagagggtgaactgggctcagagtggagaagggacccgtgggtgttcaaggcctcaagacccaaataggtctggaggaaaagagcctggctttccagccagctcttgatcatgttgactggctgatttctcaagagtcccaaggggaagttctcagatttccaattctaagcaagggaataatggttcttagtatcaaggtcacatgacccactctgcagcgcacctgtatcgggatccagagcccggtgcctcagttcttgctgtggtttggcaaagagattcctgctacttcaattttcactgaatggccacccctgagcatgcagatgaggcttgataaattatagctgaattcccctggtgcccaaatcttttttttcctcatttacagtactttagcactgacagtaataaaagcaaaaattgtcacaggtagacactttctccattgaaaatgatttaatcttcccagcattcctgtggtaatcatgtgagaattaatgcatatttcacggaaatttcacatctatcaaacgttatacccattttagagatgtggaaatcaaggctcaggaagactatatgatgtttttcctcaaattgtaaagttataagta

SEQ ID NO: 58976 - DNA, 2093 bp, Homo sapiens
tctttatagtagaatgatttataatttgggtatataatacaaataaatatagcatattcttgctaatggttatagagtataccacttttgaaagtatatgaatgagttgaattagtcacgaatagatggtcatttttgtagcttcctatttttcactattgtaaacagcatgactctaaatatgtgcttgtacatatgcttttgtttgtttgttttaagacagggtctcactcactctatcgtccaggttggagtgcagtggtacaaccttggctcactgtaacctctgcctcctcggttcaagtgattctcctgcctcagcctccagaatagctgacattacaggtgtatgccaccacacctggataatttttgtatttttagtaaagatggggtttcaccatgtcggccaggctggtctcaaacccctgaccccatgtgatacccccacttcggcctcccgaagtgctggtattacaggcatgtgccaccatacccggcccatatgcttctttgaatatgtgtagtctgaaaggtgaattgctttggagagaaaatactgggattcaaccttctgtccacttggcaattttcttccattcttttccagtcagagatttctatgcctaggagggtaattgacacagaatgacagctactattttcactgctgcttttcctttttacctgcttctggggagtaagggagagttgaaaactaaaatggatgtactctcttgccaaagtgggaagattgtcatgaaggccagctcaagcttcaagacaaaagctactaatagtgctcttgacatcattcttagagagaaagaagatgcgcttactgattgaaaaacttggcagtttttagcaacaaggaaagttggtgaattttcccaggttaagtgtgaaacatgacagagcttgggtgagctgctctgactccttattcattgttgctattttcttttttttttttcttttttcaaattatactttaagttctgggatacacgtgcagaacatgcaggtttgttacataggtatacatgtgccttggtggtttgctgaactcacatctgaaccggtcatctactcattgttgctattttctatgaagccccaaccccctgtgatttcagtataaacaccatacagccacccacaccccaccggctccctatgactcagtcacatgctcatccccgagtcattagagaatggaaatcatgagcaagatctggctcacacccagggagtgacaaagcatgtccagaaaatcagggattccccttctgccaaggaggcgcgagtggagacagccaattctccatggtcaggagggggatgtttcaaagctccaggcctctgaggttggcagaactgcatgttgttttgggaaactgtgcattgcagcaattgtgagagaacagaactgtcttcgaggcaagagaaataacagagctgaaatagaccatgcaataatggtgaactgtaatctcaggtttcattggtgccatgatcttaattataaatagtatttgaaacccatttttctccctctttaatgataacaactaagtttgttaagtagttactctgttttaggcactgtcctaagggaattagaatactataagtattttggacaacaatttgatcctcaggacaacccttttgataggattattgtgatcttcactgaaaattgaagaaactgagtctcagaggctagacaaggactttgttacacagttaagagagtgtgaatcccaggctttgtgaaagattaaaataagcacaaaataaatgcatgttacaaatcattactgaaaaggagcaaatgcatttaacctcaaagttagctcgcagtttctgaacgtcaagaatctggaagcagcttaactgcatggttctgcttcagagtctctcatgacatggcagtcaagtagtcagatgggctgtcgtctcatttgaaggcttgactgggggaaattcatttcaatgcttattcatgtggctgttggcaggaagtctcagattctcactatgtaggtctctcttcagggctgctcccaaaatagctccccccacct

SEQ ID NO: 58977 - DNA, 1824 bp, Homo sapiens
aagcaattccacttatggaaatttttcctaaggaaatccaaatgaatctgccaaaatattcaggtacctgattaatcattgtagtgctgcaaatgataacaaaatgaggtctttatttagtgagacctacccattctttctttccttgtgtttcctttttattgtttatatcaatgttatactaagagacataaagatgatgtcattttactattctttgaagttttcttttttgcttaattaaaaatggatagatagataaaacaaacatggatagctatatgatagtagatgataggtaggtacgtagatagattagattagatagatagatagatagacagatagatagatagatgatagagatagatacatagatagatagacagacagacagatagatacacagataataggtggggtgaatggatgggtagataatcatatatataattatgtatataaatactgtgtatatagatatacagatacatatatgtatgcatgtatgtatacacacacacagaaggagagacagaaagggggagagagagagacagagacagaaacagtgtcagagagagacagggagagaaagagagagcgagagagatccactggttccctatattgaatgtacatgaggatcacatgcagagctttagtaacttacacaagtctgggctcctcctccagaaagaatgattcagtggggttgggtggggcccaggcatggaggaaagagcgtgagcaatggtactaggaagagaagccaagaatcagagaaaaaacaagggggcagctgagtcacctccaaagcagagagctagagttcagaatgagcaagctcctgcctaactgaaagtaaaatccacactccgccaaacggcactgaggctgcattcccacccagccctggagcattgctcagagcccaccttgtcccaggctccccagcctcaacccacccagttcccctggtttttgtttctgtttccccaaaatgccaagccggtttctgtcccaggatctttgttcctgagcttctctctgcctgagacatggctgtttctcattatttatttaacaaagtacaaaaggcacatcctcaggggcacccttcctggactctttctttcaaacaccaccccagttcctcataaccaggtacttcctgcctcatgaccacatcttggggctctctcctccatccctctccatggctcagttctctccatctctttctcacctaaccagggcacctgctcaccccttcagcttctgctgtgggttgtcagtaattcaagtccatcaggctcatctctggaaaggacaatggggatggtgtcacatcatcttccaagtatgactttcagtttctcttcacctatcgatgtgctattatgccaaaagcctgtctgctctcttgctctctctgccttcagttgtattgccaaatgtgccttttattaccctatccttggtgtatgccattctggagtgtgggtaggaaatactgcaccccatatatgaattgttccactgatctcttgaaaacctagagtgagaatatatttaatgaggacctaccatgttctaggtattgtgatgggcaatgaagattaagatgttctcccattagtcaaggatctttcaggcactcttcagtttgccacagtcccggtgactccctatcgttccccttagcctgctttatacatttcttactcgccacgtccctgtcgccatttgagattctaatatttgttgttgaaattgttaagaagtttacagcaggttttaagcagagatgtgacagggatc

SEQ ID NO: 58978 - DNA, 1147 bp, Homo sapiens
ggaagggagggaggaaggaaggagggagaggaatggagggaatattattatttaaaaatgcttggaatttgtagtaccagggttggtctcattgcattctctccttctgattataggacaacctggtttttaggagcctaaggggtttcccaagacctgagacttttagtggtaaacctgggaaagtcccaggcaaacttggacaagttagtcaacttagctctgacatccgaggaacatgggtccaaattctagctctccgcttggtaaatgtgtgcctttgggcaagtgactacgtctctatgagcttcagtttcatcctctttaacatatggatgacaaaatgaccacccccctgggttggtgtgaggattgaatgagataatgcatgtaaaacacttagcaatgtgtctggcatattgaatacacttcatcggtgttgaatggggctctcttcttactttaagtggatcttggttaagcagagcccctgagaggtgaggttcttcctgggaagaagaagaggcaggggtgtagccaaggacagaggccttcctctctgtttgggtcctggggggtttccgggcaggtggtgctcagatgtacagggaatcccagctgcacgtggatgtcagctcttgtcagcagggagatcagggcgaatggggctcagatgaggagagaggaaggcagcctgcccaagagtttctgatcccaactctcaccaccaagggaggaaagccggggctgtgggtgacatgataagaaggccctgaggaacgttcaaagttcgccccttcctcctacaggaaccaaactttaacagccagagccagggagtgaaagagaaaccagacaagtgagtcattcgcctttaaacaggccacattgtcttcagaagcaggctttgaaattgtgcatgtgtaaccacagtagagagggtttgggccccctctgttcctgcctgagggtaagccagaaaaaagagaagaaatgaaagggagggggaaaagaaactaaaggaaaaagatgggactaggagaaagtcatgggagaggcaagagaggaagaactttaggacacaggaatgagccagccatgcacttcgatattccagcaggtctcatgcttctcaaggttgttgagg

SEQ ID NO: 58979 - DNA, 987 bp, Homo sapiens
gagatgaatgaataaatagagaagtgaatgaataaatgattgagacccagtccctgccacctacaaactcccaggataagtcccagttcagctccctcagaagtcccctaaccagtccaatgtaacccactttgcctgcactcatcattgagggagcccctgcccagcactgcccttcctttctccacatttccccctttgtcctcctcctccctcccaaccccacctctgcctcccatgttacagattaaaagcaacagccaagctggcatttactgactgtcaaacacctctcttagtttcctcagaacaaacagactcagcctatgtttttgtttgttttcttcctttttctaagctgctgagctgtccctggaattgtgcaagaggtcacacggagggactgtcaacagctccctaacgtaggttcctaccccagaaagggggtccaggttttacaggcccaagcgcttgggcaggaacacacacacacacacaggctgctgtttgttttctccgacaggtcgggcatttcccccctgggagagaggaagcttaaaacacagaaggcccccttctctaattagacatgagaaacagtttggataagcagaggcatgtcacccaactgtacaatcccttcctggagagcaggagggttgaagcctttcagggatattttttttccactttgtttttaaattttaaaagttttataaagaaacatttcatatattttatataatataatgaaagtcaaaagtccctaataaaacctttaactccatatctcccaaaaaaacaagagtttgttgttcaatcatgcattcattgatccattcaacaaatatttatggagtgcctactacacaccagacactgttctagctttttgggagtgcaaaagcaagtaaaagctgacctttccagaaagtttctctttgcagccaaaaatttaaaaatgatctattacaaacaggggagaaa

SEQ ID NO: 58980 - DNA, 704 bp, Homo sapiens
acttcagccaagcaagtaaaaaacaatggatgtcctgtgaacagtggcatctttggaaaacgtcgctgtttttattaatctctctcaagatagatgttgctcaaacacagcagcgtcgtgacagtgccaatagccagcagtctcctgtccgcgtgggttgcgagccccgggcgtggacggagttgggagcggagggcggcaggtgccagcggggcccgcctctccctgcaggcggccccggcaagttcacggccggcccggggcgaggggcgagcggcgcgcggccgtgcggctcattctaccgccctgcgtgcgaaggggaggccgcgcccccgcgcccctcgctcgcgccgtgcctgccgccgccacccgcccggccgccgggccggccactgagcggccgctgcagactcggcggcgccggcgcacctgcaatcaggccccgcgccgcgccgcctcctcgagcccaaggccgccgcgcgccgcgctcgccgctgataagaggcggcgggggaggggcgcaggatgctggcgttgcggaagggcgggggatgggtgggcagctggagcgggctcccctcccctcccctcccctcccctcccctgcccttcctctccctctccctctgcgatgtctctcccgaaagtgtgtgacttgcccatgtctgtctcttgtctgcgcctctcccctaaattccctccct

SEQ ID NO: 58981 - DNA, 1412 bp, Homo sapiens
caggcatgagccaccatgcccggcctccaatttaacttttttattatggaaaacttcaagcacacacaggagtaggaaaaggataacaagcccccgggcccttagcccagatttgagggcggttctcccaccctttgcatctgcactctcccccgatcccccgcacccactcatgtcctctgtgcaccttttaaagcaaagccccaccatcacatcattttatccaactttacaacttttaagggctttacaaacctaccgagccctccctgagagatggggattgtcagcccccattttacacatgtggaaactgaggctcagagaagtgaagttcttgtccaaagtgacatcactgccgaggggggtgctggcacccagccgcccagccttcccaggccctgagacccacgctctgtccacaaggccccacgccaagcccatgggggcacagagctgagccagccctcttcctcttccccaacccggggctccagacggctggactttgatccttgccagggctgaattccagatggagggcttcccggctgcttgggcaatacgattgatggtgtgttaatgatgtcagggctatagacaaactccagccttggccgggtgcagagggccaattatcagtggtgatcggagccaggcactccggccccatcagctcatgggcagggaagacgcagggaaggggacatggggacttcttgcaatggagcagttgacagaatcagaactacctgccaggtgagagccagaggtgcctgttccttcagggtcttagggtggcttcatggtgtgggagacaggagtgtaaaggggacactgaaaccctccacatggggttcgtaggaagagcactggattcaaagtccagccactgacttggccactgagaatgaccttggctccctccttccctctctgggcctcagttcatgcatcaataacaaaaaacgattgtacagttggatgagatcagaggtcagcaaagttcttctgcaatgggtcagacagtaaatcctgcaggctttgaaaaccacactgtggcaggaaagcagccataggcaatacccaaaccagtgggcgtggtggtgttccaataaaactttattcacaaaaacaggtggcgggctgggtttggccctcaggctgtagtttgctgaccccaggtcacaaaaggttatttgagctcctcataaatgtgggaaacagatatgtagctctctgttagggttcacaaactcacacctacaggggccgggcagggaacgtgaatgaataaaacaaacgtcagtgcaaggcgttagggcatggtaaggattgcagcaaactggccagtccgtgtccgaattaaaaatggatgggctggggggcttctacggggctccagactccag

SEQ ID NO: 58982 - DNA, 694 bp, Homo sapiens
ttccaccttaaagataggactacagtcgggggttcatgtatctctttatcccctagcttggggcctggcaccttaggggcacatatcctgttaacagaatcatcaaattccttctgcaaacatgttacatttatgtgtaacagcagctgggagtgcctaacggtaagacagtccctgagtaacattgacttccacatttgttggggaagaagcctgtgactaagggagttgcctaaaactgaagggcagtgtccaaggaaaaggatgaaataatttggctctgactagcaggtgttaccctgtggcctaggaaatgaaccccacacagtttgagttcacatccattaaatcccgagagaatgagaacggggttggaacgggtggatccaaggtgctgtttttattagaatggaatctacggaatgagaggagcatggtggatgtctgtggactgtgtaaaggtcatcactgatggaattaggtaatggaggtttctttccaaaacacgttaaaaaaaaaaaggcaaatggcagagtccatacacaaaaaaggcaaaactgaagagttaaaggaagcaaataaatctgtatgtgtatttataaaaattggctgacaagtcaaagtataacatgaaacaggaaatgcaaaggcaaaaattaccctattcaaataaaaatagtattgttctcttaag

SEQ ID NO: 58983 - DNA, 886 bp, Homo sapiens
gaaggctatccaggaaaggaaatactaagagttattaatatttgagtgtttactttgccaggcagtattctaagtgttttaaatatatccttaattctcacaacaactctaaggtaggcattaaattattacccctactttgaagcagaagggaggaaggggagggagctaaagtcacttgcctaaggtcatataacttggaaggggcaaagtcatactttagatctgactaatcaaagattctacactctcaaagctctgaactttacaaccttaactgaaatggcatgataaaaactggttatagttcagtaaccattagcaaaaggctttcaccttaaatcagctcattttagctctttttacctctataaagctcattagaggtatgctagtatccccattttagatgacaccacaagctcaaggagttaaagtaacttccccagggtcacagaggcaaaggtccagctgataatcaaacctcggctttggcctacaagtccagtgtttcatcacatctactttacattagaaaggctgcttacaaattgtctgccagccgtgaagtccaagacttatgcaatgatgccccattgtccagcaagttccccatgctcactgctctgctccacgtcaacacaaagggaattctgccaaagatttcatttgaaaaacagttctactacttagagtaatttaacaactattacacacacacacacacacaaacacacacacacacacacacgtacgtcttaccctcatttcctcctgcattttctcatgttctatactctggtatccaaatcccactccagaaaatatcatatcccacacatcatgtctttctcttggtttaatatgtgtaataccttgattaaaa

SEQ ID NO: 58984 - DNA, 532 bp, Homo sapiens
gattttaataaagatgagtcaactactgatttcaacattagcacaattgagaagtaaaaatttaaaatatttccttccactcttcagacacaaactaatttgaataaaaaacacacgcacatgcacacacacgtgcacacagaagcttgctactaaaattctgacagggcaagtccccaaattgccttttacactaaagctcaaacagttgtctgtcactgctattactatgagtaatccttgcagctgtaactgtttgaaatgcagctgtctcgttggcattctctccccacccccagccatgcagcatttctgttcttgctacaataatcttaaagagcattttacaggaggcttagccctggctgagggcactctacggcgtgaccgagagaacatggaaacacgattcattagacacgcctggagtgataacaatggtgctgcttcttactgcctttcatttcgtacatcaggctgagactaatgcattctcgttacacaacaagcacatttatagacaggggaaaac

SEQ ID NO: 58985 - DNA, 1006 bp, Homo sapiens
aaaataaaactaataatatttgaaaactataagtttgatttactactgataacaccaggcataaagagaagaatctttgaccattcgatagaaggaaaatgagtgaatgggcacaattatctccaactagtaaaagccaatagcactgttcaaaaaaatgagaaccaatctcaccagagtttgttttctttttactatgtgagcagacttgagtttaaaatttccaaactgtactcacaaaacacagtactttctcttgcaacactttccctgtgagtcaacattgcctaaaagtccaatattgagttttcttctacctgtaggactcttaatgttaagaggagcaacaggaagtgctaacaatctggaaacagcctgtgcctgaagaagagctcaattcagcatgacggtagaccaggctggtactgtaactcttggttctgctcagaagctggtcttaacgggctctaggaccatggtaactcatgtgaggcccctagatataggcaggcaggcccctgagcccacagttcgccccatctgacaaacaatattttccaaagatagctcacaatatatcccatattacatgccttttcttacagtgcgacactatcagtcttcctatcaagtgataggatcaatattccctcccctggatctgggtagctctttgtaactgcctcaacaaacaaaatatggccgaagtgactgtatgttagtctccaagtccagagcataagaaactgatagtctccacatctgcactcaggaagatcacttttggagtgcaaccaccctgctgtgaggaaacctagtccacacggagcagccacatgtagttcttctggccaactgtctcagctgacatctcagccaaaaaccagcatcgaccaccagctatgtgaataaaaacacctcccgaggcaatcagcccccagcctgacagaaagactgcagtcttggagcccttccagtggagccctcagacatcctggagcaaaaa

SEQ ID NO: 58986 - DNA, 2491 bp, Homo sapiens
cgacccaataaaaagcaaagatggcatttaccaccaaatgtcactgacaccgccaggaaaagagttgctggagccctatacatttttaatttcgatgaatctagacaccgtcggcgggtgccaggcttccacgagaacaattgacaccctaactgcttcaagattaaggcaggcgattcaaatccgaaggaaaagttgtcaattatcagaaagagagagcgcgagagaggcgaaggcagataaaagcgatgttatcaaaccgaccagcttgttgcttttgtgtgtgtgtgtgtgtgtgtgtgtgtgtgtgtgtgtgtgtgtgcggattcgttgttaggatagagaaaaacagtttttaaaagacacaggaggagagaaagaagaaaaagctttctccaccttccgtcggctcggtgcaatggctttacggctctccagcatagtaagccccgagaggcaggcggctgtcgatgtttacaatcgcgggagcttcgggtgcaagagtcctttcctgacacaatcgcattcaatcaactattttagggcgaaattgcaggtgtcattatggaatttaaaaaaattcaaaaggcaggcgggcgggcaggcagctgatccaacaacgggggaagaggttgccgatcggaggcgcggcagcacaaggcaaagccttccacatttacggggggaaaaaaaggggggaaaggggaggagaaggggagtgcgattgcaacagagggtgggcgttcgaagtgcgacccagaatccgcagctccgagacttccacatgcaaattccacgccgagcgccgcgctcacaaatgatttttaaagagccaaataaacactggatgggatccaaggcgagagagagacgatccaaaagggggagaatcggcgagaggcgaacggcggggagacgcgagggaggggcgaagtcccggcggcgggaggagaaagttggtcggcggcggaggtcggggacccccccccttccccggcacagccccctccccgcagcccggctactcaccagcgaaaagaggttggagtgacaatcctccaggctcgccccgttcgccacccagttcgctgccgcagtcatgatcctccgcgagcccggccgccagagcggggcatgtcggagcgaggcgtccgaggcgaggccgggccgggcggcggcgcctcgccggggagcgcggggcggccgggccgccgccgccgccgggggagggcgcgagggccggcgggcaggcgggaggcgccgcggcgacgccgcgccgggggcagcgggcccgggctggcggggggggcgcgcgccccgggccggcgctgcgggccggccaccgcctccgccttccctgctcctcagccgccgccgccgccgctgctgccgctgccgccgccttgtttatctccagccaccgactccccctcggcccccgccggcgcgcgaggggaggcgagccccggagccgccgccgccgcctcggagccgccgccgccgcggagcgcgaactcgcgaaggggggggtgcggacgaagccagcgggcgaccccggcagccgagcgacgtcccctccttcctcttcctcccccacccccccctcctccccagtcagcctcgcttctcctccctccccgggctcgcttgctctgacagcaatggcggccgccgaccgcggctcggcccgccattggctggcgcttggtcacgtgacgggcgccggccgcgcggggggagcgaggggcgggcgggggaggggtccggagtggcggcggcggcggcggctcgcgggaggcgctgctgagctgagcgcggccgggtcctccggccgggaagagggagggagggaggcagagagggagagaaagaagtgcgggcggccgggctccccggcgggcggcggactgccggcccgtggctgccgtgggctgcccctcgtggccgccccgccccctcgcggtgcactgatcgtggcggggcgggaccgtgggtcccgggcgcgcccgtggtggccgcggaggagggcgcgggacccccggcctgtgccctcgcagcccaggccggctggcgtggcgcggcggccgcgatgtgggccaggcagcgggtccgagtgccctggggaatgtgtcctcagaggctcgcgccgccgtccgccttttgcagaggagaaaactaaagcacaaagggattaaatcacttgcccgaggtcgcacacttgggaagaggagtccagattcgaacccgcgcacagtgaagccaagctcttggacaaggtttcacaggcttcgcccagggatattcacggctgccatagacggagcgcttactgtgttccagacactgtgcgtttaatacagaaatgtttattgagcccttactcctagttactgtgtgcactcattcattcattcattcattcattacataaatgtttcctgagctcctgctgtgtgccagaatctgttataacttccaggcactgtgctaa

SEQ ID NO: 58987 - DNA, 303 bp, Homo sapiens
ctgcctctgctgtgcctctgcctgacatttcctctgcatcctccaagtgcttcccaggctggcttcttcttgccctgctggtctctgtttaaacatcgccctttgaggaggcctttcctgacccctcctccccccgccgcatctaccagcgtaattctggctctttgagtggtttactgcgtcacaagtcacaatcacttattaactttttgtttgcttcttttatctagacgagggctttaatttcaaggagctcacattcaaatggagcagaaaggcactgaacccagaaacaaataattc

SEQ ID NO: 58988 - DNA, 620 bp, Homo sapiens
ttagtacagacagaatttcaccatgttagccaggctggtctcgaactcctgacctcaggtgacccacccgcctcagcctccaaaggtgctgggactgcgcctggccaacactggaaatttcttgtttaagaaaattccaagctcatactgggagggcgaggccaggacatgaggctgcagtggacatccatagctgcagggagcctcactcgctaggctcttccacatgtgtgaagccatcacattcctctaggcaccgcccaggacatctcctgctggaggagcgttagagagtgtcccggctccccctagatccacctctgaccatctgatctggttacttcctaacgtcctgtttgttttcctctaaaccagagagaacgttgagctgggtcattggcgataagggcaggttgggttgagcaaccgaatctgttccttatccaagcaacagatcttttctaaagttcagctctggtcggatccactgcccacgaagcggttcatacagccaccaccatcagttcatgattctccacgccaacaacagcatgtgcttcactagcctccacaaatgctgacaggtgaaggcagactgttccttggagcagttgacctgg

SEQ ID NO: 58989 - DNA, 1185 bp, Homo sapiens
gatgatagagtgagactccatttcaaaaccaaaccaaaccaaaacaaaacaaaacaaaataaaacccatagatagatatactgattggctcacacattgcagaggttggcaagcccaaaatctgcaaggtaggctggcagattggggacccgggccaaggaagaattgctattgtggttatctggaggcagaattccttcttcttcggggcaggtcagtctttttctattaagaccttcaactgattggataagacccaccacattatagaggaccatctgctttactcaaactctactgatttaagtgttcatcttatctaaaaaatactttcacaggaaacatctggaataatgtttcaccaatgatctgcataccatggccctgcccaagttcacacataaaattcaccatcccagggttatagaagaaatagatgagggaagtcactgtgaggaaaaggacgaagtccatccagaggaagtgaggctggcaggaactcctgcggacatttcacaacactgaaagttcaaaggatacaattttggaaactgatccaatcttagaaagaaatatgacaattcgccaaggcatagaacaagatgctccctctgtatcattagttaaacaagaagctggcaagcatggttcaggctattcttgatagtttttacacaaagaaatacaacacacacacacacacatattttttcttagggtctcactcctgtcgcctatgctggagtatagtggcacaatcacagctgactgcagcctcaacctcctgggctcaagtggtcctcccacttcagcctccttggtagctgggactacaggcatgcaccaccatgcctggctagtttttatagagacagggtttcactatgctgcccaggctggtctcaaactcctgagctcaagtgatcctccctccttggcctcccaaagtgttgggattacaggcgtgagccactgctcccagcctacagttatattttcaatgtttctaatgttctaaattgaagtataagaaagagatgttagttttacctagtttttcatttccttaaacatttatagccaacagtaagagagttttagtgttttgacagaagattgttaaaggtcacagaataatcttattttatcctgttggtgattgagatctttttgtacactttcagt

SEQ ID NO: 58990 - DNA, 575 bp, Homo sapiens
acaggcgtgaggcactgcgacaggccctccttttctgaccctgggcaaaaaggcccctgcaaagttccaggccaaggccctctcagccctggccaacattgtcctctctctgcagaggctgggatactctacagtcccaggaagcttccaaaaaggagagctcagtttacaaccaataaaaataactcaggggtgacaaacagctccagggccccaggggacgctcttatgcaatctgccttgatttcacaagccctacatggagctgtcagcagaggcagactgagatgcacgccctggctgacaccacagggcaaggcccctctggctgcaatgactgggaacagtgactttggctgtgactggaggtggctcatttacaacagaagacatgcaaaaatagcgcagctgatggattggttggttgttggttgactgactgatttaaatacatagtatttctttttctttttaggcaaagtatactaacaatggatgatctcagtagaaaattcagagtatgcataggccaaaaggaaacaaataaaaactaccagctgggcgtgatggttcac

SEQ ID NO: 58991 - DNA, 650 bp, Homo sapiens
ttcctgcccccacagccccctaaacaccccaagaatagcttctagcccagggagcctcgggaactgcctgagaacaaaactttcccgaaggtgcagactctggccagcggccatggaaccaggcctttccaggacgattggtgcaaccaggggaacttgcagctctctgcaaaaggggaatcctagccaggcccgaaagaccctaatcaatagttcattaagatgccagctcagaaaatgcagggagacccagcataacgtgtaattctgcctgcgtgggctggtgctgggcagggttttcgcaagctggcagggcccgcagataacactgagcccaaagtgcaggctgcagtccgagcacaaggcaaacacgaccctccctaagtggcagatgtgattcagtccaaaggttcaagtgcggcagttacattggttatgagattttttccccctttataccaggagctggcagtgtgggggagggggagaaaccaacacttgttgagcacctactatgtgtctgactctgagctggacacacattaggagaaaggggttcaggaccaggcaaaaagtgggtttgggtatttctgggggtggagttggacatcattcctctttcctgcctccctgacgcgtcctccattcat

SEQ ID NO: 58992 - DNA, 1200 bp, Homo sapiens
tggggctgaagaccctgctcctgggtttgctgtgaggactctgcgagataagagatggaacatgtggatacaccattggcatatgatgagcactcaacgtaaggcgactatttggcaacaccccttacttcattgttttatctagtacctctctccaaagctcgtggagtgcaacagacagcatttgagttagacctttgcagatcgctgctgctttgttctcacttgcaatcagctcacagctggtagcgtcccctcatgggagctctcagaaaatttgtctcttgctccccatccccggccccaacttgagtcatgccccaggaatttgggagagggcaccttcagccagtggtgtggcgatttttcctttctttctctttctctcttttctttcttccttccttctcttttgttctttttctctctttccttcccttccttcctccctccctctttctttccttcttccttttctttctctctttctttcttttctttttctttctttctccttccatccttctctctcctttctccctttcttttccttccttctttccctcccttcctctctttctttccctccctccctcagtccctcccctctatcccttccctctttccctccctccctccctctcttccttccttccttccttctctctttttcttttcttcttttctcccttcctttctttcaccttctttttgtaattgtgccgagttgctgagtgaatcattaagggagcgaattccaagtgcatgagcgtctctgtgtttcccgggacgggtttgggccaagacaaacctctgtgatgccaacagcagttgcttgaacagtggagctcagagctggcttcccggcgccgcttgcaggggctctgtttgaactttctcctctctctttctacctggtgattaaaggagccacatgtaactttctgcttagtcctctttctccttctttcccggtgcacaccctgggaaaggctctgcgaagtcccacagtgtttctttaggagactgggcggccccttgatttatgttcacttggcaacgtaaaattgaaatggcctgaggacgctgaataactggaaaagggagatggagaggaggcctctgggtgtctgattccatgtagctcatgcctggcccttcccccgtagaccagagccacggaccttggagtccatgggc

SEQ ID NO: 58993 - DNA, 547 bp, Homo sapiens
agtgagcatgtttctgtaaatattcattaattcaacaaaatggccttactatgggtaaggcgctgcgctagttaggtctgggaataccaagagaagagcattttgaaatgacacatgtttaggtaaaaataccttgtggttaaatgccagtgtctcttgctcaatttaggatagtgagtagctgagggcctatggtggcaagctgggggtataactttccctagatgatgggaatagtcttttttgtttgatgttacttctgctaactatgtttctcagagcaaaagtaaacatgaagggccaagggagttccacaaatatttgttcttcagttaatattaatgtatgttcgtgtttacttgaattttcaagtgtactctgaattggtactgactggccataaagaaacgagcagcaaaactgataaggacaatgagaagacaggtgctagtttcctttttctttttttctttttttttttttttgttgagacagggtctcactctgttgctcaggctgccgtgcagtggtgtgatcatggccactg

SEQ ID NO: 58994 - DNA, 762 bp, Homo sapiens
tctgcaggcgaggagcgcatgagagtcgggctgggtgaaaccggggctccatctgcctgcgtgctttctggggatgtctgaaggtaactttgtgctggcgccccttgccaggaagctgagaagccttctgcagcgccacccggctcccatcccctctccgcggaataagctggtaccaaagccagcccctggtgccgctcaaccagatggcaggggaagcaaaacaaaagtgaccttgttagcagaatgtgtcttccccgggagaagctatttttgttgtggttgtgaactgaagtcgtctcagctgaattctccttccctgcgagggctgtggaatgttaatttgttccaaagttcagtattttgattagaaccaggagtgccagattttgtcagaaacattttggaatggggtaggctcacacacactctctctctctttctctctcactctctctcttggccgctgtacaaagtaaatgttgttgcagcagctgccctgggggaacagcccattgcaaatcggagccgggggtgaaccggctcctccctgttgccgtgaccttattgccatagaggcacccagactagggacaaaagtggagacaccctttcaattggagagaacaaagagcccagcacagaacctggaacggaggggtcctcaggaaacacgtgtgagctgaaaaaaagaatgaagccaggcgcggtggctcacgcctgtaaacccagcactttgggaggccaaggcaggtggatcac

SEQ ID NO: 58995 - DNA, 1028 bp, Homo sapiens
gtttctgggcctcttttttcctctcccaggtctgaaggggcctcagtttggggttcttaagggcccagagacctgtgaacagttgctccctcccctacttagtggcccacgtggaactcaagagtatcccgctccgtggctgttcagaaatgcagcagcacagcccccaggcagcaatcgttcaggagcgctgggaagcccacagccagcctgagccctccgagatgcctctagactctgggcccgggatcaatacttgggagggggagagcagatgtgaatgcgatgcgggcacacgcacagcgtgctgctggaggcccagctcagaggagctgggccagcctcccccgccctctcctttctccttgccttgcgggggccaagagggctgtggagggctctgctggagtctgccatctgctgctgaaaacatctgcgcttgctgccttccacgcagacgagctgtccgtccttcctcctccccctcttccgccaaggctattcagacgggcgtgcaggctgcgggcagaggtcaggaagctccccggcctgtccaggcacgagacagcaggcactgcctctttggtacctaggcagctgtgtctgcgagtccctggctctctcccaggtgccctgctttaagaaaatccaataggaacaaagtcctgtttgcaaagtggacacctgcgggcaatgtatgtctctgtctgcattgcacagagatcatcctgagcgattcaatgattttttctctctgtgggttctaagttcttaaccagaaaaggagatgttaattgaatcacctgggaggtttttcaacatgcacccggccagtccccatgtttcccactctcagacaaaacaggtttggggagaagagtttgttgaaagaggtccctagcacccagtgttgctgacagatcccctccccacctctccctgctctgctacccttgcgcatttcagcttttatttaaaagtcagtaactacctacagtggaggagggggctttaaagctgaactgttc

SEQ ID NO: 58996 - DNA, 461 bp, Homo sapiens
tttattagaaaatgggagtgctgtatatttaaatttttaaaatgtatacagattaggtccataattcattgtttctataaaatcatatctgtggcaagcccctgcctccacagaaacaattttatttcatagagcaatctatttgtaagcatggaaggaccattatagatcctaacagtgtcctttaagaatgaggacacagagttgacccacttctcctagtatatgttggaattccaaattctatcggtttatttactcatttattgagacggaatgttgctctgtcgccaagcctggagtgcagtggcgcaatctctgctcactgcaacctttacctcccaagttcaagcgattcttccacctcagcctcccgagtagctgggactacaagtgcgtacgtcatcgtgcccagccaatttcttttgtatttttagtagagacaggttttcaccatgttg

SEQ ID NO: 58997 - DNA, 738 bp, Homo sapiens
cagctgaggcaacagagcgagacttgactcaaaagaaaaaaaaattgatggaattttggccgtatgcagtggctcacgcctgtaatcccaatactttgggaggctgaggcaggcggatcacctgaggtcaggagtttgagaccagctggacaacagagcatgaccccatctcaaaaaaaaaaacccaaaaaacaaaacaacaacaacaaccaaaaaaaaccacagaagaggcttgactgacagccaaggagaaaacttaacgacacacacacacacaaaaccccgaactggtagcaaacaggatggactggtggctgcatgccaaagtcctttgggttcacatttgacttcagcttagagggacagtagccagcgtttccctttgtcggaactaggcagattatgggaagaggctctggcactcttaaaattcccctgccctcacagacctaaaattaacatcactgtttatagtgctggctgtggatgtagaatatcatattacagtagtaaatgatacgataaagatatagtaatccaatattggaaatctgaactgactatgactaccaattgcttatgcatttaacaggtcataattattagcacttacatcactgtcctttgtgttcaaggatgacaccaacggatactgtctctacatgtggccaagatcacgaaagcatgagaactgtgtaatctttctctttaaacagcattttgagatataattcatat

SEQ ID NO: 58998 - DNA, 1000 bp, Homo sapiens
acgaaagaaagagaaagaaggaaggaaaattgcaaatcttgtgtgtattttaccacaatcaaaaaataaaataaatgatagttaccaccaccgacaaacaaaagttatttttcaactcccaattccccaccttgcccttccagatcttctacaatcgatctagcaacaaagcatccagttgaggtgcaggaggaaggggaatggaggagaaatgggaaagaaataatagtctctagccctctcattgttttttcttaacccaggagtccaaaaagtccccaagaagccacggaccgcttatcccaactgtgaaggaagctgatgcgacatcaaatattaaaagggtagaggaaccagcatagttttccatataaatgaagctacttacatatatgaagattgcttttaaaattcaaatataattattttttaaaaggcatcccgcgagctctgtctctctcccagcactgacacttctgggctgttgtcatgtgccagtgaggtgcctgttggcagacagcccaaagcactttgtaacatgccctccagatcctaagtgaaaactgatcaaagaattggcaccagcaaagacaagactgaaatcagctctaaaaggggtggggttggactattgtccctctttgtgggaacagctgcttaacggggcattggagcggcgtgattataatatgcatacggactgctctgttaacagaagccggcttaaagtactccaggggcctccaccttgtgttttggcaaagggatcttcgaggatgctgtgtcaaacctttttgaaaatgtctccttgacacggagggtgaggaacggcgtctgcgaatctcattacacagggtcccacgcctccctctgctgttctccggctcccgtttcttggctgccgccagtgggagtcgcacgggggtcacctgcccccacttttaatcaggacggggaaaaatgcaccaaaggagtgccgcgggttacctgagcagacccg

SEQ ID NO: 58999 - DNA, 569 bp, Homo sapiens
gatataagaatttggggatttctggacagatctaggctgttgttatcaactactggcatcaacagcatacctccagagatcacctgagtatttaaacaatggcccagagattacctgagtcagatagagaggaaggcagaggacggagtcctggcgcaccccaccactcaggggtcacaagacagagaagggacaacacgcgactgtgaggaggtgtctgaggtggcagaaaacacaagtcacagaagtctggtagtcacatgattgcccagacatcccggccaataaaagggacttacaacactcagcctctctgtttgcctaaggtggcaggtcacgtacaattccctattcttcccttttcacagctcccctgccaatccactaaatgtagagtgaccacatagttttatcaatgttctattcacttatatattttatttacacacttgagctttgagagtaaaaaggagagctttttataaccatgtcaggacaacagcataacccattatcctgggtgcaccctggggtgtaaccaccctttctacacaactaagcactcaacc

SEQ ID NO: 59000 - DNA, 1442 bp, Homo sapiens
accctcgccacctatgtcttggtttcccccactgtaatactgggaaccccacttctcccaggcctgctgcgaagatgaagccagcaaatgcacgccctctcttagctctggaccgggcaggtgaaaagcagggaggtgttcataaaagcagtccccaccgctgaagggtcctcaactcggggttctagtcccagctctgccctggcctagcaaccccttcccgctgcagggaccaaggcggtgggcaggtccctcacccgtgctgagaccgggacaggaatgcgcacctctccccaccctcggacgccccggcggcgccgctgcagaagtcgggaggtcggacaaacgcgaggagtaaggaaaaagaggaggaagggaaggaaggaggaagaacgaagtgaggaaagaggatgtcagggaagaaagggagtaaaggaagaaggaagggagagggggacagaaaggaggaggacggaaggaggaagggaaggaagaaagacggaagggaagggagaggaaaaaggggaggaaagaagaaagggaagggggaggaaggaaagggggaggaaggaaggaggaggaaggtgaggaaggtaaggaaggaagggaggcagggagaggggaaggaaggaggaagataaggaaggaggggaggtaggaagaagggaaggaaggaggaaggaagggaaggggagaaagaaaggaagggaaggggtaggaagacagggaggaaggaaaaaaggaggaaggtaacgaaggaaggaaggagaaagtaaagtaagggggaggaaggaaggaagaagggaaggggaggaggggaagggcggccactgacctgcttgaaggtgctgctgaggaagtagacgagcgacagcccgaagaccagggcgagcacccacctcttccgcagaagccggcgccacaccatggccgccaggttcaccatcccggcgcggacgtggggcgcggcggccggggcgcggaacgcggcaggcccgggtcccgggcggcatggcccctacgcgcccggcagccccatccctccaggcaggcgccggccccgccgcccgcagcccagtctgctcccggcagccttgggcgcagccccacgtgaccccgccctacgccccgcctccgctccgcagcgacaagggctagtcgcgcaagatcttctcaccattggtccctaaggaacggcggcctcctattggttaagtgccgggaaagggggcggacaatcgcgtgagtgctgcgggcgtagctgtgcccgggtcctagcgccggacccggcgacgccaagaaaccacccaataggaggccggaagcatcggaagtcacatgctgcccaggctgcgcgggtgattggcttggctggacctgaatgatgcggctgtgattgctgaattgtctgggcaggtaaaaagagaacgcgattttttttt

SEQ ID NO: 59001 - DNA, 1441 bp, Homo sapiens
cctggttcagcactgccgttcagtaaatgtcatgtcccttccttcctgtcgttcctggctgtgtatgttgctggaggtcttctgaggagtggtgtgagtgagcagtctctaagcgatgggagaaatctgctgctggcaagtgagttgtgaagcctctaataggctctcactggaccctcttcaactgggtttgatggcgaccctgtcggagagagaagggagggtgtatcgtccactgtcaacattcggaagccttcctctttttctggggaaggtggtgtcgagtaattgaaaggctctgctgtagagtcaagtcacctgggtacaagtcccagttctgcagcaagtaacttgacctctccgagccttgtgttctcatctgtaaaatggtccgtataattcctctacagtggtctgtcatgtggaacaggacccagcattgcgggggcacgccgcaagtgggaccgttaccactgtttacaccagagcaaggaggaactggggtaaaggtgcagaggtttggggtacaggtaaggagaagaaaaaggctgtcaaagggctcattcacatcatggaggtccgggttcctgcgccacccttccctacgtgggtaatctggggcagattcctttatccctctgatcccgtttcttcgtctgtaagacacagctccacaacttccttcactcagtggctgtgaaatcctgcaggcaagccgcgtcgcatggcccctgacttcaagtttaggggagctgatgaggtcactccctgctggacaaggggtcttcggggtgaaatgtccaaataagagagcggggagtggacgcgcaaagatgcgtcaaaaggatggaaaaggcagctttgcccttcgcaaactgagatctcctttgtccgcgaagggctaagagcctcaggctcgggggcctggtaccggcgcgggacgcccggaggccagacccggagccggcggcgcgcagagcggggcggcccggggcgcggggctgtgacctcatcggccggcgccgtcccgcggggccatgagatcatgagatgccggcgctcgccgaggagtcgatttgttgggagcgcggggacagccggccgcccgacgcggtgatctcatccgggcccgggggaggaggaggcaggcggccgggccagcccgcgccgccaggagggggattaatggctgccgccgggtggtgacgtcaccggcagcacccgttgccaggcaacgcgcggccaccagccccgccccgctggccccgcctcctacctgctgcgcttctttccatcctggctcgcccttctcttgccttttttcctttttcttttgtattgaggcataacttacatactgtggagtgccctaattataaagctcagtggatttttacaaacatatgtaatcactcagatcaaagtatcaacaaagctgtcc

SEQ ID NO: 59002 - DNA, 1090 bp, Homo sapiens
agatttaaatgctgaattcttggtgcctggcatatagtagttgctgaatgaatgtttgttgaatgaaggaacaatgcttggcgcaaagtcagagcttagcaaaagtgataggcagcagagctgacgggctgaggggcagctgcgtaaacctctgctttgggcgccacaagccacaagccggaccaccacgtgcgtacaggggcagcgccgggggcgtggcgggggcgtggacgcccacccggaaccctagagcggcggcggcagcggcttccggccgcggcggacacttccctgggcgggactgtctcgtggcacccggtggaaccgaggagaacgtggagcgccgggagcggcgaatatggacgactacagcctggatgagttccgtcggcgctggcaggaggagctggcgcaggcccaggcgccgaagaagcggcgacggcccgaggctgccgagaggcgggctcggcggccggaggtgggctccgggcgcggcgaacaggcctcgggggacccggcgctggcccagcgtctcctggagggcgcggggaggcccccggcggcgcgggcgactcgggccgaggggcaggacgtagcgagccgctcacgttctcctctggcccgcgagggcgccgggggcggggagcagctggtggaccagctcatccgcgacctggtgagtggccgtcgcctcccccccgcccatgcctgcgccggcccccgcccccaggacaaacccctgcagtgatttggagagtaactgtgtgccactagttgcccgagaaaatgagtagacgcacaaacaccaatgtttgtgcttgcataggggtctttctggaagcagcacttcccaaccagggcgattttgttcccccagatgtggcagtgtctgcagacatttttgggtgcctcatcggggtgtgtatgtgtgcatgttactgggcatctagtgggtagaggccagagatgctcctgaacatcctacagtgtacaggacaccacgcacaaaaaaattatccaggacaaaatatcagtaagtgtggggttgagaaatcctgctcttgaaggctacctaaactttgaacaaagg

SEQ ID NO: 59003 - DNA, 1041 bp, Homo sapiens
tggccatgccgagttcaggacccagggccaagtccccagcccggctgaactcgggcagagaagcgctttctccgccatttccctgcgggcagctcggccaggcctcccagggctccccgcctccgggccgatgcggggcgcgcagcctttgctggtcccgggagactcagcgaactcaggggaggacgctgggctccgggcaaagtgctctgcggccgctgcctcgctaagtctcccagccacccgcggggatgaggctgcctgaacccattttacagatgcgaggacgaaagcaggcgccgggcgccggctctcccgactaaggtcacccggccggggagcgtcggagacctgttcccacccaggtccgccgacttcaaaactttccgctctcgcgctcacgaatgcaaacgactctcaggtgtggggcgcgcgcgccagcgggggtgcctgagggacttgcccgcccggcctgaggcacctgccctgcgcttgggaagcctgggccccgctccctccccggtccgcagtcccccggccagggagttcccgggccagtccgaagctgagcggctgcggcactgagcatcgccgcggagctcctcgccgcagcccgcgaggtggccagcggggacccatttgaaagaggaggagactgaggcgcagagagggcccgccactggcccaaggtcacacagcgcggcggcgggccggggtccccaacagtggccgttcggaggtcccgccccggtccccgcgccgccccccgcgggtactcacagccggtcttgccctcgagctcccgcacctcctcagacgcggagtgggcagcgcccatggtgcccgcggcgggggccccggggcgcgcgtccctctcaggccccgcactggcttcggctgcgcagcggcgggactggcctcgggtccggcctcgggtcgggacgccggcgaaggctcggagccgcgggttccgcgtggggccggagcggggcctcatataacggcggagggcggcgcgccgcggtcctagcgcacgccggt

SEQ ID NO: 59004 - DNA, 1213 bp, Homo sapiens
acacaccaccacgcctggctaatttttgtatttttagtagagatggggtttcaccatgttaagctgtgctgccttgggcaagttactcaacttctctgggccctggtttcctcagttgtaaagtggagaattccaggtatatgcggctggcacagaagaaggggtcagaacagcatgagctttacacagagtggaatgttttgtgctttttggcaaagggtgtcctgtcacaggaaggtaaaggtgacttcatctaacattccagaagggtttgcctgctgattatgtcagcggctccagctcaggcaggagcagggtatgaatgctgaccttgggaggtggtaactgacatgcctctgaggtctgtgggaaagaacagcaaggctttccctacagcagaagcctcattggaatgacagacccaagcaaatggggttggatgagctccttgttcccccaagctgctatggtctaaatggctactccatgacaccttggccacctcgattccaagtcactcaccacctgaatgggattatttcacacttgagaggagagttacatttggttctgaagctgccgatggtgttttccacattttgggatatgggtcctgaaggcagggcagacacaccattgtagagacctgtggccccaagctgagccagccacacaagccgagagagcactggcccaactggagtcaaatgtgaatgagctaagctgaaggtttcaggaacagtctcaggtaagccccagcacacagtatctccagcccttataagactctgatctctcaagacggatgccttaaagtctctataatctggaggctcttggaggagtgtgatgtctctgtttctgttatccagcgctcagaaaaaacaaagctccttgagtccagaagtgggaggatggtgttcaacagcattcaacagggcatgacaagagacatagctggctggctttcttttctcttttttttttttttcgagacagtctcactctgtcactcaggctggagggcagtggcacgatctcggctcactgcaacctccacttcctgggttcaagcgattatccagcctcagcctcccgagtagctgggaccacaaggtgcgggccaccacacccagctactttttgtatttttttgtagagagggggttttgccatgttgcctaggctggtcttaaaactcctgagctcaaaa

SEQ ID NO: 59005 - DNA, 1946 bp, Homo sapiens
aaaacagagaacatgtgacagtctgtacgtggcctgcaaagcctaaaatctttactatctgcgtctgctttataggattgctgggaggattacaaagactttattaggccagtgcccggctcaaagttagcatgccacacaaaataatacgtacagtacagctattcacgtctccaaaaagcaattgtcccacatccaaattttgcattttgtccagttgatgtctctccttccctccaaaaaaaaaaaaaaaaaaaaaagacaaaataaaaacacgaagagctgcatcttgatcatcatggacagatacttttcagttaaaaagttgctggtagtctgagttcacttacttggagtatggactaaggaggggaaagcaaagagatgcgacatcagcagcagaaagcctgcgacacggcagctctgctcagttttctccgtggggaaagatcggaacacttacaaatgagaacgggactttaagtagatagtatgcaatggaaaactgagccggcaacagtacttaatgctggttttctcaataaaatcattttgctgtgtaaacgcgcttataatggggatctgttatgagtctcaggcaggcgacatgaaagccggcctttcaaaatctgattaggtggataatgtttgcaaacatgacgcctggcaaaaccggtctgattctaaggtaaactcattttggacataactgatgtctcactgagacagcttttcaaagcatgtctgcaaacaccggacccccggggacggtgcgtgcgtgtaggggagggaaattccagggtttcatatatcaagatgacacacccgctgcacacttctcttagaaagtcacgacgcacagtactgtgcgtcacaggtattgagaaacaccaccatagagtcaattgactttgtttaacctataaccttttttcctcccacatagtaggtagtaacatcacacggaaacagtgctctgaagacattctggacacatcgtatacagcacagccattcaaatcaacggcaacagaacgcacgaagaacctggttttctttcaaagcatgagcagttctcattttacaacatgtgttttaacataattcagaaagtgcaatctttgcatgacaaccagataattctcaaaggttactagtgagctgataaaattaacgtttggcaaggaggtcatggtttacaggtaggctgtccgctcaccaatgctcagaaaaattcagcagaacatacttttcatatttagatccgaagagaggtgagagacattctactcaagtcatggctgggctttctgtcctcaaacgaaattgggcaggccatttgcgtggtttctctggataagttccatttattaatcattgtacaaaaaaatcttggcattcatttgaagagaaaagaagttgctatatccaaatatttaacattttaacattgtgaaagttcaacgtttataacagggctttttaaaatggagaaaagttttggaaaatttttaaaaagaaacttatgatttattagagtacaggatccaaaacacgtttttagaaaaatataaagtgcccaaataccaacttacacaggtgatacaggcttcctggagccccatgaagcattcatgaagaaagacatttaaaaacagtctagatacatatgtacagctgggtcagtaaaggtaaaaccatctttcttgactttgatgtgtctaagaaaaaaggaaatcaatcaaaccagaaaaccaacaattgcaactctcagcatgctcaggttcttattaatgcatctcattcatattaattaattccgtattatcaaactttcccctttaaatgaaagtagtgtacaatcctcccaaccttggcgggccaggtgctgtgagtggttacgtttccagatgcaggttcaaatcctttgactttggatttgactg

SEQ ID NO: 59006 - DNA, 1248 bp, Homo sapiens
ccaccaaatcggcactgcagatgcccagggttgggctctactgtaacactggcagctggcccaggataccccaattcaaccagtgtcaacctgaggagttctttggaaaccagtgtgctgggataagcgctggggacgcaggtgagggcccaccacctagggcactctggatgaggtgggctctaacagcacctagcatgcttggtcggcatgggaaatgtgagaatccacgttttttcaatacacaggaatgattttcacttgccactcacgaattcagaggggaaaaaaaaatgctaaattgctttaatcgagacgaagaggatgtctgacacaactgcctcagtgctggaaaagatggaaaaggtcacagagtgggcaccaaagggatgcattcgttgagtttatgaagctacactagaaggagggagccacgtatatcagagttctaaaatcctgctggtcacttcagtggtcttaactcatcatggtatttggtattcagcaggcagcaggagaaactacatctatgcagaggttaaactagtagcacagagtagcagccctgtctgactccactattaccgcctctactgcacacagtgcctctgtggaaaaaactccacgtttaaaaagacacagacatacaattatttcgcacccattacgtttacagcccttagcatagaatttctgacaaggttctccttccaatttactgagtcctggattacagcctgcttagtgcgttacagcaacctggactctaggcccagatcggtcagactagctggcgtttttacctctgaattcctttcttagcttatcaaatcatgagtaatcactgtcctatttgctgatgcattgtgagcctgtcaaagtattgtgaaaactccagttttatgcaccatgttattatcttgcctttcagactgcgacgtgctggacctcaacatttactgaacactattctctgctggtcactgtgccaagtccatcaggttttttgtttcacttaatccttcccatttgaaggtcagtaatttcttgatcttcaaattgggaggattaggtggaaaaaaaaaaaaagcttttaatcactgccacttcccgaacaggactcaggcttagtgaagtgactttcccggggtcacagggttgtggagaggtggagtgaggctgtggctctgggtgtgaagatcaactcttggtctcaaccagtgtcatatcctagcaagagcaggagca

SEQ ID NO: 59007 - DNA, 1993 bp, Homo sapiens
ccccaaataacggaggggttgcaaaaaaaatccgttgaacccatttgagaaataatgctgatctggactccgtctacattgtgctgcgtgggtccctccctgctccctccacccccactctctctctggctttagaaaagtaaagctggcacagacaaatggcttcgtgttgttggataggaggaaaaggacacaatgactcttgcagccatctaagtgagtaagggattgtgagagcattgaaaagggagatacgaaaagagctggatgagctcatgcctgcagacccagacacatacaccagcaagccaaagcttagagccacatcaacagatccttacgtgctctgaaaagaacctctttgagaacgaggctacaatcttccgcgcttctaacccagctttttgccgaactttatactcttccaaccaattgacgtagtcggtggggctgtagtgtttcataagggaaggccacctacgaggagagaaacaccccctcagcttaacagaaactcaaaggcaggcggccacgaatccaaggcagccttggaaacagggacagcagtggcgtccagtggtaagagggaccccggcgagagacctagttcaaaaccccaccagcattcactcactcactcccggtgtgaccttggcgtagcggcatgaatgatgtctccattccccatctctaaaatggggacagttgtaacaacaacaacaataataataatgacaatgacagtgagcactgattgagcgcctcctaggagccggggccctgcgtgcgtgcctcccggacatcatctaatttaataaacacggtgaaaggtaggtctaatgatcaccaccactcaaagtctatgaacgaggctcaaaaaaagggaagtcgctccccccaaggtcacagagggagtgtgcagggccagatttcatcctggggccacgctgaaatctgtgccgtccacaaccagcccggggatgctgcgcccgcccgatcgatgcatcactgggtccatgtaaacatttcagcccgaagtcgggcacaaaagaagcgcgcaaaagggacgagccgcgccgccgccagcgtcacccttgacggaggacccggctgcgaggcgctcctagatgcgccatttggggacccgggggtccgcctggcgtggccccgcagggtccggggcctggaggcctttgtctgtctgtccgcgggaaggggtccggggtggggtccgcgcgcggggcggccgcggggagctagcggggcggctgcccggccccggggggcgcggggcggtgggcgcgcagccggggcgcggggccgctggctcacctcacccggaactgctccttccacaccttcccgctgctctggcacagctcgcgcagccgccggcaggtgctggagacacggccgatgtcggcggccgtcagcgagccgcagcacaggatgtactccagcacctcacccggcaggttgacgaggcagctgaggcccgctacctccggcgcggcctcctccgccagcgccggcaccacctccatcgcgctgtcgactgctgccgccgccatcttgtccgcgtacctggggccgccgcgcgcgcgcgtgcgagagtgcccgggcgccccgcctggccccgcctactggtcttgggggcgagtcctgagatcgctccgcccatccgcgggccacacctcccctgcatcggctgggggctgcgcgggtggcagcgccgcaaaagggaggacataattgggctctgtgcttggagccggcagcgcaagccgcctctagtccgggacaacaatagtagcactgattcttttaaacgtaattaatgtttaaaattaacaaataaaaatggtatctattctcacgcgtgctgagcgctttctgtgcgcattggacctttccgaattaccctgcgaactttctccccatattacagatggggaaacaggttcggagagtgagagggcttgctcaggatccc

SEQ ID NO: 59008 - DNA, 535 bp, Homo sapiens
ctttgccagctgtaatgcactatgaattaatatttaaagcgaatcctgtcactttcttatgaccagcatcctcctatcccattgttgtggaaaggcgtgcagcacagcctcatgagtgcatttcaaggcttaaaaatatagcagccagttttaaaacgctgttttgaaactccctcattttttcgtataccaggagcttcaggaagtgggagtggcctggatctctttcaagctccgagaggccctgttcttggctcctgcttccaattcctctctgaccattcaaacctcccccctccttccccaggagctgctcttgatctttccagtgcccacaatgggcatttgcctaacaaaatacagaccctgcccaggatcgcaagagtggtggtgccagggcaggcctcaccaagggttcgggactgcacagagtcttggcagaaagccccttcctactgggcaggatgactggaatcttccctgcccaggcctcctacctggctgaggccgctgagtccctccaaggctcctcctt

SEQ ID NO: 59009 - DNA, 1369 bp, Homo sapiens
tctcagagaacaggagaaaacagcagaaatgggggaataggtcccccagagagacccagaactcaaaagacgttctaactttcctactgtacttcagagctctatgcaaaggtgccacacgccatgacaggctcgggttggggtgtctgaaaacagatatttccaaaggaacgagcttagccactcccgaccttccctgctcgatcttggctcagtagccttgactaagctgccactcggctctgtaccctcctcttagcttcccagatggtacagctggaacctaccacatacagacagaactgaggagtgccccgtcattgggacagtctggctcttgcttgtcaaggggaaacaagagtgaacaacgtcaaacacacagacacacacacacatagccccgtctgtgagcccccccacgtggggtctcctgtcctagtcccatagcccaaaggcaccacgtgcagcctgcagtgctctcattagtgctgtcccctgggccgcactgatcaataacgcatcaccctggctggtccggttcagtcctagctcgggggtccccaaccctgcccgaggaaaagggctcaagtctgaggtgcagggaggccgccgagcagttgtccagtgctcccaggtcggtcggggttggtaccctctgatgctgagtctctggcctcctgagctggcagaggacagagtagggagggagaggtgacgggagcccaggcagctgggcgccgtcccgatgtccaaaggtcacagcctggagtggggagagaagggagagagtggtgagaggtcacaaggacatgatgatgtcatccgttgtgaatgacaccctctcagtgggccaggtggcttgagatgaactgttcctgtcttctgcaagaagacatggaagagatttctgttaactgagttcttactatatgctgggctctgccacacacctgatcccatttaagcctgagatgagcctgcaatataggctactaatattttcaaagatgaaaataatcagagacgaacttctacgacagaatcatacaatttcacagatgaaaacactgaggcttcgggaggttaagtgttttgccaaagggcacactgccaggaagcagcagggtcaggatttgaacccagaacttttcccacttgggcatggactaggaatggtcatctagtgtatggggctgggataaagctctgtaacagctagagaggcaggaagagggggtgggactgggatccacactgcagcctcctgctatgagcagactttgatgtccactgcagcaaaaggaactcatttattttgttgactgctgtattctcactcttagaacagtgtctagcacataaaagatgt

SEQ ID NO: 59010 - DNA, 3031 bp, Homo sapiens
cttccagaaaacacagaatgttcttgtttgttttaatccaaaacaacacccaacaatttgatgtttccctagcagcagtggagagagatggtttccactcatggaaattcaaggactcgaaggatggtggatcctaaccaagagggctgaatagcttgtatgtgacccctggtccttgcataggtccaagtaccatagtgatgagacaccagatggaaaccaaacattggtggatagttcctaaagatcgtatcgaggcagaattcttacttatacatggcctggcatttttcaggtcaagtctaatttcttttaagtccagattggtagtctgaaatccaaccatgaatcttaggagccctggggtaggggggcttccctgggggaaactgggtctttctgagatttagataggaggcccaagagccgacagtaccttcacaatttcttgagcaatctgcctggttttgttgacatccaaaacgattttggcatccctcacaacggaatagagcgtccgtcccttacagaggctgaaaagcaaaaggacaagataaattaatggcagtcgttcagaagaaggtgacccacaacagttactacaagtgacaaatgatggcatagacacgtggacatgccactattgtgcttatgagataataagtctgggactggacttcagatctggttctgggatggagatctgggaggaagttcttgcagattctttagaaacttggccaatgtggctgaccgacaaggacacccacagaatctagcctagtccagaaatgggtttgccatgtccaatccatcccagaggctcacaggtggaaagcagcacataaatcaaaaacttctgggtcctcagacgccactcagacagcattctgttggccattcacaccagctgcatgcacttaccaggagtcagtgtgtgaggacagtgatgaaagaccagcagagtggtggctgatgtgtattaagtatcatcagcaaacgatgcagtcaattgtttggacagggatgtgtaaacaccagtaataccacccccaaaccagacgcctgtctagataaagagtttttcaaactatgttcagcctcattgagttcatttcgaggaccagtagtttaagatgaatgacaggatgaaaaaggacattatgcactgaaagtaacaccttctcatttagttgcctgtatgctcatctgtcctgttcctccgcagtgagcacaattcccagcacgcacagagcaggcacccacaagctgtcactgaatgaatgaattctagattcatcatagcactcccagcccctagcaccgtgactggctcagagtatccaatgtgggccaaaagaagaaagaacgtcactgtgaaaattaattttccatctacatcaaaatcacagtttgaattttcctcttttaacctgtgatgttattgctaaaatactcctggcattgtgttcattcatttggtgtttactgagcccttgttgtgtactgggctttgctgagattgtatttcctgtggttgaagcaagagcgctggcatcagagggatctcagaatcccagctctgctccttacttactgtatgtcttgaggtgggttacctcacctctctgggcctcagtttcctcatcgatcaaaggaaactaataatacttaaccctgtagttgaatacgaggattgaatgagataaaagagttggaaacaggccttggcatccagtgggaagtatagcacagtggttaggagcatgggggcttagagtaggactaacgggttagaatcctgatctgtcatttagtggctgtgtgaccttgggtgggtgcattaacctctctgagcttcagttttattatctgcaaaatggggccaacagctgctgcctttctgggttgtcaggagaaccacatgaaatcaggcatgtaaaggtgtaggcacctctctatgcctagtacatttcatggtaactttccatgagatcactggctattataaaaagttgttaagtgattaataaaatagtaaacagacacacatacacttgtacaaatatatataagtgatatatctatacacatatcacaactgtttatctgtccacccatccgtatactaatctaaaatgccactgatagccacccatgatctttgactaacatttttttcttcatctgcttaaggcgacagtccccgggtagctgactcacagaaagtctgattcacatgtctgaggaggtcacccagccagttggcaggaggcagcccagaatgagtcagggctgaccctgcatcccccaggttgctgtcccaggcagggcatttgctgtggctgctggagcagaggtggaggaagggtgggcagagcagccaattactccatgttgacatttcaatatttgagactgtgggcagagtccctcccctgggtacttagttcctgaacagccacctacactcatcacaggccagatcccagaaaataccctccccactgcagaccgcagagcaaatcaccgccaacaggctccaagactccctggactctcctgctcagggtaactgcaggaaagtctcaagcttcagatttccacgccttgtcttctttccctccttacaacctctttcccttcagcagctgctgaagtctttgcttctctcactcccgtatgacctcaagagcttctggagaaactaccgcaccagtttggcacagctactaaagtgaaatatacatacaaataaccctgatatggtttggctgtgtccccacccaaatctcaccttgaattgtaataatccccaagtgtcaagatcagggccaggtggagataattgaattatgggggcagtttcccccatactgttctcctggtattgaataagtctcatgagatctgatggttttataaaggggagttcccctgcacaagcgctcttgcttgccaccatgtaagacgtgcctttgtttcccctttgcctcccatcataattgtgaggcctctccagccatgtgga

SEQ ID NO: 59011 - DNA, 851 bp, Homo sapiens
gtatgcacgacagacctagtccttaatcctacaagctgaaggtctagtggagaaggaaggcaataaacaaataaatgagacttcagagagatacaagtgctgtaaagagaatgcagagacttattggatagagagtagatggagttgggggcatctttagccagggtgcccagggaaagccactctggggaggtaatctttattctgagagctgaatgaagaaaaaagccaggcatgtggaaatctggggagagaactccaagctggggaaaccagccagtgcaaaggccctgaggtaggacaacgtgtggcatgcttgagtaacacggcaaaggccatctggctggaatccaaagagtgtctcccagtggctactctctacaggtgtttgccttccaaataaaagacatagatagctgggtgcaaatagtccctggcgctgcctggcttgagctcccaaggcagttggtttcaaagtcagctgttatttcaaaaaacactcgagctgtcagagggatttacaacccctctgctgctcactcccttttaagcattccccacttcttgaaactcaaatcccagttaattgtcccatgctctttccccctcccttgagtaaataaatcacattccaagttacaggtcgcacactccatcaaattccagcctccggcaatctctaacttccaagttgctcatgaatctaacactcaagatattaaaccttgggactctggggctttataataaaaaatgccaggttagcttcctataaaaatgggacatgccagaaagcaagtgagaaatgccagctgtctgccacctgcttaactcaacgtgtgtccaggaaa

SEQ ID NO: 59012 - DNA, 526 bp, Homo sapiens
tgagataagatgatggtctccgttgatggagttttctcctgcaaggcactgtcctgagaacttctcgcaccatctcccctagtaggagagacatgatttacaaatgaagaaattcatgtgcaggaaggtaaagattacctgcgccagggtcctacagtgagtaggcaacagggtcaggattggagttcaggactcaaaccttcacctcttttcaggatttcataagctcgccaggaaaagatgacttagcagagcaggtgactccggagattcagagagcctgacctctgaaccctcatttgctcactgagctcagctgagactaccccattccaactctaggcctttccttccaccccccaaattcagggcagggccatgttaatccttatcatgcatttgctgcttctgtttgggaattcccagctgctacccagagacaagcaaagcaggctgcaggtggctagagctagaaggtctcagagctgctggatgcatgcttgtccacactggcccaggggagggg

SEQ ID NO: 59013 - DNA, 1504 bp, Homo sapiens
ctcgccccatcctaccccaatccctgggaaaggatcctgatgaaattcactggtatcgttcctaagagccccacataggtggaaatggcaaactgacagtcaggataccccagagccttttctcttggcttgtgccctttggcgctgggtttccttgatgccatcactattctaacccatatgcattttgacacattgaaccaaccagctgagtgcaagaggaggtaggatcttggccatcaggaaacccccagagtagcgtgggcagctgccatttaaaaccttacgtgggcttcccattgccgtaggataaacactacattcctttctatggcattcaaagccttgcaattatctggcctctgcagcccctttctatagctcctcaaacgtaccaatctcatacctaccccagggcctttgcacctgcagtacctctacctgaactgctctttctctgcctcttggcatggccaatgcctcttcattgctagatcctagctcaaatgtcacttcccctatgaagccccctctgagcccctcttcaaagtagccctcccatcactctgacccatcgatcaccctgactgtggccttcacagcacttattacgatgctttaatgatcttacgtgtttgtttaacttgttattgtctgtctcttctggaatgcaaagtccacagtacaaactgtagacactgtgttctgagtgtctatcatgtggtctggcactgtgccggggtccgatgaatgtctgtggaaggcgcgttagtggaatgtgctagcactgaagctaacagatggctctcaggcccctgcaggtgctgatattgggtcattctaggccctcacccattttggactcagctgcacacctctcagttagtgcctgagagaagaggtttccaaggtgtgcccgaagctcttggcagttgtaaaggcagtttgctccaggtgggaggaaggacccgctttctttaaagcagcaggtctcacaattgagcatgaacaagaattccatatagggcttcttaaaacccagcttgttggacacacccgcagaggttctgattcagcgggggagggtgggagagagaattaacatttctaacaagttcacaggtaaggctggttagggaaccacatgatacgaagcacagatttacataattttagagttctacaaaataatttggggagtggggaagggggtgacgtgggggcttctgtgagggactgtacgttctctgagttctgcacagcagttttgtgagctgctaatatttgtggaatgagtgttttgcagggaaagatagagtgtgtgcatttctttgaggggatgtgggaaagagaacaggagagaaagaagagaagatggtgtgtaatttagcgtatatatagaagaggagcgagtgtgtgtgtgtgcgtgtgtgtgtgtgcacgtgtgtgtgtgcatggttgtgctggtgccacaggaatttacagggtattggagaagcacata

SEQ ID NO: 59014 - DNA, 1487 bp, Homo sapiens
ggttgaggcagagaatcgcttgaacccgggaggcagaggttgcagtgagccgagatagcgccactgcactccagcctgggtgacagagcaagacaccaaaaaaaagaaaagaaaatacagaccaacaaaaaagaagaaaataaaagtgatctagaattctcctcgcctcaggaaaaaaacctaaaatgttgatatcgattctcctcagtatctcagatcacaaggaccttgtcctctgtgttcatgaactagaccttccagcgacacagattaacccaactggaagtttctgtttgtttttctctggagtcgttttctggaggttggttccctaaactttttgggcgaggggcacggattccggagataggtaggttgcagttgtgtttgtttggggttgttttcatttccaaatattcacctcccagcttgggggccgagaggtatctcaagccttctttcgcaaaggcatctatattcaagacccagccgttttactcggtgttgttttttttcttagatttttttttttttttttgagccccggcagcttttgttcctttgaatttaagtgtttgaagcttggcgatggcaggaattggctttggccttgagatcttaatatgtaatgatgactggggctgcagggggccctgcctctcccgctgccctgctctggaagcgcctgggtatctgagagttcagagcaggctggaggggcggagcttggagggacgctggcggcccgcgcctccggtaacctagcaaccgacgccctagcaacgcgagggggcgggaccgagggaggaagtcggaaactggtggccgcgtctcgcgagagttgcttttgcgcgcgaactgtaagtgccagggtctcagggtcaggtcgcggctggtcactgtgcaggcgcttgggtgacgcgacgatctcagcggatctggtcaccttcgtctccccgccatggagacctcagcactcaagcagcaggagcagcccgcggcgaccaagatcaggaacctgccctggtaggaggaggccgagcggcggcggtgggcagagggggccaggcggccgcgcggggaggaggtggctggggtggcaggtgaccggaccccaacccgacctcttcccgtcgtctccaggcctgcagccgggaccgacctgcagaggtttcccccgacaccccccagctacccagactcgtccgttctgtttagggcttttgccagttctcaccctttcacccccagctccatttgccgaagaagaaggcggctttcgcacctggtgacagcacaggggttcgatcccgcgtctcctgacgcctgcaatggcctccatgccaaaatgccctcttcccactcttcaaaacctgcgatgcgactattggtcacattttaaactagtaataacgctccctggtcaacttttattgaatggcatattattagattagcagacgccctgttagatgttcgatccttac

SEQ ID NO: 59015 - DNA, 2731 bp, Homo sapiens
aaattaaggggtacagggtttctttctgaggaaataaagatattctaaaattgattatgtgccaggcacagtggctcatgggagaaatgtgtaatcccagcacttcgggaggccgaggtgggtgaatcacttgaggtcaggagtttgagaccagcctggccaacatggcgaaacctcgtctctactaataatacaaaacttagccaggcgtggtggtgtgtgcctgtaatcccagctactcaggaggctgaggcaggagaatcgcttgaacccaggaggcagaggttgtagtgagccaagattgcgccattgcactccagcctaggagacagagggagactgtctcaaaaaataaataaataaagtaagactgatgatggtgatggatgcacaactctgtggatagactaaaagccactgtattgtatacttaaatggacaaactgtgtggtatataaattacatctcaataaagctatgggaaaaaaagccaacttggggctaacataatcttgacagaattgactttcacatatacagaacttggggctctggaaacccccatgatcaattcctgaaccatgagccaccttccctctctctggttcttgggcacagagatggcaaaagaacaaggagtgtttggaaatgcgccggatggggccccagtacgagaatacttacaactgctcctccaacggccaggggatcagtttgacgatgcagtgtccttgagaccaagcaaaccaggagccatctggggagaaggcgacgctccaggtttcacagctggacttccaatcaaactggtgggggcgcccgggcttgagttcggccagcagcagcggttcctctggggcaggagacaacatgcttcaaacacacacccccttgctccctgaccacccagacacaggaaagccactgtctccctgtggcaaagagccacactatccattcccagagggagttgtcacttaaatgacccagggcaataacagcagccacaggccacattccaccacggttactcaatcctggcactcctcactgctggttaaccatgactcacagtaacctttgtgcccatgaacccagtgaatggaggcctcattttcctatgaatacttgaaggggaggaaagtggagagacagccagaccaggaatatgctagacggtgctgattatggggccaaaatagcaaggccttccaatgcatttcaggtttcttcagaagaacctgctgctgtcaaagaaggaatatgtgaaactcaaaggctccctctcactcgcctgcatcctccccatcatcaaggctaaaaacgttcagcccttgccctgcttcctcacactcagaagtatggattccatctccccatctctcccgcttccacgtcctctgtctggggttaaaccttcatctcatctcacccagatcttttgctacagtctcctgatcagtcttcctacccctagagatgctgctaaagctgaaatacccacacatcacatcatttctttcaaatacattagaaagctcccgcctgcctacatcataaaggcaactgagaccaggactttcaccacatgccatctgccccagcccatcggtccaacctccttcccttgtcccctccctgcaggccacactctggccacaaaatctccttgacatgcaaggggcttatttacgttcacacctggacccacttttgcttatgagaatccctagcttctcaaagtaacaagaaagaaagaaaaaagtaataatcccacctagattcacaactaagaagcgtaccctgatctcacactatcaaaacggaaataagtcgcaccttgtttatttcattctctcttatgtaaccaatttctctctgccccccgccctcgtcatcagtgtctaagcaccttgttccaacacccagatcattttgtctttgtttctcccaggacctagcacaccatcttgtgaaagagtaggcaccagattggagcttcttcattgactgacccacagttcctagttcagttctctactctgatggaagattctcatggctgatgaagcttataagttaaaggccttcagaatgaattttttgaccattatgactgtgatacttactaatataaaaactggcttccatcctgaataaggtcacttcctgatgtgtccattccacacaaggaatgtggaatgtggaagactttgaccctggctgttaccagatagatattcatttttaaaacccgtatttcatatattttaagacacatctttatatatcttacattttgacctcgctgaaatcaggatgtatcttataatcaatgacttttcatagttaaataggtagtatttttttctcagttatacatgatgataatacaatccatggtatcttggattcaataaaacagatggtagagatgcatatgtgtatatttataaaatatttttgccaggtgcagtggctcacatctgtaatcccagcactttgggaggccaaggcaggcagatcacttgaggacaggagtttaagaccagcctggcaaacatggtgaaaccatgtctctactaaaaatccaaaaaaaaaaaaaaaaaaaaaaaattagccagacatggtggcgggcacctgcagtcccagctactcgggaagctgaagcaggagaagcacttgaacccaggaggcggaggttacagtgagccgagatcgtgccactgca

SEQ ID NO: 59016 - DNA, 3943 bp, Homo sapiens
aaaaaatctaaaacattacattacaatttatttgattacatgtagcaggaatattttagacatgttgtattgaaagagtttttaaattgtcacctagttcttttttcttttttttaatgtggctacttgaacattttaaattacatacgtggctcacattagacttctgttggtcggggctggcctagagggtgcctggcacatagtagacgttcaacaaatatttgctgaatgaataagtgaagtctaaccattgctctgaagatttcaactgttgcccattgtatttcctttacaatgggctttattccatttgaaaataagttaaaactctggccttttttgtacagtaacttggcagctctcaacaaccctgcccacaccctcaaaacgaagttgtcaatctttaggaaaaccccagaactggaaacagatttctgttaaaaaggcaggctagctacagattgctttcagattgaactgtaaggaggcaatggaaatcaaacggaagctataaaaagattcacataggatctacacaaacagtaggggcccttttaaaaagaattctacgggtaacactcactgaaaagaaagcccttatctagatgggaaggagagagagctgcctttaactcaatgcctgacttcagcaaacaaagaaatgtcatttcctaaattaaaaagtaacaccaccccagggaatacccagatttcaaccttcccacccacagtaacaagccatcagcaatcagaaccctccagaccaggatgaagcttgaacttggctgcaagattaccatgaagttctggaacaaattctgagccctaggccttgaacctgctctgaaaatttctcctaaggaaattacatttaaactcgggtccttcaagacctgggactcccggaatcaattctaaatctatcccaagtggggttccgagggaaggtcgttggaggggagagggccaaggcgtgcatgcgtcttggggtttttttccccttgcataagagacacacctttcccactgagattttatgttcatctgggctggcttgaggtatatccaatatcctctgacttccacgctgtcttctgatggggatggcagttaacaagaatagaggcaaggtccccacccatcagtgtatcctaaatttgcctgatcatacatgtcaccagggatcagcgtctccagtcccgccccacctccactgacttaatctccagtgggagaggctgggaatagattgtttcaatagggaacccagaccccagaccccatttttaccgggtcccagccaccctccgaggaaggtactaggattatcccattttgcagatcaaaactgagacgtgggtggcggtggttcagtggcttgtccactgtcacgatcacacagcttgtgagggacagaggtgactcccatccagacatgcaagtgcgtcccctggcacctgggtacccaggggcacccacccccttggggatctccgttttagggcttggtgccccccgccccgagtcccacccgggagccccctctgtcccggtcgggggatctcctcccgcagaagcccgatcttcccgatcctgtcgccggcgggagtcagggtggcggccactgacaacgaaagtgaaacaaagctggtcgccgggcgcgcacccccgccggccccgcgcggacctcccaggccggacgcccccgccgcgtccagcccccgccccaccccgcccagcccgccccggggtcgcctcccccctccccggggagaacgggccagggccccgccgggcgggaacgggcgcgcccggccccactcacctccggcctccatggaggacgcgagcggcccccgcggcaggcggcgggcgcctcagccccccgggccgcgggccctcatgccgcccccgcgccgcccgccccggccaggccgccgccgccgcccggagaggccatcagctgcttcccgtcacatggcggtgggcgcgggcggagacgcgcgggggcggggcgcaggggaaacggagggggggtgcggacgggataaaaacggtggggggcagctgagggaaaagatggaaaatcggggaggcggtacgctgacgggataaaagctgaggggttgctcaggggaaacgggggcggggaagacgcgcgaaccagataaaaatggggcaggggtggggggagctgagcggaaacggggtggggcgcgaacgggataaaacccaggggttgtgcggggtcctgaggggaaccagcgccggataaaaacggggaagggagggaggtgaacagagctgagggaaaccgggaaaaggggagcgatagaaaccggagtaggggaagccgggctcaggggaaaagggggtgttggagagtggtagagccgggctgagagaaaaaccaagcaggggaagcggcgatccggggagaacggagagagggagaccgagggctgtgggggtaaggggaaccaaaggggctgaagcgaaatcgaggggaggggcaggtgaaaatggagccatgcgaaggccgatgaggggggaaacgggtaaaaatgggggcgggagaaataggttggagggaatactggccgagaagaaacctggggagagctgggcttaggggaaaatggggagggggtggaaggaaggtgtaataaccgggtgctggggaggacgtaagaattggggggtgcggcgagggtcaaggctagggtaaaacaaggggggctactcaatggctccggtaatgggagagggaagtgaggagaacacggggcggtggggagaggagggcagggtgaaaaccggagtgggggtgggaacgagataaaaaacggggcaggagcgattcggaagaagactgtccccttacctacctacggcgacagcctcgcctgtccccgtccccctgagaaacctgctctccctgtctacccgcatagcctcaagaaatggctcgcttgggtcagacgccccctttttaacattccagggccagggcaggagtcatcatggaggcttttcatgcctgaaagaccccatttcttagttgtccggtccccagtagtatcagtggcttggggatttcttactgagctcagctcattgtccccaaaatgcctccccttacccccaactcgagcgcttccctttcctgctttgggcccaagctcttcccgcggttcttggtgtcagcttcattcaagtcactctcccgcctctcattcctttctccccgcctttcttcgcttccctccaagtgccctctccatttgccggtcactggtcccagagctccggatcgcagtggttccattttaaatttctttgcttcctaacgcaacctatgttttctacggtaactgaggttcccgtgttctttttcaccatggtctctccgttttaatgtttcgggtttttttacccaggcccctgttttatgagccctgggtacgtccttcctgtgtcccgtttggcctcctgggttacactcctgttcaccccgcttggccggtttttttttttcttttctttgaacctgccggtttctcagtctcccccttttccgctggctacctgtccctttctcgccgcccatgttaactttagcatgccccgttctctctcttcattttccactgggtattttttatgtttcccaattttaaaaacggcccagcgcacccctttttttgggactccacttttatctctggcaccagtgtcggcctcctccacctctgctcccatttaatcgctaatttcctgcctcctgaggacccccgttttattgtccaggctcccccctcccatttttctcttctctaattttctgagtctccattttttgtctcccaaattccttcgattcctggagtcttacaggcctcgtttttatgtacacgtcatggaaaagaataaaagggta

SEQ ID NO: 59017 - DNA, 2680 bp, Homo sapiens
caacactttgggaggccgagacaggaggatcgcttgggtccaggagtttaagaccagcctgggctcaagcgattgtagagaccgtctctacaaaaaaattttagaaattagctaggcgtggtggtgcacgcctgtagtcccagctacttgtaggctgaggtgggaggatcagtgcagtgattgcaccactgcactccagcctgggcaacagagcgagagcctggctcgaaaaaaatagctggccatagcagtggagataggttccccatggggcgggtggcagtcagcctgaaagccaggtcattccagcaggatgacttcatcccagggttcttctcacttcccaggttcctggtgttcatcgtgcaggaaacactgcaaacagctggggagatgggaatacttgacaaccacctttcacgtccagagatgaccaactaggaactgtcctcccccatcacccacaccccagcacagtgattactcagccaaatgcctgcagggccagcaggtaacacccatgactgaaggtggcggggcaaatattacaacagggagaggtggaacaaatttgggctcatatgccctagataagaggatgaccactgcccaattccaactgggaaagcaggccccgtgttgccagaccttcagatttttccagataaactggaaatctagagatgttattgtttttaaatggttggttaaaaaaaaaaaagcaaaataaaattgtatgagcctaataattaggaactcttggcacttgctgctaagaagctccagcatactttacaacccatctccagaaacgtgcaagaggagacccgttgggtggagcagacccgggaacacaaaaagtagcgctctgcctgcatcctggcaaacttcaccacctcctggctccatctcctctccctgcaccccagcctcctcccagcttgtcacactcccagcacacagtaggcatgcacagtaggcatgctggtgaattaaattcaaatatatataaatagttcaatctttttacattctacatatttttgtaagcacccctccaattcttttttcgtagcaaagcagaccatagatgaagcatttcagaccttttgtcaatcatgtcaagtgtgaggggaagtcttttgtaagtcagccaagtatttcaaaataaaaagcttttccaaaagtaaaggcggaagaccccgctttgaaggcgctggtcggcacaggaagacttgcaaaggtgtgtagggaagtccaccggttacaggtgtaaggcgagttcaaccttgggcagagggaggagaaaaataaagtgggagtctcgagtttgagcaccagcgtatcagttactactaaaaccagaacgcgaatttacatccgacgcttaaaaaaaaaaatcactttcccggcacacgtgcctctttactttgcccccgcacgtcggctcggctcggctcctctgcagcctcaccggctgcccaccccaggaggctgggggtatctcgccccgcaccgggcgcccgggaaaactccttcctgcaaagacggccgagctgcgagcaggaaaccaagaccctcctggggcagcttctaggctggggccaccacggatccgggcggagtcggagggaattgggtctctcgctgtcccctccccaccgctgactgggaaaactcaacttttccctccagatcgcggccccttacctacggcgacccagccggccaggagcgccccgaggcagacgaggacgcggggctcgggcgcactgccgcctgcggccatctcgccccagatcccggctcaggaaacgcaggctcgggctgggctggacgtgtgtgccccagggccccggggcccggggtaccgagggctcctcccaggtcctcggaacggcagagtggccccacttcctcggcccccaggaaggatgcttggctgagccgagtgtccagggccggcagcggagctcggctgcaggctcgggtccccgctcccgagcgccctggccggggagggagggcgcaccccgccccctgcgcccgccagcctactcctgccggcggaaaacaacaggagcgggatccctcccgcctcccagccaggcgggagcccaacttcctctaccttggcccgggaggagggctttctgccgagggcgcgccgagccgggtcccgccgggccaggggcggggcgcggaggctgggccctccccagtccactccgcccgggacagcagtaccgagtcgcggggacagcgggcgggacggagccctgcagctgccgcaggacgcaacccccgccgctgccccgggctgcagaacccggaggaagcggttgccaagctgcagaacgcaggacccccctggcagtccccgctgagcgtctcgagggattccggtctgtgtccctgggcgcagggcgggcgccaaggccgccatcgcttcctttccttaccctctgcaaaagggagccagagaaagatgatcccctgactttcagccaaagcagccacgagactccggttctccagtgaactggctgggaccacacagtgacagcgagagccaaggagtccccaggacgtgtttctcaagagttttgtttttgcttttccccttttagttctcccaccccttacccagtcagattcccaggctaagctcctctcttcc

SEQ ID NO: 59018 - DNA, 810 bp, Homo sapiens
attactagggaaatgaatgggtcaggaactagaagagaaattaacttgtaaatagatgtctttgaaatgtgaatgagcctgacattatcttatgaaaggatctgttcaggtgtggttaccttctgtgtcttcctttctgcaataaagagataacagagagggaaagaaagaacaattgtttctaattggggggtctggattttaggtggataaaggaacttcctgtgcttttggatgggagggaatatcagagagatccttcttcagttcagcgtatcaaagcctccatttctgagccccaacaaaacaaaaaagccaatcctgctggtctaaactggaattctaaactgggtcagtctggcccaggaagtggggcgggggggcggggtgactcacttacaaactggaatcaccaggtggcgctctcggccctgaacagaatctgggttccacagccaaggtcatctcagggataatagttggtgcaagcttcatggaactccaaaaatttcagagattattggttcaacgaataaccttcaccttccagaggaggaaaagtgtcccagagttgttaaacagcttgctcaaggtcacagctcatggacaaaggcagggctcacccgcttgtccaatcctgatatttctaaaatgtatcacatatagctcccagacccattcaacaaagcacagtatgcaccatgcagtattttcttgtgataattcaaagaatgaacttttgtgtatgaatatcgggaacattggtgtctgtcctgtgctatctgtgggaactagatagattagaggacc

SEQ ID NO: 59019 - DNA, 956 bp, Homo sapiens
aagtgctgagattacaggtgtgagccaccacgaccggcccacctcagcctcttgaatagctgaaacaacaggcaccctgccaccccaccagctaatttttgaattttttcttctttttttttttgtcatggagtctagctctattgcctaggctggagtgcagtggcatgatctcggctcactgcaacctccacctcccaggtccaagcaattctcccgcctcagcctcctgagtagctgggattccaggtgtgtgtcaccatgtgcggcttttttgtatttttagtagatacagggtttcaccatgttggccaggctggtctcaaattcctaccctcaaatgatccacctgccttggcttcccaatgtgctgggattacaggtgtgagccatggtgcccagtcatatttctgtatatgtgacatttgcccttctagaactttgatccaactctagggaattggcttggcaaccctttttaatctaatctctttgtttacttaccttgaacttttggtcaaatgttcactacagataaacatgactaagtcaaaacagttggagaagtagaaataaattccaggttgatgtgttttaatgaatacagtttcttaatttccggagcttgcggaaaattccggagcttgcagaaactcataacattttgataagtagagatggagtctgttttaattaagtggccagtatcatacataattaatattagctgtgtacacacgcaaggggcttactcacctgctacttagatgctgctctcttaggctgattaacaagctctttgcattggtgtgtgcatcactcatttgctacttgcagaagacatcttttgcctttacgtttcctacctgtatttctttttcttttctttctttcttttttttttttgagacaaaatctcactctgtcacccagggagtctagctctgtctccccgg

SEQ ID NO: 59020 - DNA, 2336 bp, Homo sapiens
cgccactgcactccagcctggtcaacacagagagactccgtctcaaaaaaaaaaaaaaaaaaaagtgatcctcccgccccagcctccggagtagctaggactacaagcatgcaccactgtgtctggcttttttctttttttctttttttttaagttttctgtaaagacggggtcttgctaccttgtccaggatggtctcaaactcctgggctcaagcgatcttcctgctttggcctcccaaagtgctgggaatacaggcatgagccaccgcgacaggccatgttgctgaatttggaaagtggagcaaagaatcatgcaaaaaattaagaaaaccaaaacgcaaccaaggcgaattcaattgcatttttttttcccagcgacactttctgagacacgaacctctctcttcggcgaacctattccagggcgcccttcattttcatttcttgaaacaacagccttgcaggccgagccgctgttcccgagaactcggcagccacagggagcaggttgcatggacccaggagcgcgagaggccctgctctgccagcttcggccaatcagaggccagggagcggtgggcgtgacgtggggcggtgcgcggggctgggcggcggctgaggcgcgtgctctcgcgtggtcgctgggtctgcgtcttcccgagccagtgtgctgagctctccgcgtcgcctctgtcgcccgcgcctggcctaccgcggcactcccggctgcacgctctgcttggcctcgccatgccggtggacctcagcaagtggtccgggcccttgagcctgcaagaagtggacgagcagccgcagcacccgctgcatgtcacctacgccggggcggcggtggacgagctgggcaaagtgctgacgcccacccaggtacaccgggcggcgggcgtgcagcgagcggcacggcgcggaggcctgtgccggcctcctgggtgggacccagcggagacagggccaggggcggtggggaggttcagcctgcgtgtgtcgaggcccccccaggccagaggtcccggggtccatgtcccatgcctgggggccaccccgagcaccgggaacccggcctgtggcgtggccaggcaggttcggcctgcggcagaaattcattcacttttcccgggcttcagacccaagagggacctaggttcggaaacaggccggatccccctctccccccacaggccagggcgctggagagggacgtcgccgggacagagtaggctgtggctgcccggacgcccccagagcttcccctagggcctcagcattttaggcctggttttggagggctgaagcctcacccgagagcctgtgacgcattatgtaactggcgatgagcgcgccggccgatttctcctttgttaaatgggtcgagagcgtccagccggtacgctggagggcaacggtttagttttggtctttgacctcccacgcccacggctggggctgccgaaagtgaagaaactagatttgcagacgccactgctagttggttatgaagctccgggcaacagcgtaaaataaactgccccgaccttacattgttttggatgttcacagaatttaatttttttggatgtttaaatatgtagtgcccatctaacacagcctcccttttcctgctccctgcccgcctctcatcaccttggctttctccttttctttgcactttgaaacgtacagttaatgcagatttcacttcagcaggctccaggtaacctcctgatcaccaaatccagaaacgctgtgattccggacagacaatgtaagggtgtcgttgagaggggactcagtgccagggttggaatcccagccttatctgtttctcttaatagtgtgctgggatactagccccatggtgttgttgggactgaaataatatacagcctgggcaacatagcaagaccccaactctacaaaaaaaaattggccaggtgtgatggtgtgagcatgtagttcccagctgctcaggaggctgaggtgggaggatcgatcgattgagcgctggaggttgaggctacagtgagccttgatagcgtcactacactccggcctgagtgacagaaggagacctggtctcaaataaaatacataacgtatataaaactccagctcctggctcttacagtcaatacagggtcattgattttattaaaaatctattctgttttgtctttggagagtctgagatcaaagaaagagtattggtttcttcagcatttcttgtttttgagacagagtctcactctgtcgcccaggctggagtgcagtggggtgatcttggccgcctgcagcctctgcctccccagctcaagtgat

SEQ ID NO: 59021 - DNA, 935 bp, Homo sapiens
cccggcctggttttcacatttttaaatgattggtgaaaaattgaaagaagaatagtactttatgatgtggaaattacacaaaatttacctgtcagtgtccatcagttaacgttttattggagcaaagctatgtgtcatctgtggctgctttcatgctgccaaggccaagttgaatagttgcaacagagactgtggcccccaaagcttaacaaatttattctctggccttttagtggaaagtttgctgacctttgctctagaaaatgtcagagggtgggaggggctgggtctgctcttctgcaaacacatgaggttcgtgctggcctctaagaaagtgaggactgggccgggcgcggtggctcatgcctgtaattccagcactttgggaggccgagtcggggggatcacgaggtcaggagttcaagaccagtctggccaacatggtgaaaccccgtctctactaaaaatacgaaaattagccaggcatgatggcaggcgcctgtaatcccagctacttgggagcctgaggcagagaattgcttgagcccaggaggaggagcttgcagtgagccgagatcgtgccactgcattccagcctgggtgacagagtgagactctgtctcaaaaaaaaaaaaaaaagaaaggactgttgttcgtggctgtgttgtggcagccagcatgttcttgatgcccagttgctgactgtgcagtgaatgttccctgatctcctgtggtgctgacatcccgtgtttcttcatgcagagaatggcatcatttcctggtggtcaacatgaagggcaatgacatcagcagtggcacagtcctctccgattatgtgggctcggggcctcccaagggcacaggttagtaaaggttgtttttggtgggaggttggggagggagctcgggggcacattaggattgacccaatgctt

SEQ ID NO: 59022 - DNA, 6231 bp, Homo sapiens
cgaagccagcgggccagtgagaagaggtcaggccgcgcaggtctcttgatcattccaagatctttgtcctgcagccagccccaccagcccctccagctcctccagcccatgcgtttcacttcagagatgtttcatgacataatccggctccggagtcccccggagtcccgggggctcacactccaccctcagggaggtcgctgatgccagaccctgggagcacctccccgctccactcgtctgcgctgcagccggttcctatttgcccgacgccgcgactgcgacccaggctccccgccgcagccgttcttgggggggctcccgcaactcagcgggcgcgaccccccgcccgctccctcgctgctcacgccgggcccccgctatgtgactgggggcccgacccgcacccatggggcaccgctcctccctcggggtccgcgcctgcacccgacgctcaaagcccctctcggagtcccacgctcgcatgcgctgtcccgagccctctgggggtcccctcctctcaccccgctgtcctggcccctctcggggtcaccctgctcccacccgctgtcccggcctctctctaggtgtcctgctctcagccccgctgtctcagcccagcccccttccgggacccctcctcttctcccactgtcttggcccttcctggggtcttctcacactctgttctaagccctctggggatcccctgtcttcacatcccctgaccggtcccctctctttactctgtcctggattctctctgggtcccctcccctcacctcggggtctcctctccccgggtgctgtcccagcccctctcggggtccccatctctcagactctcagtgccggcccctctcggggacccttcccctctccccgctgtccctgaccttttctgggacctggtccttcaggggaccccctcccctcatccccctatcctagtgcctcatgaggcacccacccctcaccccactaccccagcccctctccgggtcccttcctctcacgcgcactgtcccggcccctcttggagacccctcccctcagactttcagtcttggaccctctcggagtcctctccactcagagccactgcctcggtccctctcggagtcccctctcctcacccgctgtcccggtccctcccggggtctcctctccacagtctgcactgtcgagcccgctcccgcaactcccctcactctgcctggggtcccgccgcctcggctcccactgtcatgccccgcgccccggtgctctcacctcagacctgctgtcaccacccccgggcccggcgccgccgccgccgcttcctctcccacacttgttcctgagtcgctctcctgtggcttgttccccggcggatccttgggtccggtcgctgagtgccggatccggctgtgcgcagcctctgctcgcggtctcggcgttgcgtcccactctccacgcaggaccccgccgcccggcgccacaaggaccctcccgcggccgccgccgctgctgctgtccgaggtgcggctcctgccaggggtggccaatcgcaccggactgcgccgagcacgccccgccccaccgtctcagtccgcccgccccctgccccggaccacgccccaagctcggctccaataggctctctactgaccttccctgatcgcggggcacagggccggggccgtatataggtatttgattgatggagcctgggaagccgagcggtcgatggaacccgaggattggcggagttgtcgatgggcgggacagggcagggcggggtctcctcagacgcggaagaccttgcaactttagtaacctacgggcccgcctggggtgcggtcagtcttgtttgtgctgctctccggtcaaagttcatggcgcttctccccacgcctttacttttcttgggagattcccagggaccaccatgttagagcctttggggaggaccccagtctctcgctagaccttgcacagctttcttagtaattctgccatgaactaatatagcattaatttgcccaggatttgtaaaaatttcctggatttaaaccatttctttttaaaatctcttgcaagggagttgcctctccttgaattgagttcagcagccgtcagtttgataccgttgggggaaaaaaaatctatatacagtactaggtgcatactttgcccaactaagcgttcaatgcggggcacattttgataggtgcaaggacaaagctttagaaattttcagtttgtaggtttttatgacagtaggaagactgtggtaggggaaccctattattagcttaacaaggtttcagcaaagctattcaatataacctttttccagggccacaggttttaatgattctatgtgaacgtgtggccaaaggataacgagctttgacccaggtttaacatgtgataatcagagactcctcttgatccacgctaaaggatagtgcctgccaggggtgaaagtgcatcatgctactaagacccatttgtgttatttttgtgaaactggatatgctgatcaaatcaacaccggaaacagaaaactgctttccttactcttaacgccaaaagtaagtttatggactttagaatttagcattttatgaagaaattgtctcaggaacacattttgatcctaagttttgtcagatgtatacaggccttagttctcagagaaccctcgattgttaactttttaactccagctgacaaaatgtgtttgtgttctaaacagtatacatgtttcttctagtgttttaagaatcatacgccattcatcacctgaggtcaagggttccagacctgcctggccaacatggtgaaatcccgtctgtacgaaaaatacaaaaattagccgggcatggtggcacccacctgtaatcccagctactagaaaggctgaggcaggagaatcacttgaacccggaggcggaggttgcagtgagtcgagatcgcatcacttcactccagcctgggtgaaagagcaaaactccgtctcaaaaaaagaaaaaaagaaaaagaaaaaaaagaatcatactccattccaattgtgatgtccccctttaaagtttcagtttgggtgttagggtaggcagagaaggcctggaagcaaagaagttgtggaaatggggctggcagggcttcgtttcaagtcaagtcgagttcctgagcggtgtggctgagtaccgttttgagaagggatatataaaaagatttcaaggtggtaaaacttggttttgagggaacttgatttttacaggagtatagcgactgtccaaaatcatattaaataaatctaaaggttaggtaagactaaagccataagagaatttttttgagtaggtccaccttcactaaagagcattttttagttctgcagctggcaatctggacagaaaaaaatggggtaagttttcataacccaagtgctcagttgtgtctattcattacatataaaaaagaaatgcatgaccattaacagatgctgtttgcagtcaagaagacagcagtaaaacataagcaggataaaaatctcagcgtcttgaaaggaaaccatttagcaacgaaataaacttaaaaattaattgtatcaatgaactcttgatttctaaaatctttgctttttctgcactatgattactgctactgacaggaacgcaagttactcaatatagttgattgcaagtaatttagatgttctccaacagcacaaagaaagaaaatgacttcatcttttggacaagagacagttctggaatcctagtttaaatatagatggcagacctacggtgcgatctgagaatgattcttatttagaaggggcttcagaagatctcagaactcctggaaagacatcttagcattccattctggaaattctttagttttgttgggagaaaaaatcacttacaaatagagccaagattttaattaaaacaaggtagtaaataaatgtcaaaataagtgggatgagaataacgtttcattttcagaagagtccatagggaacaattcagagataaatttaatcacaaaaggtctgagaatgggaatattcggttccaccctggttttcacatctgttcattttcactactggttgcgtttcctacggagactcgggtggaacataaaagtggggctactttggacaaaccattaaaaaccttacccttttttctcgctacacacaactagaccacattgctcttagctaaagggacaccttaaatctattcgttcagcaaaacttataacaccgtgttccttttctactcagagggaatcgcacaaattaattcttgcagatactcagctctcctgttttttaagcttccacgtgggccttagccaaataacttctggtaggcaaattctccccttcttcagttgagagctcagagcaagctgttggattaagcaaaagcaccttttaaaaaattaatattcaaggcagctgtaccgcggagggcctgggtctcggagtctaaaaaatcagactggacgttactatttttttttaggcaaacgacagctcgtttctcatttgtaaaaccgggggaacatcttaccgaataaaccttacacaaacagaaaggattcctaagggctgggaaaatactattttgctgtccccaggatggaatatcagcatccttgtcttttagctcttaataaagctctaactagtcacaggaggagccaggctgcatgatcacgcacactctggacgtctaggttttccgacctaataagggggcaggtcgcgtcgttccctgcttaaattagagaccacctccacctgccaagggcccttcaaaccctccgcccctaggtcgctaacgatcaccgctttagttctagctccaggcgccgcctggcggctgtctccggaagtcgcctgcgagcctcggggtcctgaccgctgctgggcctgcccgtagatttgcctgactctagcgaacctggctccgcccctcccccactatacgttgaggattttaagacggcgatgaaagggctgaggttgtggcgacgggggcgtccagcggcatctccactcccccaaggatggcggaatcaggccgttgtcgggcagctctcgacccggaagtcgctcgcggcgcgaggcccccgttgccgagcgcgggcgcggggggcggagctcggcggagacggggaaggggtcgccgtggctgccggtcctcgagttgggggctgccgcggacactgctaggcagacggcgagtaccgagcgcgggtggccgcggtgtccgtgggccacgctcagctgcggtcagaggcgacatgagtgccgcggggctgctggccccggccccggcccaggctggagcgccgccggcccccgagtactaccccgaggaggatgaagagctggagagcgccgaggacgacgagcgcagctgtcggggccgcgagtcggacgaaggtgagtcctgccgctcgcccggccgcccggagcggaggtgggaccgctgggggagggggtggggctgttcgggagaggggcggggcggcctccggggcctggggctgcgtggaggggccgccgggagttgcggggctcggggaagttacccccatccgtgctggagtagcggggaagccctgggtgcgttacactcgaccgtgatggggagaggggacttagatgttgtcacgctgggggtccctttaagaccccgtcctccctcccagccgtttctgattgaacctcactcactagtaggaattagaaactcatttactgaatacatcgagtgtagttcgccccttttttgtgtgtgagagcatcagagtccaaagttgcccctccccacccccgaaatgcataagtcatctatactttaggtagtacactattgagaactcaggttggttaaaggaaagggacctagaaccagccagatacaggtttaaatttggctttgtcacttaactcagctttgtaaacttaagttttccagcctcgatttacccaactgtaatggagctgtttaattcccacacctgccctagaaggcacttcctagggtcggtatagggattaaatgacatgcgcataaagtacttggcctggtactgtaaatactccgtaaatgttctccccacccgcccccctcccggaaacaggtaagagagggagagatttgcttaatggtccccaggtgttgtgttttcagtcccacgctctttgcactg

SEQ ID NO: 59023 - DNA, 2546 bp, Homo sapiens
ttaaaaaaattttttttttcctttaccaatctccccagagggcattgaggctctaggagcttggccatcttgtaagtggggattgcaacccagggccatccttcaaatccactgggctcctgtctctctcttccctttctgcaggtccccaggggaaaggcaggatacgacacgctctagggaaggtatttccagagggtgacctgagccctcagccaggctcggggttattaatagccaggccttagtgccccgctcggggagggcggctccagctcctggagcaagaggagggcggagctgagcggagtggccaggggaggagagagtgtccggagaggccggctgaacttggacgcggcccctcccagctccccccacagcccagctgttccctccgcggattctccggggctggttcatcacctccgaatattcctgtgacaggagacgcttgcaaaacccgcctccagcctccagcagcaaataaatagaaggcttgcagcccagaaggagccagaagaagtttctaggcgcgcgtgccctgggtttattaagctcctggctccgctctagacctcagcggttctggctgccagcctgggcagcctgggaagcctgggaggacggtggcttgccggtctgtcgtgaggcagtgcggacggggaccctctgggattctgctggatctgccccgggggttacctttgggggctgggaccccagtcgaggggacacaaccgtccctggcagtggttggttctgcttctccctgcagaaaagcagcattttcggaagctgaagaataagctagcccagccacaccaccttgttgtgtgaccttgggcaggtggttctgtctctctgagcctctgtttctctctgagctgagcagccaccatggctgacggtcagatgcccttctcctgccactacccaagccgcctgcgccgagaccccttccgggactctcccctctcctctcgcctgctggatgatggctttggcatggaccccttcccagacgacttgacagcctcttggcccgactgggctctgcctcgtctctcctccgcctggccaggcaccctaaggtcgggcatggtgccccggggccccactgccaccgccaggtttggggtgcctgccgagggcaggacccccccacccttccctggggagccctggaaagtgtgtgtgaatgtgcacagcttcaagccagaggagttgatggtgaagaccaaagatggatacgtggaggtgtctggtaagtcaggggcaggagggagagagaatggggaggccgggatgtagccctcagccctgggaatagccagagaaagtttcctgggagctgacgttgggacagtgtgacacaggtgacctcagggctcaggaatgcagcctgcaaagttatctttacggaaaacttctctcccggctcccagcagagatcttaacctgcctgactcagctattggggcctctgggtgctcatcaatcatggtacagacaggaaaatagaaaccatgttggatattttgacagagggcatttaatataaagaataggttaagcagatatcaaagaattaaaaaacaaagaagaaacgggattttgtgcactccagcatcataacagagtctagaagtgcacgttaaggctgaacaatgatagtgttaataaccgcaactggtttccggtgaaacacctctccttgtcccagacagggaaactgaggcttaccagtaattgtagtaacactaactggtaactctgagtgctaactattcgctcagcactttgctaactgctgttgcctataatatctcagctaataccacaaccagaggaggtgggtactgtttatcttcttttttcagatgaggaaactgaggcacggagagattaaagtaacttgttcaaggccaccaaggagtcagacccaggttgtctgggaattaggaggccagaaagaagaagtgatgatttactgagcacctactaggtgccaagggtgggctgacattcttatacttctccaaaatcatcctcagtccactccagggtagcagggtaggcccatcttgcagctgaggaggctgaggcctaggtgggactcgttcacagtcatgccatgagtcagcaataggagtggagtagggactgggcctatgcacagctttaggcccagggctctcactgccgcatcccaccctgggagaaataaacatactagggggaaaaatgagagaagacaggaagctcagcccctgtgaagctgggcagtagaaaaatctttcttttccttccctcctgattaacactccattaaaaagaatgtgttcccggcagaggcttgccttccagaaaatcagtcaaagccattgcaaacacaggctgggcaggaacaagccccagcagcattcagggggagtttcaagccagtcctggtagaattataaacatcagaggctccagcgggtgtggtgggctgggagacacgctggggccacgtgctgatgacagggtcagccagatttctg

SEQ ID NO: 59024 - DNA, 1326 bp, Homo sapiens
acttggatgacacctccttctgtttatgtttttcttcattttctcaattttcttaaatgaatacgtattacttttacatttggaaataaacttgtttcaaagatcaaaaaggcaagttgctacactagaatccagaaagctacagtaagcctttcccctctcctaggctggctattagaaagttgctttctcttctgtctcatttgaaagagggtaggtattgccacattattaagcaatcagccagtagggttcatccaagaacaataaactgacctctcaagagaaaattagtgaagctcaggaaattagagctggaaacccccactgagtgatctaatgcatccctcaagaatcagcaccatatacattacattttctggtgtaggcactttcttttcaatttaatttgaaaagtttcaagtgatggcaatttcactgctacatcttagaccagtcaacaagctattaatccatcttccctgagcagagcataataactccaatgaacttcagagatatccatttaactttctggcctggacctgccagctgaacaaatatctcagaccgagttcaaattctggcacctcctcttagccagaagactttacacaagtccctttacctatctgttcctaggtttcctcatttgggaaaaagaaaacctcatcacctccctcagaaaatttgctgtaggaattaaatgagatgatacacacagggaatgcacttagtgcaacagtggtgctcggtcaatgtttggcgattctagagtgctcggctcatgttaagcagttgttttcctggcagaagaaacagtccacaatgagtcaacaatcccttcttttggctttccctagatgacactagtgggttacagtgaacaatatagttcaaaactttgaaaagcaaaatttcatttggtacccaaaccttgggctactggcaccaacgaaattaactagcctcatcaacacctgtgaaaagaagggggaaaaataaaaatacaaatatttttaaaataaattaggctcagatcacaaatatggttcagagagcactttttcattgtgaataagagccagaattggaagcccaggaggatgggaaaaagaagacatggaatgaagagtcacatttgagaatgaatcaatagtttgatgaataattcatggagaggctgaaggaaagagaagaagaatgctgccaagtacctaacttggaggactaaattcacaatttattcattcaatgaattatctgttgagcacctgctaatggccaggcacagttctgggtgtttgggataacacagcaaacaaa

SEQ ID NO: 59025 - DNA, 2189 bp, Homo sapiens
tcccatctaaatgtattagaattaagtggcttttaaaaatgagctggtcatcttcagcccacgggctggccaatttggaacttaatgggcctttgcgtcctccttccctgagcctccttttattccagacttctcagtgtgagtctgtgcgtccctccgacgatctcagggagtggggtgccttcatctgcctgttccctgttcctcaggctgacgctcccgctgtcctccccgcctcccctcactccttttctccctcccttcctccttgtggggaggctcttggccagggtccctgagcccgggcgggtgctggcagaggacgcagaaggggtgaggtcacgtctcccttgagccccgagccgctggcttttcagagcctcgccacaagccggcggccagagccccagaccacacagaccgtgcgctcctccgccctcccggcgccgccggcctcgcccatgtctcagtacgcccctagcccggacttcaagagggctttggacagcagtcccgaggccaacactgaagatgacaagaccgaggaggacgtgcccatgcccaagaactacctgtggctcaccatcgtctcgtgtttttgccctgcgtaccccatcaacatcgtggctttggtcttttccatcatggtgagtgaatcacggccagaggcagcctgggaggagagacccgggcggctttgagcccctgcaggggagtccgcgcgctctctgcggctcccttcctcacggcccggcccgcgctaggtgttctttgtcctcgcacctcctcctcacctttctcgggctctcagagctctccccgcaatcatcagcacctcctctgcactcctcgtggtactcagagccctgatcaagcttcccccaggctagctttcctcttctttccagctcccagggtgcgtttcctctccaacccggggaagttcttccgtggactttgctgactcctctgaccttcctaggcacttgcccggggcttctcaaccctcttttctagagccccagtgcgcgccaccctagcgagcgcagtaagctcataccccgagcatgcaggctctacgttcctttccctgccgctccgggggctcctgctctccagcgcccaggactgtctctatctcagcctgtgctcccttctctctttgctgcgcccaagggcaccgcttccgccactctccggggggtccccaggcgattcctgatgccccctccttgatcccgtttccgcgctttggcacggcacgctctgtccaggcaacagtttcctctcgcttcttcctacacccaacttcctctccttgcctccctccggcgccccctttttaacgcgcccgaggctggctcacacccactacctctttaggcctttcttaggctccccgtgtgcccccctcaccagcaaagtgggtgcgcctctcttactctttctacccagcgcgtcgtagttcctccccgtttgctgcgcactggccctaacctctcttctcttggtgtcccccagagctcccaggcgcccctccaccgctctgtcctgcgcccggggctctcccgggaatgaactaggggattccacgcaacgtgcggctccgcccgccctctgcgctcagacctcccgagctgcccgcctctctaggagtggccgctggggcctctagtccgcccttccggagctcagctccctagccctcttcaaccctggtaggaacacccgagcgaaccccaccaggagggcgacgagcgcctgctaggccctcgccttattgactgcagcagctggcccgggggtggcggcggggtgaggttcgtaccggcactgtcccgggacaacccttgcagttgcgctccctcccccaccggctcacctcgcctgcagctgggccacggaactccccggccacagacgcagagccctgattcagcgctgtgaaaatcgctagccacccgtcccccatcaagtccgcccacacttgcccacgggtggtggcaccatattcgattcgtgggcacctgcaaggctccatttgcacccgtaacttgccctttcccaaacccggtttgtggacagcgtctgcaccgatatgaaagcgtgcagccgctgaagttcagacaagtctgtattcaaatcccaattctcccactttctagctgtgtgatctctgaagtcactgc

SEQ ID NO: 59026 - DNA, 1615 bp, Homo sapiens
ccctaatctgtagaaatcatgattctgcaggtctgcagtgggggatgcatttaacaagcgctccaggttaacctaatgcactgtaaagcgtgagaacacgtgcattaaaagggctttaagaagtggagtttctgaatcagatttgcattttagaaagatccctctggctgcagagtgtagaatcaactataagtgagcaaagatagctaaatggcattattcagcccagcgcatgaacggctcagattgcccgcgcgctggggtgccccctgccggccctcggcagcgcctcgtcctgggcctggccctgggcggccggctgctgactgcgactgcgcgctccgaggcctgcagagacggcccggggcacctgttaccgcaccgctcaagaccggaagcggaaatggaatcgagatagcctcgcgcgtttagctggccgccgccacctccacgccctaggccgggccgacttacggagtcgccggaagcggaagtcgctgaggggtggtgaagcggttgggaaagtgtcggtttatcttcgcgccccttgcgttcttgccgcggcttgcctgggcaggtaaagcgcgattgcgagagctcggcaaccctgccgactcagccggaaccggctcccggcccgaggggcgtggtgtcctggtgctccgactccttccgcaggctccttgggacccgcggttccgggagtcccttgctcagggtccctttcctgcagtgaggcgccgtccgccttccctgtgtccccgcagacccccatcatgggcaataccagcagtgagcgcgccgcgctggagcggcatggtggccataagacgccccggagggacagctcggggggcaccaaggacggggacaggcccaagatcctgatggacagccccgaagacgccgacctcttccactccgaggaaatcaaggtgcgagcggtgtggaggaacccgattccccttgactaatgttgaggagaggaaccctccactagattcccgtcacatcctttcgaaaaacaccagaacggagagggaggtggtacattacccggtgcacttaaaagccagatggtcctgtaagagttctcttagcggtccaagaacctgtgtctaattaccaatatgagaaagtcaccctgagggaggaggtgctcacttggtttaacatcattaaggagaaagcagctctgggacagagtttcaaattcttaattaattcagagtcgagctaacagtaattgagccccagcttctgcttttctcttaggtgtaattaattgcactgctttgagacaaattccctcacctttacacaaactggagcttttgtaaaagttagtttgggaatttatccattttggaggcaaaccaggtacatatacaagctgaaagtagagcggaacagctgacggcagttgccagaggtgtttagttctgcccaacacttttgattcaccctacttattttttaaaagacggtggtctcactaattagccgggcgtggtggcgggcgcctgtggtcccagctactcgggaggctgaggcaggagaatggcgtgaacccgggaggcgcagcttgcagtgagccgaggtcgcgccactgcac

SEQ ID NO: 59027 - DNA, 644 bp, Homo sapiens
gaacagacttttcaacctgctgccggatttctccattcagctggatgatcctcaggactgaccagttagctggcaggttgtccagctttttattccagtcataataggtgacagtgttaaccgtgaaaacttgagaggcactctgccctcttccctataaaatcacacagcgtgattttacaaggtcccgtggcaccttgctcaggacctctgcccctagttagcaagactgcagcagttgctgttgcttattctgaaaggaatgtagaacttgacagcagccttctgagtctgggtcaggaagatgtcctttggaccaaagcagacttctttatacgcagctcagtttcccgggagtcgccacagatgtacccactagcccaggttgctgtgagtcagcggaagctcccgttatgccctttgctcctggtgggagagggaggagtgagctccctgggttccagtatttacttggtatacctgagtttgggggtacccttttttgtgacttttcaaaacagtgaattactgtcaccttgatggacaagtttcaataaaactttgtaaaaataattggacatgtgcctggaggagctctgattttattcagtcccttggagaagagactggaactcttcgagagt

SEQ ID NO: 59028 - DNA, 2106 bp, Homo sapiens
acaacatgggtgaaccttgaaaacattacattccatgaaagaagccagacacaaaggccgcatgcagtatgattcatctttatgaaatgtctaagagagcagatcgacagagacagaaagtagattggtggttgctaagaagaacattagtggaaggagaatggcgggggactgataatgtgtatggagtattttttgggtgggggggtgtcaaaattgttcaaaaattagaatgtgatgagggttacacaaccctgtaaacttactgaaaaagactgaattgtacatttttaatgagcgaactgtacggtatgcaaattacatctgaatgaaactgttaaaaccattagaacaggttagttacagattttgaaagtattaacactaacagatgcatctagatttataagactcaacttaaaatctccattatccagtgattaggaatcaggctttaagaacatgttactggtaggagattgactgactatacggtaggctctccttacaacatcaccccccttcctttcttggaaaggtgcaaggaataaataacaggaatgcactttgaaactgtgtggtgcagtatacacaaaggagcaatatactgtagtactatcactattcagggacatttcagtggacaccacagccagaagcaatgctttcctctatcttgtcatcaccattttaatgagtttaaaagtaaagctcttgggctgggcacagtggctcaaacctgtaatgccagcactctgggaggccaaggcaagtggatcgcttgaggtcaggagttcaagaccagcctggccaacatggtgaaaccctatctctactaaaaataaaaatattagccaggcatggtggcgcatgcctataatcccagctactcaggaagctgaggcatgagaatcgcttgagcctgggaggcagaggttgcagtgagccaagatcacaccactgctctccaagcctgggcgacagagcgagactctgtctcaaaaaaaaaaaaaaaaaaaaaaaaaaaaaaaaaaaagtaaagctctttgattcaaggagttatataaacacaggaggaagaaaatgacttcaggctaaagaaaaacaacagcaacaagaaaacaccatctggtttacaaccaaaacaggtttgattgcaatgccatgattgctaaaccacagctctaccctagtgttcctaagacattccaaacagcttccttggccttttcttaagtccttttaatctctaggtaaatggagtacatttgagaccagcaagaaaactcctcacactgttggtagaaataaacattggcacaaactaccagcactcaaaatgtacatgacctttaacccagtgattcatttcccaggaatttctccaggcacaacacccacagaggcacaggatgtcctctgcaaggtgtttacagtaacaggggattggaaacaacctaaatggccatcaacaggagcctggcttaacaggtgaattgcatgctcacaccacggaatactgtgtggttctctgaaagaatggggtaggtccttatgtactaatgtgaaacctctaagatagcactttaatgaaacgaaggtgtcttgcagtgtatactgtagtgtgctatgatatttataagagaaaaaaggcctgaaagataagcttacgttttcttgtttttgtttttgagacagagtttcagtcttgttgcccagactggaatgcaatggctttatcttggctcactgcaacctctgcctcccaggttcaaacagttctcctgcctcagcctcccaggtaactgggattacaggcatgcaccaccacacccggctaattttgtatttttagtagagacagggtttctccatgttggtcaggctagtctcgaactcccaacctcaggtgatccgcccacctcagcctcccaaagtgctgggattacaggcgtgagccaccactataatatttataaaagaaaaaaggcctgagagagagatgtgcttattttttcatattcttttttcttttcttttctttttttttttttttttttgagatggaatctcactttatcacccaggctggagtgcagtggggtg

SEQ ID NO: 59029 - DNA, 1105 bp, Homo sapiens
ctttgcttcgtattcccatctgtgagcagttttttccgttatttctccgcagaaaccctttctctccgggctgctgatctgcgaagcatctggtccttcatatccctgagtcatcagcatgaagatgcctggtttccgaagtcctccctcctcctactgctctctagggctccctctcctgactgcttagttctcctgggggcccagacctaaatttcgtgagggtatgtctttctcggggccgggtcaccagtcttggaggaatgtcctcagtcccctttgccccagacaccaccagagatgcggcaacagaactctgaggcgcgccccggcttccaagtagctgggggcggggccgcgcctggaggtgagcagcaggcggtgggcggggccgcgctccgtccgaggtgagagcgaggccgggtgcgaggccacaccccgaggtacgagagctgagggcgtggccacaccccagctctgagcgaggctgagggcggaaccgcaccccgaagtgggtgcaaggctgggggcgtggccgcgcggtgaggcagccaggaccgtgagggatgcgccagccgcctccgcaggcggcgcgcgcagccgcccgcagggcgtgaggcagagcaggggttaaggccgccggcgccacctgggcgtcgctgaggagacccgcgagccggcgaatcccgcgcgggcggggcgaacaggtgcccgcgcgcgtcaggcgccggcaaggggcggggcgaggggacgcggccggaagcccggggcggggcgctgccggcccggtgagccgggaggagccggggaaggcaggaaggagctcgccgggttgcgcggcgcgcgatgtggagccgccgcctcggcccctgcagcagcagcagccgccgtcgccgccgctgctgctggggctgccgcggagccgggggtcatggagtgcggctgcagagagcggccgccggcaacagcagcagcagcaggaagcgtcgcggcgacagcggagcgcagcccgccccgtgaggcgctgcccggccggcggcggcagcagcagcagcagcggcagcggcaacagggcggctgagaacccggcggcggcgttcctcct

SEQ ID NO: 59030 - DNA, 416 bp, Homo sapiens
gcggcgcgaggcgaggcgcgggacgcggggcggcgcggcagggcccctcccccctgcagcctggcgcgcgcgggccgggccgcaccgctgcgggctccgcgcgcgcgggccatgtccgctttctgcctgggcttggtcggccgcgcttcagcacccgccgagccggacagcgcctgctgcatggagctgcccgccgcggccggggacgcagtccggagtcccgccgccgccgccgccctcatcttccccgggggctccggggagctagaactggcgttagaggaggagctggcgctgctggcggccggggagcggccgtccgaccccggggaacaccctcaggccgagcctgggtctctggccgagggggccggaccgcagccgccgccctcccaggaccccgagctgctgtcggt

SEQ ID NO: 59031 - DNA, 902 bp, Homo sapiens
attcttgttgaatagtttgtataaagtggatataacaaataaggtaaaactgagagggaggagaaagattttatatctaattatgtagaatttgtgactattgataatagttaggggcaagggccaaaaatcaacatgattcctcttctatcagttttactctaaagggaagattgaaagataaaattcttaatatttaaattttacctctgaaacctgaactcattatgtaatatgggggttttacagaccgttttgttccctgttacagacaaccttaagccaaaaatgagttaatatagacatgttttccctgcattcaaatttgtctgctatgtgcctggctcacttccgagtactggggttgtggcagcaaacaaaggcccagaccttttgaaacttacatcaagggcagggggcgggggcaatagctcgattaacaaagaactatctgtcgggtgtaataagcgctacagagaaaaattaaacagaggaaaggaatggagggcggcacaggtagggttagggtgagcagaggaggcctctctgataagatgacatttgagaagagacccgagtggagtgcaggaacaggcctcgtgaatgtctgaggaaagcatgttccaggcagaggggaatcatatgcacagattttgaaataagagtctgctcagcaggtctgagggcagcaagtaggccagtatgagtggaacaaagagaatgcagcggagaaaagaggagatctgagataagattgggatgcagggaggaatcctgtagaatcttagaagtcatggtaaggactttattatgttttattctgagtaagaaagcttctagagggttttgagcagtgacatagtctgacttgggtttctgagaattgctgtgctgcagagagt

SEQ ID NO: 59032 - DNA, 845 bp, Homo sapiens
tttcaacaaataagtaaactggatactcgtataaataatgcaatttccttccctccatttaacaagaaagtgtgtagtgaacagttctgctttggcaagtttaaacaagcttaatctaaaggttctagtttgggggaatgttcatatgttattaatcatgtccacaagcaaagtaatgatgaaacagctttgttcagtggggaggaagtaatctgtcctagatggtactctgaccaacaggaaaaggaacacactgttactttgttttgccaacttgaggattcattaaataatagtaacccaagcaaattataaaaagagtttatttcagatagttttgggagtgtgcattaaaatttttagcattctgtaacagaactagagatatttttcaaatgttttttgcttcatcatgcaatctgtattcagtgaaagtaaaagagacttaagttttgaagatattagaaataagtatctacaaacaaacaaaaaataagtatctaaagattaaaacattgcataatacccagtggtggcagagtattgagaaacaggcatcaggtgtatttgtactgttgatagggatataaattgatgcaacctttttagaggactgttttgcaataccttgttcagagtgaatgtgcgtattcttttacccagtgattccacttatggaaaattacccacaagcacaaagatgggtgaacaaagatattttttggagcaatgttcataatagcaaaaaaaattggaacactcgaaatgctcatcagtagggactagttaaattagaataaggtagatctacatagatacatacatatgaatagaaaatttctaaa

SEQ ID NO: 59033 - DNA, 1384 bp, Homo sapiens
gggaggatagttcttttcccataccttagaaatgaatttttgttatacaagaattgagacgacaagcctaaggaatcatttaaagaggaaaccacaccccccatttgtatagtaacttagttttaccagatacttcttccatatacgttatctctgattctccatcctggccgcacattacaatcatctggggagcgctcagacaccaggaacctcaccagaacaatacagttgaaatcacggggtggggtcagttgggtggggcccacttctttcccccttgattttaatgtgtagtcaggggtgagaatccctaagaaatataacttccttctcgtcactgggctgcagaaaccttaaggtgcaccttctcctatacaataaatgagtttcaggaaaattaagtagcaatttttttatctccttgcaggtgaagggccttcactaaaaccaaaaataaatcttgggctagcaatctgccttacaaaaacaagtcagttactagtggtttcatttgtaaaaaggaattattcgagcccttggaatattcctatttttaaaatgtgattaatgtgttgatcctggtctggggtttcccatgaatgacgagcacttattccttggtgagcaaatgtcccaacggtgcagcgcgtggccaggattggaggtcgtccaggcagcccctgcctcagggcgttttttggcaaggaagggaaccccaccatgcccggcgctgcgccgcggctgtagccctgggcccatctgtccctcgccggcaacgttagtcagcacattcctggggctcccgctgctctcggcgccacctgccgggggacgccggaagctcaggaggctgtggctgtcgtggggcaccacgggttctgacgctactggaggggtgtccatggcaaccgatgccgcgtgaggatttccgctgtttgctgccagccaatagcagtgggtgtgacggaggcagccttcggcatctgagccctcagcatccattagacgggctcgggtcccgtcgctgccgcagtgggcggggctgacgcggtggctgagctgtctggagcggtttctctagggaaggcaggcgggccggcgggcggggcgcacttgcggtgtcggcacaggtgactaattgctcggtagacctgaagccaaagaagaagtgctggtcgcagcagtggcctgagcactttgcaagtgggatccacctgttcctttttctggccgcacttcggttagtgcggtcggtgttgtgaagctcgagctaggcggcctctgcaggcggatcctctagctgcccttgagccctgcacattagtcgctggccctgtacaaggagcatgcttttgttagctttgctgttttgagtgcttaa

SEQ ID NO: 59034 - DNA, 3304 bp, Homo sapiens
tactgatgataatgacaatagtgaacatttacttcgagcttactttaccgggtagggcgctacgcacttttcctactttatcccatcgaatcctcacaccacccagcaaggcacatccccacttctcagatgagggaactgaggctcaggacggcgaagcaacttgcccaaggtcagcgcgaggcaggtggtagtcctgagactcgaacccacgtctctccaactccagagatcgcgcgacttgaccaaggtcacacgtgaggcaggaacaggcgcgatgactggacccggcgcgcttggcccctccgccccgcgccccaacctcccctcggcgcggtccggagcccctcggcgcacccctggggcccagaccgccgggctgccccgcccgcccgccccgcacgggccggcacctccccgcccgcctgccgccccgaggcccccgcgggccgcgcccggcagggcccgcgccgcctccggccgctgcggccctcaccgctgtcgccgatgatgagcagcttgaagaggtggtcgtagtcccgggccatggcgggcgggggcggtgcgcgcgggcgggcggggtcggtactggcctcgcgatccgcagctcccttcgggctgctccggcagcggcggatccacttcccgaacaaacagccggaactgacagaaacacctccctccgctccccctcctcctcctcagcagccgccgccgctaccaccgcctccctccttcccgccccgccccaccactgcgcaggcgcagcgtctggcaccgccttgcgcagccgcagcctgagccggccgcgcccgggtcgcgcacgcgccctgacggagtcccagcaagcgcgggcccgtcttcctcgcgtctcctcggggagcgtcgtcgccgccaccctgggcgctgagagcttgcggagccgagccgctgtcgagtcccagcggaaagaagcccaaggtgccggagaagcccggtcgtggacgttgttgctccctcatcttcgagacccgcacgccctgcggagaggaaatgacaggcacgccgcgaccgtggggcggggctcgcacgagctccgggtttccagaggcaggggccggggccgtagaaggcagagtcgcgcggggaaggcccggtaccccgccccttccgcaccgacccctcccccgcggagctggccccggccccgggcctgtggagtggacgccgagggcggcgggcggcttccgagttggacagaacgggagctgccggcgggagcagagctgcgaggaggtggcctttgagggcagcgcggggtcgaaatcccatcccagcgctgtgacctcttggagcccacattgcctctttggtggaggggagggagtggtccagctccgagccgagcctgggagctgaatgacccagtgtgcaaggcgcacctcggagaccgaaagcaaccgctcccccggcttcaatttcacaccacctgcagatacacgtctcagaatctgcggctaggaagacctgggccgccagaagctaaacgtgtgcattttgtcatcagccccggtttctcgttttagagtgagttcccacctgccctacctaaactgacctgaaacggaaagttgtatgcccccacgaccatcctcactgcagaactgcagagggttttaagctccttattacctgtttcttataatcctgtccctttccaggcgagtatttatcggatagttctacttgttttatcaaacttccttttcttttgactttataaaaagcaatgccgggaggctgaggcgggagaatcgcttgaacccgggaggcggaggttgcagtgagctgagatctcgccattgcactccattctgggcaacaagagcgaaactccgtctcaaaaaaaaaaaacaatgttcgtccttaaaattatgtgcagaagtttactgaaaagtacaagttactatttttccttctgaagcactcctcacaggtaacccctgttagtttcacaggtaaccttaaaatgcttaacacatatttgttgaatgaataagtgccccccagtgaatttcctttgcctgtacaaacatatatgtacataccttgctttttctatttaacagtacacttttatcatttaacatctgcgtggtatggtactccatccgataaccatcggatgtactattatttaaccactccgctattaatagacattcatgctgtttatattttttggttataataaacattgttgcaggcgggatcattgaacaacacatggagtgtctgactcaagccttgagttgtttttccgggagctgagaatcagtgtggtgatatcgaaataacatgagcttggaatctgaaggtactggctagggagaagagctgctcatgtgctcccgatagaaagtcccccttggtcgggaaggttagggccatcctctgactcagcagttttaggaaatagagggggagaaggaaggtatgtaccttccttccaccagggaggcacgcccagccctaaccagccagcgaggcagtaggtcctcctagctcatcttcacaacctgggctggtgtcgggaagactttcgttccaatgctagctttggaatcctggcctccatcccttaaaagctttgtgatcttaggtaagtcacatcacactatctcaaagcccccgtttcctcacagaatggttgttttagagttatgtttgtaaattacctggcacatgtaggcatgtgacagactgtaaccaatgttactcaaggtcattttgcactgattcatactttgagccatttcctactgtagactctagcacacattttcaaggcagcttcctgataataaggctgtaggatatttttgggaaataaatccaaattggccattaaaaccagattcctgactttgcctgcatgtgtcatctggaaagcaatcggcataaattccttcatttctttggtaactatttaatgagtgtttatgtgccacggattgcagaggttataagaagagagccttaggccgggcgctgtggctcacacccataatcccagcactttgggaggctgaggcgggaggatcacgaggtcaggagttcaagaccagcctggccaagatggtgaaaccccatctctactaaaaataaaaaaaattagccgggcacgatggcaggcgccggtaatcccagctactcgggaggctaaggcaggagaatcgcttgaacccgggtggcagaggttgccgagattgcaccactgcactccagcctaggcgacagagcaagactccgtcttaaaaaaaaa

SEQ ID NO: 59035 - DNA, 615 bp, Homo sapiens
caagagttaagacatactcatgaggaaattgaaagtataagacaatacagtagatagaaaagctgtcagatatgcagtctagacttcagaggaggaaagctatagcttttagttagaatgatggggagaagattttatcataaagatgtcatgatggcactggaataggagagctttgagtgtctatttagacagtccctgtcacagtctatgagaatcatcatttggcttggaggggaattccctgcaggccagggtatgtgcctggcatctcaaaatgaatcagcacattttcttctggaaacattgttagacatttatttaaactacagttcagtgatgagttatgttaagctttctttctccttctcactgtatacatatgtaaacttgtgtgacctaaaggatcagtgtgtccagtaatgggaaactttgttccactgctctgaacagctaacttacagatgaacttttgcaacaccacctgtttgcacattagaaactattaatacgatgaggaggcattgaaagtttttgagcaaagaggcaatctcaaaatattttagtgaagtaatctggcagggtgcaggatggatttcagctgcagagctttaa

SEQ ID NO: 59036 - DNA, 1556 bp, Homo sapiens
ccatctctactaaaaatacaaaaattagccaggtgtggtggcatgcacatatagtcccagttatactcaggaagctgagggttgagaattgcttgagcctgggaggcagaggttgcagtgagccgagattgcgccactgcattccaacctgagtgacagaattacactctgtctctcaaagaaaacaaaaaaaaaaaaacaaaaaaaaccactcagtgcagataagccaatgagcttgccccttcttacaaggaggcttttggtaacaatgacacccattccctgaagcaaatccaagagagtcccagctcacaatacgtaatccttgaccctcaaggtttcagcattctaatccatcatcaatcaattatactgacagccattccatgtttgtccccagaggtgcgctggataagctcccagggatgcagccctctatctaaccagcaggctgcttcatggagcggtacttgtgtttcctaaggccggtcatcactggcacctacctgcctgggactctccagtttccacagtcatctcaaccctcaacgaaacctggctttgcgacaactctttgaggtggacagggtgagtagtattttctttcccactttgcaaatgaggaaatgggctcagaagttaagtgactcagccaagtctcatggacaagaatcagatccaaggcctggcaaagtggctcacacctataatcccaacactttgggaggccaaggcaggcggatcatctgaggtcaggagctcaaggccagcctggccaccatggaaaaaccctgtctccactaaaaatacaaaagaattagccaggtgtggtggcaggcacctgtaatcccagccactcgggaggctgaggcaagagaaacgcttgaacccaggaggcagaggttgcagtgagccaacaccactgcactccagcctgagcaacagagcaagactccgtctcaaaaaaaaaaaaaaaaaactactcctcatgacctacactaaaaaaccactcctcatgacctacactaagcctacccaggcacatgtctgctctgctcacctcccaacctggtgagcagacatggggaaagaaaaagaagagaatatggaaggagcaggtagagaatggaaagagggaatttaagaaccaaaaccaagacaaaaaatccattccattcaccagttcaacactgaaatcaaacacagggaatggaatgatcagccagaaaaacaccaagaggatttacactatgatattttctagtctacttgatttttggctgtcttcccaactctggcctgtcacggcttccacacatgccatgaaatcaggggcctcatttctgttgtgcatcactgcatttctagtgcctagcaccatgcctgacagagaagctccaaaatgtctaatacaccaaacaatgtgattatgctgcactcatggccatccaccaaagccacacacctcgggacaactcagagtgtctggtcacccagcacccagaaaagcacttggcaccaagaaggtgctgaaacatgctctaactcctggcaga

SEQ ID NO: 59037 - DNA, 2072 bp, Homo sapiens
cttaagccatgtggctgccatactggacattgcagctctagagatttttccctcaagtgagtatcaatgttaaacattcagcatgtattcccctaaccctctcatactaagcttttctttctagtattcagtacaacataacttgaacatcagccacctgcataggagtctcagtaaatgtctttttgaatgcttaagtggtcattttctgggcctacacataaaaatcaatcccatcaccctggagacaccaaatcagcccagctgtccttagacacctgttcttcccctgcctcatgacaatgtcttttcaccttaaaacataacaactgggtggaggaaaaggttttcccaggtccttcctgaactacaaggtacccataggtaacactcttcctggacaggacagttcttttcactaaccctggatctgataacaaccaacatatatcaagccgtattttatctcactgaaccttcacaacaaccttttaagataagtattgttttaacttcattttatagatgaaaaggcagacttggcggggttaagtcacttgtttggcatgtcacagaaatcgacgagcaggaactcaagcccagatctgtatgaatccaaagactacactcaaagtccctgctcatagtaggtgctcaaagaatatttgctgaatacaaagtttaaggaagacttggcgttggcccggggctcacagccggagggctttggagaaaagaagtagaggctcggtaaagtgaacttctgcaactctggggtcgggcaaaggccccgccgagctccagctgctgaagtcgaggcgggagccccggactcctcgagcccgcggtctgcctgcgccgcccgggccgggccaagcccgcagccctgagagtccagcctgagacggccccgagactacgacctccacagccaccacctccaacgcccctaagccgaggagcgagaggggccccgcccgacggccaccgtccgcacccagtccctggccgcgttggccccgcagccgcccgcctcacctgcgtgtccgccgccatcctgccggggctgactccggaaccgcttccggaacgcttccgggtcacagcgtggcccacgcggcagggcgaggccgggagccagcgggggcagggccccgggcttggtgcccccgggcaggacggcggccgctgcagcccgggcagccggatcacgggcttaaagttggcccgcgcccgagccacaaggcctcctccccagggcccgctcttcagccccgggcgcctcgtgggagactagcgcttgtaacgtggtgagcccgcggtgtaacgctatgggcccgccttgcagcccctgacccacttccagcccgcagggccagccctacgtgggcctttcctgagtgatgactaagttctttagaaaaacaagtgttgcttcctagatagcaggaactaaaaactaggtaaaagagtcggtgaactagtcttttgtcctcagtttgtagttcagttggcggatgacttgtacagggttagcaaacgtggctggatacggaggtcagggaaggttcagaactgaacgaggcccctgccctggggaaatgctggacgccccaggctgggagttttgaaggccacagggcaagaggctacgtgcagacgtggctgcaatttagggaacagggtctccacagcttagttgtcagccctgttagcagtggctttcaaacctttgacacagacctagttagaatgaatatatcatgttccagcagacagatctctaagtgaaatacaggaatcacaacaaaaacacctattctcagcagatgctgctttctctttaaatactggggccaggcatggtggctcacgcctgtaatcccagcactttgggaggctgaggtgggtagatcaacctgatgttaggatttccagaccagcctggtcaacatgacaaaaccttgtctctactaaaaataccaaaaaaaaaaaaaaaaaaaaaaaaggccgggtgcggtggctcacccttgtataattccagcgcttcgggaggacagggcgggcagatc

SEQ ID NO: 59038 - DNA, 2914 bp, Homo sapiens
attgtctgctcccacaatgaaacatttcggataatcatccaatagttgctacaaaaaacaagccagaggagccaagtttaacaggaagagagagggaaaaaatgccagaagaaactgaaccccacaatttgtttccatcccactccctttcttctaagcttttgaagtcagagggagattgggagctacgttgtaacactgccaaactggatgattggctagctgggtatgaacgctgaaaattaggtttctacattcaatcaaggagttttttctttttttacttagtttttaatttttcccaattaccaggcatgcttctgattcactaaaatggttaacaggataaaaaaggaatgttccaagtaagttggtcaagaggagggctagattcacagcattaaaagcaccacgttaagcaaatatagcaacattattatttgtaaaaacaatctaggcgtgtttatccggattgttacacaattcctttgggttttgtgtctgaaaaccttctaagtgtgggaaaatgtaatacaagctatgctctacaatgctgcctaattgcttaagcgcagtacagtcagcatttctgggcaagggagacccacctcaaaggccatccaaaagtcattggacacttaagtttcttggctgacaggtcctaaatatgcaacagcttgcttccttacaatgagtcattcctgacctcagaccttctcaaaaatggagtaaaactgtaatgtgcggccgggcgcggtggctcacacctgtaatcctagcacttagggaggccgaggaaggtggatcatgaagtcaagagatcgagaccatcctggccaacatggtgaatccctgtctctattgaaaatacaaaaattagctgggtgtggtgtcgcgcccctgtaatcccagctactcgggaggctgaagcaggagaatcgcttgaacctgggaagcggaggttgcagtaagccaagatcaagccactgcactccagcctggacaacagagcgagactccgtttaaaaaaaaaaaagtataaagcgcgctcttttagaagccagacagacctggatacgaatgctgtcatcttaggacccacttaacttgcctgagcccgtttatctgcaacagaagggacctatctcaggaaattgttaactaaacagtattttcccaaaaatggcctaattcagtagccggtgtgagtagaccctcagcacatagcagctgactgtccctatttgcgctggggcaacatgaagagcagaggcgacccaccctgcacttacgatgatcttaaggaagtagttggacttccaggtcgccctgtcttccctgggcatcacggcggtgcgtcagggattgccacgcagggtttaaagacgatgtcactgaggagagacagggagctcaggcctggtcacgccgacacccatcccgcggtcccgggcctaagaggagcaggacacgcgcaatcgcccgccggccctgcctagggcagcggccgtcatctcggggcgtgcaagccgccaccgaggccccaggcggaacagaataggactccatgttcccaaaggcccccaaagacccctccatgcttcccgccggcgacccctggcgcccatctaactagcacacgaaccttccacgaggacgcctggcgagagaagggcctcgcgcccgcgcgtgccttttataatgcgaacaaagtagccaatcagaaaccgcggatagcgctcctgtctattggctgcgccatcgcccgtcagacaaagctgaacgaatacaggcaaccattggataatatcgctgccactccagccaacggaaagccgcctttaagtagggtcgcgaaggaaggcgctgcctcgcgttggaggagcttgctctgagctgctgccacctgctgggctggagctggagctggagctgcgaattcggagtcccggttccctgtgccacctggcgagctcagcaaactaaaaggtatgacgtggagctgagacataattgcacatgcttagaaacagaatggtttctctttttttttttttttttgagacggagtgtcgctctgtcgcccaggctggagcgcagtggcgccatctcggctgactgcaagctccgcctcccgggttcacgccattctcctgcctcagcctccggagtagctgggactacaggcgcccgccaccgtgctcggctaattttttttttgtatttttagtagagacggggtttcatcatgttctccaggatggtctcgatctcctgacctcgtgatctgcccgcctcggcctcccaaagtgctgggattacaggcgtgacccgccgcgcccggcctcagaatggtctctcgtcttctctagtttttccgcctaccaaaacagagggatcctttaaaacctggccgggcgcggtggctcacgcctatactcccagcacttcgggaggacgaggcgggtggatcacctgaggtcaggagttcgagactagcctggccaacatggcaaaaccccgtctctactaaaaatacaaaaattagccaggtggggtggcgcatgcccgtaatcccagctactcaggaggccgaggcagaagaatcgcttgaacccgggagctgtgagctctgcagtgagctaagatcacaccattgcactctagcctgggtgacagagagggactccatctcaaaaaaaaaaaaaaaaaaaaaaaaacctaagtcagctcatctccttatctgcttaaaactttccgtttcctacagagtaaaaatctaaaacctaaagtacctacaaggcccttacctatctgtccctcacgcccactctgatcatctcagatgttttcctcctcacttacttgctttctacccagatgatgctctgctgcttttccagagcaggcttta

SEQ ID NO: 59039 - DNA, 5858 bp, Homo sapiens
ccaaagttttgtctatttgagggacagagaaaaaccccagcaagtccatccaccagccacagggtctctggtatggcttcctcctctctctccacccttcattctcacctagtgatttggacaggcaaggactaggcaagaggggtaggggttggtgcctccaaaccccccacaaactcctcaagaaagaaaaccagaaatacaggaggcaagccaacagtagactcctagctttactttgatttccaatgggtgcaaatacctgagacttccccataggctgcaaaatggttaagggtcagagtccccttgcaagctcagcaaacgtcccccctggcttgagcaaacagagctggcagacactgcacacaggaaggagtccacttgaaggcagagccccatcccagcggggtcccccagtgtccggctccagcctttccctctgctctaaatattcctgctcctcataccccaaagaaggtgtcaggctatccactcttcagagaaaatggtacccactgaaaccattcaagaccaggaatacaccctcccttcccacatgctgggaggacagattccagacacgctgctcggaagtagtcgggagacctcattcaagctaagaaaggcctcaaatttccttggcattactctactaagtttccaggtccaggcctggggccctccagacccaagtcaccctgaaggaggaagctctctctctggggcttcccaaccactttctggaggaaacccaccctgaattctgcaggttttctgtctctctgggccagcggaagtatgcaacatgaggaggtaggccaggctgtctcgaggctgagggcaggctaggtgcaaagtccccagcgagccatgggcaaaggccacggagctatgtcctggctccgccctggtgaggaaggggtgcagactgtctgctgctccccaccagagggcaccattggcccgtcagcttcttgccactgggtaacctcgtgcaatcttgcaattttctagccggggaagactggggagcccctggccatgggcgcagtggggaagtttctatccttagagaacaaggctgagctggaggaacacagcaagctagtgggaggaacacaggtagcctggtatcacttgaaggcacaacccaagggtgacatgcagggctctggagaaccagaggggtgcacgccctcgcttccagggccctgtgcaaatgcagcaccgtgtgcgcccctatctgcaccccatggctgcacctggtcggagcaacagcatggaacagctgcagctttgggtcgggaggccgccctggggcaggtggctgggcagaaacagtgcactacggccaggctgagaggaagaagcccttccctgggcctcagcaactgactgagcgtaatccttacaaccggtgggagccgctggagggttaaggtacagacaccctcagcccactgctccgaggaggaggggaccggttcgcctgcattccagggcaagtgctgcagctgcatccctcacattcctgtacccacctaggggctccgggtggaaggaaacctgggtccccttgtacctacaatggggggatgtcccccagactgtggctctggggaccccggttgatccactgacgcatggcactcaatatcagattaaagagaatcaattaaaaccttccgcccccacccccgactgcagcacagaaacaagccaggctgcttcctcctacctaagcccctgccacttcttagtgtgtgataaagactatcaagaccagaggcctggagctggacaggtgccaagagagaggagataaaagtccatctctctgagggggtgggaggacccagagcgattccattctctcctcccaggctctgaggactttcagtgttacaacttgtacggtgaatcctcagtcacctgggctctgctcaatggctgaactgctcggataggctgcttaactgcttttgtgcctcagtttccttgtctgcccaataggaattccaccattttactcacaggattgggactacatgagaaaaagatataaagtgctgacttagcacagtgcctggaatacagcacacaggaaatgggagttgctaaatagattacaagcttcttcccagggaggtgttaagccctaggaggggaaagaaatcacctccccgtcctatccaatccctgagggcaaagggtgctgccctctagtcccagatcagcaggaagcaggtaaatgtggggcatggagccagcttttccatcccttcttggagtttacaggctgccctgccacaccagccccagcgccagggccccgtggtccctgcccacctttgccattctggactcctccaccagcagccccaggcagaactagaagaggtatagtcctgtggccctcaggcagcgccccaccttagcacgccttgcattctcgaggcctggcccaggagaggcccacgtaagaacaaggtattttccagccccttcacccaccttcttctgcaggccaatttcactcagctttcattgccccaggcagggagcggccagtgcagcttccttaggagctgacaagccaaaggaaggagcagcaagcaccgccctgaaagctccagcaccagcagcaacgggctgccatagcacaggggccttccccgcagccctgggccagctgtccatccctgccatctgataggaaacccagactcccagagaaacaagtccctgtcctagggggtctggggatgcccagcctcatggcctgtctatcctgttgggtccagaactctggacaagggaggttcccaaccccctgatgaccacctgggcagccttggtagctctgagtgtcagagaagctgcggcctccttacagttgcccacgctcagggatataagcagtgagcagggcttggcccttcctaaggaaggagctatgtaaacagcaggaccagctcagggatggtctcatctcagcccctttggtgagactcttccagattaggaaggaaaacagaacgggaaggcgggtctcccccctccccctggctccaagttcccctcccctcccccagcccagagcacatgagcagttagagcagaggtaatctaatccgcagcggggtgctttcactcggtgagtaagtccccaggaatggtgagctgggtatatttatcctgataaccgtctgtcctcagtaagggccaatccacaattaggccagatccactctgccccacccacccccagcccagggacctagggcctggacactgactaggaactcagtctccttgaggggccttccctgccaatttgggttcttgtcaactgtctcctctccaagaattaagctccagagagcaggggccttgtcggtcttgttcgatgccatatccccagcagctagaatgaatggctgaatgacagaggggctgtgaagaggaggaggatggggaagcagcagtgagcagagcaaacagccagtgcggaggaggggagccaggatgccctgatcccaggcccagcggatgagtgggggcccctcagcggatcctctaacctctctggatgtcttctctatcaagaaaatgggcagaacccgatttgtccccattcctagtagcatgctctgaggagataatacaattatgggtgagatttatatagcacctttgagctcttccgagttagtctaaatccaagattctgctattatctgaatcccagacaggaactgctctgctaagaggatggatgagaaacgatcaataccatagtgtcatttaaatatttaatagccatgcctggaggttacaaagactcagccaccaattctcctccgctgactcatgcctcactcaacaggaactgcattttacccttacagccctgaaggaagtgtgggctggggggtgacacacaggaagccaggggagaaggcccaggagtcttccagtcagccgccaggggaggagggggtggtcatttggatgaagtggttcttccccaggcttcctacaggcctagcttaggagggtggcttcctgtatgctgaggagctcttccttgcagagggtgacacaatatgagtgtgcagacagactggctttattggctgcctggcttgtgcccaaggtcacagggcacaggtaaccagagacctgagaaaataatggctgcaaggcaactccagcagtcaccctgagctccaggcagaagaccaactgtgccaggcccatctgcaccaggcacacacaaggcccacccatcaggctcctggctgcagccacttccccatcaaattgggctccaggagcttaagcaacagcaggtgagacaaggctgcccaggttgactctgagcacttctatgcatctgccttaggctacagacacaggagttcaggccaggctggccaaacaccagagtctttctcttctttttttctttttttgagacaagtcttgttctgccactcaggctagaggcctgatcacagctcattgcagcctagaattcttgggctcaagggatcttcctgcctcagcctcccgagtagctaggactaaaagcacatgccaccacactaggcttttaaaaacttttttgtagagacagggtctcactatgttgcccaagctggtcttgaactcctggcctcaagccatcttcctgcctgggccttcccaaagtgctgagattacagacaggagccaccatgcccatccccagagtctctttcatattgtaaataactcatctctcctgtccagaatcagtgggccctccctcctccagaggtcccagaacattgtggacacatttcattggtcagatgtcatccacctctttaggtcgcccagagatgctagaccttttcaggtcaagtccagggccccattccaggcccaactcacagctccttcaatgggtaaaacccagattcacatacaaaaaagacagcctcaaacccaggagactcatgggctggaaaggttctcagctgttccaaatcgaccccagcccattcctgcaatctgggctcttccaggcaagttgatctgttgcagagcagggcggctccttgggcctctcacccctgctaatcaccaacagaggttaggaggggctcaaagtgagtcatcgtcccacagagacccgaacaaaaagttcaaaagtttgcctgttcctgagatgagctgcagtttttttgcgatttttgtggatttcatagcattagttacccactctttgctaatcaggttctcactaaccagccagcaccttccccttttttcaggcagcaaggtcatttcccgaagtcagctctcgcttgcctgacttccccagttctcttttctaagtccctttaatagctcccacatttagctggtcactaagtcacatcaattcttccttcgcggggcctctccctgtcatcacttgcctccctttcctttcatcaccacagccaaccacttggactagcattcgaatccatgctcagtgcctacctgaacttgactgcagccccctgccctgggttctcccaatctaacgcttcctgcacacaccatcggcccgaacttcttggcacccagcctttttggggcatgcctcacacttcactcttgcttctccccctagactgcaggtcctctgtgggcaagaacatcctcctgctcctgaatccccacagcatggataccctcataggcctcctttttttttgaaatggagtcttgctctgtcaaccaggctggagtgcagtggcatgatctcagctcactgcagcctccacctcccgggttcaaatgatcctcctgcctca

SEQ ID NO: 59040 - DNA, 2239 bp, Homo sapiens
aggataaacccagaacactctgaggatcaaatgtactcaggggcaagaaatgtaaatcattgtcttaaaacaaacaaggctacattatggagtcaaatgcaaaatgcaagtgaaatcgtaagataaaaagagaggcttcaaggcctgcatggtggcttatgcttgtaatcccagcactttgggaggccgagacagggagattgcttgaggccaggagttcgaaaccatgttggcctggccaacatggtgaaacctcatctctactctactaaaaatacaaaatttagttgagcatggtggtgcatgcctgtaatcccagcctcttgggaggctgaggcaggagaatggcttaaacccaggaggcagaagttgcagtgaacagagattgcgccactgcactccagcctgggcgacagagtaagactctgtctcaaaaaaacaaaacaaaaaaaacagataagattttgctcttggggactttggcaaacaattttaagcagcaccacaaagcccccactgtccacacataaaaccacccctgcccatatcacagatttggctggtctgctgtcgttgggagctaggatggtcacacagttctttggacaccctctgggcatcccacctgcatggcagtgtggtagagtggaaggaatgggccatctaacagtgaggaggatgggttcaaatccgccactcactagcctgggtgaccagtgactagataattctgggctttagtttactcaggcacctcatagcgcacagtgagtaatggatgaaaaagaatgtgagagccatcctggtggctgggataaaataaacgtaagcctcccactctgacacacaggagacactcagtcaatagatccacatcactgattttcatctcccttaaggccagcagggggaggagtcggagccagggactgcagccagggatcctgggagctgtgacaggttgtcactaactcagccttcttgctgagcaaaccactgacctcaccctttgtgtctcgggttcattccaagtcctccttggagaacatcagctgagcccaggcgcctccaactcactgcctagcaaggacagaggcaagcgagggaagctgcagggccccaacgcctccacccccaccccatccctactgcctgccgggaagtcacagctgtctgagaggcctgtggctttgaacccagaatcgcaacaatagaaggaactgcccaagctccatggtagctcccagaggaacccaggagagagcagcctctgctcctgccacggaagctctgagcccagcagagtgccaaaaagggatccaaagacggggctgcgaggctagaaagcagctcaggagggggtgaggagtggaacaacccttcctgagcatctaccaggagcccagccttgcagccccatttgttgccagggattagaatgcagacacccagagccgccccataaggccccacgaggactgcgctgcctgactgcagagatcacccatgttcttcccaggatgccccacaaggagaggaatgatcgctttcagcagctgtccgtcctctgctcgtcaccactctccactcccacaacacacatccccagagcccccagaggaatccaaaaaggcgggcctgctgggttccgctctactgctgcccactccaagtctcctgttctcttttctttctgcctcctcctcaccctctgcctcaggaggggtcttgagccacagaggagcccctagtggtggtacagagagctcaagaattctgagaaggctggtgcactccatgttctggtctaacttgttgatgtgcaaggtcgacgcgcacaagtgttttccccctgtgctacgctgcttgtggtcccatctgaacctcagggtgcaagatgggcctgccccgggaaccaacctctgacctcgcagagatgacatcagaatcattaagagacacacaggcagacaagggactccactgtaggcaccaaaccagccaacacgggacagccagcaagacagccagcctagattttccaacccacagtcagcatagctgttcccttcaatggacagccacatgtctcacccaagcacttttcccactgagcaaaaaagtaggcagttccatgtcttgccctctgtactgctgtttttaactactctgtgtctgggcacaagagggctgcagagggcacaacacgctggggaaacacaagcctgagcatagagct

SEQ ID NO: 59041 - DNA, 2077 bp, Homo sapiens
tctgctagccaggacacgttcagggatggtcataccttggggcccaccttccacctcattcccctggcatttcaccagaatctaggggtggggagagaatcaggactcccaaattaccgttctagacttagataccatggtagacggactggtctgtgaattgaggggctggtccacagagcggggaggtcagtgagagaaaatgagtgatgggtccttgaaacggggtgaccagatttgaagtggggggtcagaagagcaggcagactgggaaacttgtctttgaaatgggggtgtggtcatcacacgctcatctctagcttttgcatctgacttgtgaaatgaaaggggtgggctccgaggggttatccctgaaggggggtgctagtctgtgaagtggggggcggccctggagggacggggagcaggtcgaggaaatgagggagcagcccatgagatcgggcagctgctccccgagttgggcggtcgatctgtgaggtgggggtggggagaggtctgcgaggtgagggtcccgtagctgacgaggtggtctgccgcaggaagtctcgtccctgcagcggacggggtgggtccctgaggggcgggctggtccctggggcccttctgggagatggtgatgggtccccgaggtcgggggtccagaggtgaagccgtcccagacggggggtcgctgctgtgcggtcggtgccggggccggcctggcccgagactaaggcccggttagggatcccagccccgcggagccccggccggcagggacaggagctgaggccggggccgccgagggtgggatcccgcggcccctgccgctcgctggcgccctcctggccccaagctgcgcgcctctcgcctcctcctccctcggcctcccgctcactcaccgaggtcgtccatggccggaccacgggcgccggctcagggtcgcgctagctgcccgtcccggggccgctcgtctatgccccgcaacttttccgccgcgagcctcggcccggaacggaacgcgccgccgccgcgcgcgcccgcgcccgcgcccgccgcgcgccccgcccccggccgccccctgtgcacgcgcgccccgcccccggacacccccgcgagcttgctggccccgccccctgcgcacgctggtcccgcccccgccaagagcccgggcagtgggcgtcgctgggcggggcggtggcgccccctcgcggctaagcgggcaggtgggcggctcccaggcctccagccactcccatccatctttctgtccctctcaaagtcacttgcctgaccctgcggatgacaaatccgtccacagtcagccatgtgtctgtgcattcgtcagccactgggtcatcacatgcctgtccactggacagtcagttttgcccacctgtccgtctgtcacctgtaggtcaccacccaggaggaccataaatcagtaccaggcaaggcccggagcccgtggctgacctttcctggggtcgtcctctggatcaatggcagtgcagctcgcagttcaccctttctggcccaaacccaatacctgtgtggttccatctctcttaatattacttccacacagccaccctccctagacacttttccaaaactgcatggggcagaggggtccccagattagacattaaagggaaaactacaggaaagtcacacccagtgctcccacacactcggaaattgggtaataataacaactaccatttattgagtgtctgaatagacagacactatatagctattctctaaattaatcctcctagaggtacttccctacccgttgggatgggtgatggcagtttgtggattttatataaaactgctctgcaagtacagcttcgagttccccttgtccctcaagaatccaggccttctgggtcagatcaggtcctccagaaagcagatgagatgctgagataaagctaggggtaatgcccgtgacagagaaggggaaataagcagggttgggcaaggagactcagatctgacaaacaggtcaacccatcagggaattccaggacaaaaaaaatgagaagtctccttgggcagaagtatc

SEQ ID NO: 59042 - DNA, 3295 bp, Homo sapiens
gccctggcctcccaaagtgctgggatgacaggcgtgggccaccgctcccggcttcttcttctttcttttttctttttttttgagacagagtctcactgtcacccaggctggagtgcagtggcgcaatttcagctcactgctaccttcgcctccacgtctccagtctgtgaggtccttgaactggggactgagtttaatttgccactggagctgtttttcccagcaccgtctttgaccttgtaggtactgttgccaccctttttgccacctctttttgctacaggctggaggagtcttttatgggcggtgtcctaagcaggtccagctggatccgccatgcccagagttgtgactcctgaggacctctgtccatggacagcccaggtcttcgtaaaaaggtaagactggaagaggctggtgtagtgggaacaagtaccacactaggggcaagagaacctgataagccccagctctgccgaggactccacagtaggacctgagcaatcttctgtgcctttttccctcttggtcgctttaaaaggaagaaaacgcggtggttcacacctgtaatcccagcacttcggaaggccgaggtaggcggatcacctgaggtcaggagtttgaaaccagcctggccaagaaggcgaaaccccgtctccactaaaaatacaaaaatgagccgggcgtgatgttgggctcccgtaatcccagctactccggaggctgagacagagaatcgcttgaacccggaatgtggaggttgcagtcagccgagatcgcgccactgtaccccagcctgggaaacagcgaaaactccgtctcaaaaaaaaaaaaaaaaaaaaaaaggaagactttggatgtattaatgtgttagttttagagttccccttccctttaagggaatctgtgaccttcagtgacaaaggaagtggagtagctcactcgctggctgcatttggataaaaaagattaacgataactgtcttagttagaacccagttcccaacatagtgtcatacattttggaaaacaactcacagtacccgcacagaaccccggacattcaatcacggaatactcctgaacaacaaccaaaaaactatcataggaacagctcataacttatcaaaccaaacataagacacaacctgctataatacaacttcctaaaacccttttctttagacttttaaaaattcagtctccgtagagactgtcaaaaattgccaatgccgactatatttcaagtcgtcatggcggggtattgggaaaagttttcaattagcaataatcgcgcctcggataaacctcattggctacgatactgccactgcgcaaagctggaaaggttctgttcgcgccccgctcccccacggatgatgactaccattacattgagggtgagtgcctgcccgtgtgtccgtgtatacgacgtgttcccactccaccagccgtatttaaggcccatctgcataggaggtttcttgttgttggaacatcccgtgtcaaacattcaggttttgaaaaccataagaatattcgcttgggacgctggggaatcttatgcaaatcaacgtgacgtcacagagatgactcggttgagacttgaattttgagcgaggagagtgagcagtgggaaagcgagcctggagggcgcagacggacgactagctgtgctcgagggtgcggaaacagcagggtggggggagttgggaataattttaggacgtcactgtgacaaaatctgaatggagaacacggctgggcgcggtggctcacgcctgtaatcccagcactctgggaggccgaggcgggtggatcacgaggtcaggagttcaagaccagcctggacaagatggtgaaacggggtcgctactaaaaatacaaaaaaatcagcggggtgcggtgggcaggcgcctgtaatcccagctagtcgggaggctgaggcacgagaatcgcttgaacccgggcggcagtttgcagcgagccgagatcgcgccagtgcactccagcctgagcgacagacttcgtctcaaaaagaaaacaacagtgcgagagaaagaaaacaggacagccagctggcaagaaaagtcaacaccgccctgcatttaccttaaaagtagagatcacaaaatcagcaactccaactttcacaaacggaaatcgctaaacaggggttcggcaaagtttgcagcgagccgagatcacgccagtgcactccagcctgagcgacagacttcgtctcaaaaagaaaacagtgcgagaaagaaaacaggacagccaactggcaagaaaagtcaacaccgccctgcttttaccttaaaagtagagatcacaaaatcagcaactccaactttcataaacgcaaatcactaaaacaggtaaacttgcaggtgctctcgcgaatcagctggtaagacacttccccatctctcatttagagagtttgcgaacaagtactcttcaacctcccaaaaccaagcacccccacacacacaaaaaaagcctctgttgttcaactgcaagaaaattcagtctccgtagagactgtcaaaaattgccagtgccgactatattgcaagtcgtcacggcggggtattgggaaaagttttcaattagcaataatcgcgcctcggatagacctcattggctacgatactgccactgcgcaaagctaatttgttacgccccctgctcatcactcccaataaaccagcttcctatttcgcaaaggtgagtttagggcctatggaaaaatcttcacttattgcttgcttgaaaattatacaatcatagaaagatgtttgtgacctgcgtaggtggtttctgcatatcgttgctgatttcacttagctaggtttttgttgatatgaagcaaagcactatgggaggaacatgctaatagacttaattcagagactgcgaagggcttttgagagaaaagggatcaaaatcagggttctgttcacttggctccagattcagtgtaacagacttctccaaagacgattattgttttgtcttttttctttttcaaacttttttttaaattatgccaaagtatacataaaatttaccattttaaccttaagtgtaaattcactggcatagaatatgttcacattgttgtgtaaccatcatcactacttacctccagaactttatctttcatgcccaagggtggaaactgagactctgtacccattaaacccttactccctgttcccttctcctccagcccccgtggcaacctcttttctactttctatctctatgactttgtgagtactttata

SEQ ID NO: 59043 - DNA, 609 bp, Homo sapiens
aagaaaaaaatccatgattaaaagcttttatattaacgggggaacctctgaccagaaagagccgacagggggcgttcctggatgatctggggctgtcaattgcgagacgcggaggattgtgggacttgtggtttttctcgcatcatttaagctttctggactacatgtcccaaaatgcaaatgcaatcagacggtcccactgtggggtgtgaagtgtccgtagagctgtgagaggtaagtgtgttctgtgtgtgctgcggatttctagaagttgtggatttcttgtgagggattctatttctcctctttgccctcggtgggacctggaagagagtagttgttccactgatgcacgttttcagcgggggtttcccctgaccctttggtctcgggaaaccggactgtgtgtttgttcagctgttcacgttttgctgtggaatgtcaaggagaaagcggggtcctgatctcagatctggaaagccaaacataaaataatgtttacatacggggtgcatgtcactagaggatttatgcattgcattgtgtcaaataatatgtcaaagttttttctttttctttttttttttttttttgatacggagtcttgct

SEQ ID NO: 59044 - DNA, 1547 bp, Homo sapiens
cggcgcctgtaatcccagctacttgggaggccgaggcaggagaatcgcttgaacctgggaggcggaggttgcagtgagctgagatagcatcattgcactccagcctgggcaacaagagcaaaactccgtctcaaaaaataaaataaaataaaaataatagtaataaaaagtaaaaaaatagaaaaagattacaaatcaaggcttgcttaatgtaataaagactttctcaagaaaaattaaagtgcattatcctttcctctccttccccttaggaaaacagtatttatcgaacatttactatacaacaagcacttaggaagcatttacacaacatatttggacacttaattcccacaaccctatgataagagcactattatttcgggtaacctgcccaaggtcaccaagagggtgactaggccaggaatgaaggccagtctgtccagttctgagttcgctctcggactttctgctgtagaaacccggtggggtaacagcagctgtacctgcggaagaaggacaaagctcaagaaacttccagaagtgacccaggctgggttctgaaagatgaacatgccttcacgaggtaggaaaagggaggaaaccactcatgcaaaaagcatggctgttacaccaccaaatctcttcggttttttttttcccttcaatgtgggggtggaaatttaagtgtagatttggggcgcctcagaggcctgtggctcgcccaacatccccttgcctctctgcttggccacctctcctctcagctcccctttgttccctgcaccccactttccctaccccctaatccgtccccgggataaaagcaatgcaggcgatgcccacaggaaaccggcaggaggagctgggtgacagggaagagcgacccggagagtcacatccacgtgagttcgccctcttttcacactctagcgcccattctgtccttcctgctggattctggctcaggagaagagcgccgccaggaccccaggaagctgcagacaggagccgctgacacctccacctcacgcggacgccacctagtgtgaccattaccagccactgcgcctgcgcagactcgggttttctgtgcgcgccagaggggcggggcctgggccgggaaggggcagaagtagaccgacggctgggccgccattcaccaatagaaaagagagatcgagagccacgtgctcataagatatccaatcacaatcacatcctgtggcggcggattggggggcgtggactagaggttgatcgggttgggcacacagcatcacgtgacacgaaaaggtaaataaggccacgtggctttttctccttggcttcggcgaaacattacgtcacactaccgtctctgaacaattatttaatgaacttatgtgatgcgctagacaatgtgaagacaatgcggttgctagaaattgtaatctctccatcaaattactctgtccagcttatttccttgtttcttcattcaaatcatcctagacattcaactagttttccgtatcctactttcatacaaatgctcatttaaagat

SEQ ID NO: 59045 - DNA, 435 bp, Homo sapiens
aatacagttgaaaatggaggcagaatcatgagacgggggcaaggtctggctcaaactaaagcctaccacttcaggcagggaagggcagtggttcagcatgtgttttctgttgttagacttgccgagttcaaattccttctctgctgcttactagatgatagcattggaaaagtgacctctcctattgagcctcagcttaggaaaataagatttgctaatagcgccaatacctcacagggctgtcaagaggatttatggacacacagtcctggtacagagtaaataatcagtagatggtgatcgttaatcattactcaggtttcaaggtgcttgcttgcttcctggaagtgtctttctaattcaacttagcttccaaggctggaagaaatgatactcacaaaagactaggcagagtagccaggcgcggcggctcat

SEQ ID NO: 59046 - DNA, 860 bp, Homo sapiens
ttttagtagagacagggtttcaccatgttggccaggctggtctcgaactcctgacctcaagtgatccgcccgcctcggcctcccaaagtgctgggattacaggcatgagccaccgcgcctggcctgaaagcgatttttaacatggttgcaagaatacagtaaaatcctgtattcagaaggtgcagtgacaaccactgctagaaaatgacacgtggatagttgctgtgatgtttactgttgctacattctgccactggagggcagcatcgcccactgttttgcacgtcggtcattgtttccatctctaacggggtgcgttcgctacagggtcctcttggaacatatttgtttatttgacaagaggtgaaaatatgttatccttagcagatatgcaagtcccctttgtatgcctcgtgagatccttggcgtgtgccccaccccgcccccggcaggcactccaattttcctgcaggcggatcacttacttgtccagttcatccacgggggtgcctgagccccccaagccacagtagcagccgtagttgttgtattccaagaaggggtcactccccgggatcacgcacttgatcattttgcggaactgccacacggcccgagggctgatgccgctgtcggcggcggccactgcaagaagacatagccagagttcaaatcggtctgccagcaccccggggacacactgccttcctgctccctcgggtcccacgctgcctccctgacccctgccagctgcctcctctgaagaccgttggacccaggaacctggtaaagtgaaagtgggtagaggtttttttttttttttaatgaaaactttatatatataaagtttatatctttgt

SEQ ID NO: 59047 - DNA, 1923 bp, Homo sapiens
ggcggaggttgcagtgagctgagattgtgccattgcactccaggctgggagacagagtgagactctgcctcaaaaataaataaaaaccagaagtaccataatgaataaatcaagtgtaagacctgagggagactggaaaaggagttgtgagggaaccgttaaaattaagtgaaatttgaaaaataatcatcactttgtgttagtgaaagacttaggttcaaatctgggttccaggacttactggctatgtgactaactgtaaatgggatgaagacagcaactacctcggggaattgctgtgaggatgtgttgggttaacttattggaagtgctttgcccggtgctgttcttaacaattcaaagcagttccacatccattgggccagaataaacatttcctggctgcagttgcggggactggtcaagagagagaaacaggctaacgaagggtttataacaacaaaaaaatgtgaccctccagtctgaattctgaagtataatcccgcccagaccccagcagtaatagtggaaaagtgcaccacctgcgaaagaaccaaggaaacctgatgctagtgaactcggattaatcacttcctatttctgggtgttagttttttatgtataaaatatgagtaactatgcccaccttgcgagtttagggtgaacaccaaatgaaccaaaggatgtgactgtgcttcttgaaaagcactgccccaatatttgtcattcggagagacacccaagtggcctcggtggtgatggtaggggagcgagctcctgccactggcctcactgcgacttttctccacccttccagtccagtcccaatccccgtaaaatacgatgagtgtggtgggacacagcgccgagaatgcagggcctgggaacagaggcgggagggctcacctgaacacactgctggtagcgcttgaagaggtcggtgcacgggtccccggagctgtcccccttgagaaatttctcggcgaaccagcgattgaagcactggtcgtactcgcgcttcatgtccgtgcatgcctcccccacactgttcatggcgacagtggtggcggcggcgacgacggcgcactctgatgtcatcactctcaggcgcgtcgctcggcgttacgcgcgggcgcactgcgggggccaaggaaggaagaaatgtggtcgcggttggtgtggctgggccttcgggcccctctgggcgggcgccagggcttcacctccaaggcggatcctcaggtaaaggccagggccatctaggcgggtggcggagcaagccgggaggcacttcggagcgccggtgacccacactccccgcctcatccctcctccagggcagtggccggatcacggctgcggtgatcgagcacctggagcgtctagcgcttgtggacttcggcagccgcgaggcagtggcgcgactggagaaagctatcgccttcgccgaccggctacgcgccgtggacacagacggggtggagcccatggaatcggtcctggaggacaggtaaactcgcggctgcagccccgaagccttgaccgtggcccgttcgcagccgtttaatgtgacgattagcgaacagttttccagggggttaaagagtgttagcaagattcaggaacttgcccacagtcacctcgcgagtcagtggcttcactcttccccttgttcattactgatgctctcgctagtgtaagtggaaacaaaacccgaactgctaatcactgcctttgtttttttttttgtttgtttgttttgtttttttttttttgagacggagtctcgctgtgttgcctaggctggagtgcagtggctcgatctcggctcactgcaacctccgcctcccgtgttcaagcaattctctgcctcagcctcccgagtagctgggattacaggcgactgccaccaggcccggctta

SEQ ID NO: 59048 - DNA, 2039 bp, Homo sapiens
ttcctcagatgctccccttgccctatcaatacgtccaccccaggtaggtcggacaccctacgaacattccgcgttccccgggagcaaatgatgctaggaaaacagggtgcgggctcttatttggccggagtggagtgaccaggtcagcgccgcagctgctaaccaccaccaaccacagttttgaaagttcctgggctttttccggcctgagggccgacgctgtttgcaaaatcacaagcactccttagagcggggttaggaatctagagtttccaaatccctggaacctttagcatctcgccaagcctccctcatcaaaggagggaagtgaaatcagagccccactccggctgttttagaagttttcccgaatccgtgatccctttacaaagcccgggccctggcctgcggggcggggcgcgcgaacggcgagctattccaccagagatccctccacgacctccagcggcatccgcgaccctgcagcttgctctccagccacggcgagcacgggccgggggagaggcgagcgggaagggcgaacggcgacccccgcgctgccccgcggccgcttccccctacggtgctgccccaggcaggaggcggacaaggctcatttggaccccccgaggccggtgcaggcgggcttgggccctccaaaggctcagcttttgggtttctaagtaaaatattggaataataaaaataaaggaagtgacgacggcgcgaaggacggcccgggcctgcgaggagaggctgcctcatcctccacccgtgagggggcgccgtgaggggtctgcgcggaggcggggggaggggaggccggggggaggggagccctgggggaggggacagcagggaaggcgggggcctcaggcaccgaggaggagagggcaggggcgcgggggcctcaccgggggtcctcgaagcgcacgaaggcgaagggcacgaggccgtgccggttcttgagctcgatctcgcggatgcggccgtacttgtagaacaggtcctccaagtccttctcgcgcacgtcggtcggaaggttccccacgtagatgcgcccgtcgccctcgccgccgcgctcgtccgcccagcccgacatccgcaccgcccgacgccgcgggcccgccgcagcccacgtcgccgccgccgcctcagcacgggtccccccgcagcgtccccgcgggctccgaggcgctcagccgcactgcattgtgggaacgcggagcggaagcgaaggggtcggcggaggcaaaaggagtcctcttaaagagaacgcggctgcgaccattgcgcgtgcgcgcaggccggcgccccctggaggtgcgaagggccttcgggcgctgacagggagagcctggggccgggccgtgtggatgccatccccgagcgcggttcgcgctcggctgaggcgctggacaagtggcttgggctcccgcgcctcagtttctctctgtggcgccgcctacctcacagacttgtgagcactcactgacgtgggtagcgcccagggcctgcggggcgcaggagagctggagtcaggcggagaccgcaggctgaccccgcagcggccgggctgtcgcggcccccacctcaggtcagtaggcccccgggccaccctgtccccattttacagttgctcagaactgacggtgtcagcatgagatggactccatagcttggccttgagtttgtcggagtcgagggagtaagactcttaatgagtatcacagcgatcactatagagtgcatccgacttgtgcttttcatcctctcccgggcagagtctgaggccacagaggggtcaggaatggaacccagagccatgctcccatcctaagtactgagtccttatggagctcaggtagacacccaccttggcacttacttttccacattcacatcccagaacgcggagcattgaacccagggaccttacagtgaggccttgcaccagaagactttttgtttgtttttgatacagggtcttattctgttgctcaggctggagtgcaatggcgcgaacacggctcactgca

SEQ ID NO: 59049 - DNA, 1667 bp, Homo sapiens
tggtttacccacgaagccggccctgcttcagagataccctttcagtaaagggagaggccacctctgtcgtaatcctgctaacctggggtgcgagatcatgcgacctgtcgtggtgggggggcgggggggtgggggcaggaatggccaccaacttctagagactgttgttcgagaacacaccctgggacaacctccgtgaatttggaatcacttcccttggccccggcagaagctcccttcctacctctccagacagctgggtggtcctcgtaacccggccggggctccaccttctgggtgtgtgggcctcgtagcgtgcggcccattgcccgggcaaccgacgccgtgagcggtgcattgtggtctgcaacaaaatgcaggagaaagatcctgagggaaccatggagtcaatggaccaatggaagaatgccgtgggctgcgtcaagccaatagggtcgcgcggcgaggggcggggccggcgggagcagggcggggcctgagcactaggcggcggcggctggcgtggggctgcttagatgcgccacggtttcggtagcgacggtatctctagccgggcctgagctgtgctagcacctcccccaggagaccgttgcagtcggccagcccccttctccacggtgagaaactcggggggccagggggtgtcctcgctgccttatttcgccccactccggacttagccctccgcgtagcccgcgcttcctgagaagtggggtggggggcgtcgtcccgtggtggcgccggccggggtgggggcagttagtgcctggggggcgcggcccaactcaaccccttaccccaggccttgcccactaggtaaccatgtgcgaccgaaaggccgtgatcaaaaatgcggacatgtcggaagagatgcaacaggactcggtggagtgcgctactcaggcgctggagaaatacaacatagagaaggacattgcggctcatatcaagaaggtgaggatgggcgcgggggccgatacgcagccgggagcagggggttccttccccccgatcctgctttcctaagggcgcctgacaggtcccgggaatactgctggcggcttggggcgtagaagcttccagaaaggacgcagatgcattttgcgctcctgtggagaagaccagacccccggcgtccgaagtttttttttttttttttttaattacccagctccgcggggggaaagcgccacctagcaacggtatctaagatcagggagcagcggttcccccttctgtgtggttcctgcgccgaggatccatctgggtgttccggaggggggagctgcgtgggtgtttccagccgggccgggaggagatcttgccagccttccagtggggagttgagggaaggtggtgggtggtggcggggctgggggctggggtaggggcttggtaaatggcagtctagaaagccggcaggactgccaacttctcgagcagtgtttgctggaagggaagaaagctggcagcctaagccgtgggagggttccagtcgagaatgggaagatgaaagacttcagatggaacagaaataaatgccttttttgacaaacgcagcagtgcgtgcctctagcttgcaagagcgttactccccttcatagctttaaaaggttttcgcactgcgtgcagttagagtagctaaa

SEQ ID NO: 59050 - DNA, 1942 bp, Homo sapiens
aaaaaaacccctatttttctctagaggtaaagaacgggggcttcagactcagattaaactgggtttgaatactggttccgccacttactgatatgttcaactgggcaacttcttgcttaacctttaagtctcaatttcctcacgtgtaatatggtaataacaatacccactactggaatgttgaaaatgagaattgaaaataatgtctgtacgttgcctggcacatcacaaacgctcagttgatgggatttagtcatcagtattctgcttttaaaaagggggcgtctggctgggcgcggtggctcacgcctgtaatcccagcactttgggaggccgaggcaggcgaatcacctgaggtcaggagttcgagaccagcctggtgaaaccccatctctagtaagaatacaaaaaagttagccgggcgtgctggcgggcgcctgtaatcccagctactcgggaagctgaggcaggagaatcgcttgaacccgggaggcggaggttgcagtgagccaagatcggaccattgcactccagtgtgggcaacaagagcgaaattctgtctccaaaaaaaaaaaaaatcataactgcacagacaacaacactggaactaattggatgttaaatcaaccctaactggccagaagaaaccagaccatggacggtcagatccctcccatccgccctctcgcccctttcacctttgccccccttctcctcttccgacacagtctcaaacccaaagtgcgtttccgctgcccgcttctcttgggacaagagccgagcacttagtaggtccccgggccaagagctacgaagcccgaggagctggcagccccgcatcgcccgcgaccacccacggccgcaatagctccatagagcacagctcccgggggccgccatcttggtagtcgagtgacaacggccagagagtacgccttgttgcgtcactccacgaacgacggcggctggccggcaacattattagccgaacgcgccctgaaatctgatacacagttgtgccggcattatctctaggatccaaagggtggtctctaagtatcggaaatcccttcctctctctcttctcaaattgaatttacaattcaccaggaatcaggggatctcaggggagccccgggtcacctcttagcggccatgtctctgaatccggctaggcagaaaagtactaactcgcaagatatccaggaactcttgttgtcttgtgcagaagggggaaattgaggcatggtgtggttaaaaagccaagatcacgggccaattcctgcacactttgttgagcgtaagaatcacttggtttacgttttaaaatgaagattcctgggtccccaactaccagagattttgatctgacctatatccctttaatctctatttaaacaaatttctctggcgattctgatgctaaagatgcagaccattcttgagaaacatatgttacactactctgaaaaataaacataggacagacttctttgttctgtccgttttatgaacctaggaagctcataaatgggaacgaaagctctggtatccacttagcaagccagaaccaccactcacacttggtctcctgctgacacaaagctacattcctagctccaggtggcatgtcatgggtgttttacttcagccccagattttcagtctttttttaatggcaagggtaatgcagaccgtcttgtgcaaaataaagaacggacgttgttgagttttgcttggattactgtatgtttctgctttcattccattttaaatgtatgtttcctgtaaatatttcacgaggagaaagcgccaatagaagaaactgttttgaaatgaaaattctcttcctggtttaatatagcctgacagatggacacctaaccgctttcgtttgggaagtactgcgctgggatttctgtttctttctcttttattttaa

SEQ ID NO: 59051 - DNA, 1497 bp, Homo sapiens
ttccacaggtattccaatgtttggctacattattatcagtgtatattattattgttactgtatttttagtgtactaagtgaaaaacctggacttggagcaactgcaagtcccattattttgaatgccctcacagtggggttggggcggaggtgggggaggaaataaaaaaaacaaaaccaaaacaaacaaacaaacaaaaaccaaaaaacaaaccacgagacccggatgtaggcaaaaactacatttcccagaatacctcaccccctctccactatatatacagtccatccgggttctttgagatgctgtttggcgactcgtcgccattcccggagcaggtcggcctcggcccaggggcgagtatccgttgctgtgtcggagacactagtccccgacaccgagacagccagccctctcccctgcctcgcggcgggagagcgtgtccggccggccggccggcggggctcgcgcaacctccctcgcctccccttcccccgcagcctccgccccgccaggcccggcccggactcccgagccccggcctcctcgtcctcggtcgccgctgccgccgggcttaacagccccgtccgccgcttctcttcctagtttgagaagccaaggaaggaaacagggaaaaatgtcgccatgaaggccgagaaccgctgccgccgccgacccccgccggccctgaacgccatgagcctgggtccccgccgcgcccgctccgctccgactgccgtcgccgccgaggcccccgttgatgccgctgagctcccccaacgccgccgccaccgcctccgacatggacaagaacagcggctccaacagctcctccgcctcttcgggcagcagcaaagggcaacagccgccccgctccgcctcggcggggccagccggcgagtctaaacccaagagcggtaaggacgggcctgcggcagtgggcgggggcgactgcccctgctgctggggagagtcgttgctctcatcggctgggttactcggggacaggctccactttcttttatagctcctacctgcccttttccatggctctcatttgcagttacattaatgagcgctgtgctgcgtggtttacgtggatcatttacattaatactcaaaactgctcgattaagcaggtgctgttcttatcgccattttgcatatgatgagaaagggtaaggtcacccagctagtatttggctcacagcaggccttaagacttggtttgtgtgactcatcagtccacgctcctaaaaccactaagttgttctaccctttaatgttgaattaacattggatagtgttcaagtttagatgggtgggtgagggcccaaggacctttcaaactcagatctcttatttaataacctggtcccagatccattcctctgtcgaagaggaagtcatccttcagtggctattcattgtggggttaagagcgcagactatgaattcagtctttttgggtcccagtttgccagaccttgagtgag

SEQ ID NO: 59052 - DNA, 1603 bp, Homo sapiens
tcattgaaaggacctcttgaattacagagtactgagttgaggggaaaacaagcgtaaggtgaaaagatagtttatcttttgtcaaggtgaaaagagcaagagttttcagtattcaaatatttaagtcactttttttctcccccttttctacctcgtggaagaaagccctttggtttctattctgtaaactgtcattaatggccatttgcttcctagctacatgattaatttctttgagattttgttccagtggctggcttaaatttgcccttcatttgtacacaggaaatatgtaaatttggctaccaggattttcttgatctttccggctagagtcgcataccacagtttctttgcctgggctaattgcctgaacatttatataacattccttttcttgattatattcctacagcttcattccagtagtgttaataggtatttctgagaacatgcagcagtaaatatcctgtgaatatagctcagaggagagaaggtgggttagaaagtggggaaagtcatttagagggagcaaagaaagagaggcaagagagaaggtaggccgtttatgggcaggcagtggactctggccaggaaccaggctcttgtcccatccccctgggccgatagaactgccagggaggttaagggaaggtcaggtattatgaggcagttattttgaggttggtggtatgaagcactgccctggcattcttcctgttattctggtaccagaaaccaggttactagtggtaatctgccttgaagaatgcctctgagctgtaaatggacctggagattttaatggctttgaaaattgaggtgatttgaagccttcagtaaaaccacttagagaaattaaaagaatttcagggcccgttggctggattccttggtttatatggcttcattggaagtctagtgggtgctcttgacaggaacgctttggatttattaatgataggctttcaaatcatagtaaaactgtgtgtcagccactatggtaggcattttacagaagttttctttcttaatcctcatgattctatgaggaagtatggtagaatattagtcctgtttcacagaaaagaaaatagaggcttagcagtgttaagagtgatttgtccaagtaaatttttatgaagtcctaggcggtatttttcaataagctttgtataatcacacttagcaagcagataacttactggcatgtgcatcattcctgataccacctctctcttcctttcattcagaattactaatttcagctggattcaatttgttgtcagttgattctgtagtaaggccatatgttgcccctctggaggtgcttgtcaactactctggatgatgggtaagcaacttgcttgtgattacagcatgaatcagcagcagaaacttgctgactggtattctgacctctaggccgagccacctgttagaactagagctagaaatgaagatgccaagtaatttaactgtgaaaaacttgtggcccttaatttggtaatggggggaggctgagatatacctactgctacttggtggagacctttccattagggaaatgtggaacaactgagaagctgggttaagtttttaa

SEQ ID NO: 59053 - DNA, 888 bp, Homo sapiens
ctggggaaggagtgtattccggtctggacaacagaatgctcaaagttaagatagtggaagaggttgtggttgttggtctagactatagaacactcctgtctaatagatcaagccatgtgtgtaatcatacattttctagctgcctgcgctagagaagtaaaaagtccattttaatatgtttaatatattaaattcaatatatctaaaatctaaaagtttaccacgtggtacagccacatttcaagtgcttagtagctacatgtagctactggctgctgtgttggacattacagctgtagaacggaaacctgtaggtgtggttggctgagatgggaggggcaagctaattggaagagaggaggtcaaggacctggagttcagggtattgcgaggataatcaggaagtatgagtggcgtcagagaaagtgacagtgggccagctaggacaagctgaagatgataaaaggttgagaatgtggaggattttgttgactgagcacaagctcttagatctaagtttggggcattaagggtggaagaccgtttgattaaagagatcagagccatgtggagatgaaaaataagggatgacctggaagtcttgggcttcctgtgttgcacaagcaaacagaatgtggagaatgtggcgtttttttgttttttgtttgcttttttttttttggacgaagtctcgctctgtcgtccaggctagagtgcagtggcgtgatctcggctcactgccagctctgcctcctggattcacggcattctcctgcctcagcctcccgagtagctgggactataggtgcccgccaccatgcccagctaattttttgtatttttagtagagacagggtttcactgtgttagccagggtggtctcgatct

SEQ ID NO: 59054 - DNA, 909 bp, Homo sapiens
tttagcgctctgctaatttcggactctcgcttggggtcccaggcgcttaaagagataccttacaaaaaacggtgcacgggcttggccactcgtgccccttctttcttcctccggcgcctgccccctccacatcccgccatcctcccgggttcccctcttcccccagcgcccttgcacccgcgaagccgatggagcaggcggctgcgccgaaagttccgtgcaccctggcgatcgtgtcccgtacgaggctgctcagaactcggtcatcgaggcttaggcggcagcgggggtcgtcagacaccagttcgcagagcaggtacctgcggcaggcgagaggaaggtggacactagcggggccgcgaggacccagcaaggcactgggagggtctggaagggaatgcttacctgtgcttgaaccgcaccatggctgcctccgcgctctccggtccggcgtgcaaaccggatgtgaattctgtccgctgccaatgggaagcttgcttccgcagcctttcagccattcagagaaggagacaggatattagggcggagctagaaagttgagaggccgaagtctgtcagctctctcaagccccgcccaactgcgtttgtaagcgcgcatgcgtcctgcggagggtcactgactagtttgagggctgaaccccgggatggagcgccttgcagctgtaatggatggttctgttgcacactgaagtttacaatagtgtgtaggatgtagccgctacccttggggccctgggaaccttgcaccacagttatgtatgcgagtatattctctccccaaggtgaacggtggagcttttgagggcaagaccctgcacctcacagcccaggcattgacaaacgggaaatcggacttttattttcaggtttgagctcagtttaattctt

SEQ ID NO: 59055 - DNA, 2997 bp, Homo sapiens
tagggtgcctcggtcccgcccctacgcagcggaggccggccagaggccgtcgccatggagacgcgagcagcctggcacccactcgctctcaaagccacgcgtttccgctgcgttggagccttctcattggacggccgtctggacgctaccacccgccccgagcccgctaaggggagggggcggggccttattctcatgggattcgttccctggagacctgtgtccgcggcctctctgggaaagcatgggtcctctccctcacgcggggaaaaggactgcgtctcttaggtctggagagtgtccattgcttctcctactagaatttatgctcatgctgctccctgagaaaagaagagggggcgggaaagtcggccacgccccctccagagcctatttggtctcaggagctagagcaccggaagtgctggcgacatgtcagtgcgccctaccctaaaccttccccccccaggccacctttcccattcagctgtgggattccggggccgcctgggcgctgcacccgccacttccgcatcgaaccgccgcttcaaccgaactcactccctctgcgcgcgctccatctggtgcccgactgctgggccggcgcctgggagaagccacgccctttcccgcgcctgacagccaatgagcgggcgcctcccggcggggtggtgggtaattaatgagggccgggcgctgattggctgcagcgtcgtggccgggggcagggcggcggggtaggttgttcctgaggtgggaggcggtacccgtggctgagaagaaggaggcctgagagcgacatgtccccggcggctcaggcggagcggcccgtggcgctgtttttctgagtccggggtggcctggcagccggccgaggacgagggtcggcgggggctgcccccgtggtggtggccgccatgctgggagcctgggcggttgagggaaccgctgtggcgctcctgcgactgctgctgctgctgctgccgccggcgatccggggacccgggctcggcgtggccggcgtggccggcgcggcgggggccgggctgcccgagagcgtcatttgggcggtcaacgcgggtggagaggcgcatgtggacgtgcacgggatccacttccgcaaggaccctttggaaggccgggtgggccgaggtgagagtccccctgccgagccgcgggatccagggcctgctgtgctgggcgcagccggccgggggctgcgggccccgagcccctttcgaccctggggccgcgtctctggagcgaagtttctctctgcagcttcttcgggggcccgctctgagctcagggcctggcactggctccaaggtacctagagtcatacaggcagagagttggccagaagttagttatatttggatttctcatcctgcattttctcaacccctcactcccatccaagctgggagagaaatgacgaaggcggccttttgctacctccaggcctcgcgggttgtaggtcatgggtgcccctgcttctcctgtcgagacagttcttgggagattctcgtcgacccaggaatcggccgctttccttgccccttctgcaggagcggggcttgattcttagccagaataggaaggaatcttcgaagagaatgggccaggaaagtttgattgtagcctcctcccccgccctcttttcgagcgaagaatatgtgtgcttaaaagtagaatcggcaggccgcccccagagggtggttctatcgaagccatcctgcacgtgaggctggtggctgtgtgtgaactgggtcaaccagtgtaagaatccgaatggtctatcagagaatgcttacaacctcccctaggtgatcctgagagttctaattccagcttagggggaaaatgattgtgacttaacttgctgggcaacagtggtttttaacggagctgctcccttcccaaagttagtgtgtgtcagaattgccagggcagctggttaaaaatgcagattcctagtccccactcgaaattgattatagtagattgagcttttttgctgggatccaggtttctgcaccaggggcttgtgatgtaggttgccccgagaccaccgttttggaagatcagctttataatctttgtttcttctgttggagggattggaaaacaggtttcagaaggaagttctttgctaggagattgatactgtatgctgggttcagaggctaccaaattggcagtatgccacctccagacaaccaggagacagactcactcttcactttctctcattctttttctgcgatgcccagatttggctcttgcttttactaaaatagttagttcttcccaagtcgattgcagtgtcctggagtttgttatattaaggagtttattgcctttcacacatgtgagggtcttgggacacagggctgttttgtgaagttctatgtttgtcttggagtttgttgagccctggcatgtagatcacagtagcctgggttcagctgactcagggctccagtctttagcagcggtaacagcagccaaagccagactttatagcaggaggtcattactatctctatcctggacccttcctctttcttcacgagtgtgggcagggaggaaagagcccttgaggaaactagacagtttgtggactttgcctcttgagatagcggtggtgagggtgctgagcggatggtttctttcacttagcagataccaggccttacattggttacatcgtcctattcagtctgttgtgcagagaataaagccgagtaagaccacacaggtttagttcccagatactgcccttattcagaaattctggttttaatttgctgatgcaggtggtgtgtgtgtgtgtgtgtgtgtgtgtgtgtttctttggcttggtcagcagtcagccaagatctgtgtccttgggttattggctcatggttgcagttccttggaaggagtttattgtagcaggtaaaattacatgagacctaccaaagcttgtgtgtactggagtcctatttc

SEQ ID NO: 59056 - DNA, 823 bp, Homo sapiens
gctgaggcaggagaatcgcttgaccctgggaggtggaggttgcagtgagctgagattgcgccattgcactccagcttgggcaacaagagcgaaactccgtctccaaaaaacaaaaacaaaaacaaaaaaacaattccccacccatgcacaaaattttctgtgtatccgtaaatcaaatgtagtcgatgttccagatttgtaatgatcacagtcctcatggaagaaggaaattcttagagctcagttggaagagaaacagcagtctttcagtcttcataggtttgtatcccggggcaatggttttttgaggctggaaaggagggggagcatgttagcagtacatcctttgtatgcattgctcagctactctttgatttcttgaggagaaatagaaagaaaaaagtctgaagacaaaagtgcaatgagtttcctcttccattgtctcatcagtccctctgatctcgtggctaatgtcacttacaggaactgttaacagttatgtttatttttttgaggtcttgacctcaaccactgggtctttttgttaatcttttaccttttgccatgtcttctcccttgttgatgattcagaagataaagctctggggatgacagcccctggccttctcccaaaggatctagttgccagatgtcttcagggtcaccacgtgagattggaaggcagtcttgaaatcttaatttcatgcgggaggagagactacatgacggctacatctgtagttggaacagtatatttatggagcactggaaagccttactgtgtttataggataaaggagtcaggctactctctggaggaagc

SEQ ID NO: 59057 - DNA, 1508 bp, Homo sapiens
gggttgctgaagctccagccacccctaggccctccacctggcaggaccaaagttggggcagtagccgaagcaccgccccccgggccccgcaggagtgtgcagtcacccagttaggcctatcttggcctgcccatcactcctggcctgcggtctcctaaccctgtggcagcagcagcattccctgaatggatcgaaggctgccatggtgtcgtccgctgaattgctataggagtcagcccagggctgctcatgtgcacctcaggttgctgatggcagctctagttatttggggatggaagtttggggagagtgggccttggtccaccctgtgcgaaagggaattccacagccccccgggcgcccgcccccgcccccgccccgccccctccccgccccttccccgccgggccccgggccccgcccccgctctccatagttaccgcgctgtggaggcggcggccatcttggcggcggagcgatgagcgggtctaacccgaaggctgcggccgcggcgtcggcggctgggcccggggggctggtggctggcaaggaggagaagaagaaggcgggcggcggcgtcctgaaccgcctgaaggcgcggcggcaggcgccccaccacgcggccgacgacggcgtcggggcagcggtcacggagcaggagctgctggcgctggacaccatccggcccgagcacgtcctgcgcctcagccgggtcaccgagagtgagtgccgcgcgggccgcgccctcccctcgcgccgtgccccggctcccggagccttcagcggacccggccacttgaccagcgcgggggtccccgccagaccccctcggccggccgggccgcgcttcccgctgccccgccggccgggctttgctcccgccacgctcacgtagctctggtggggaaggactctcctgggctggaccgcattcctgtgagtccggccacgctaggatgcccttcggccggtcggctccccagctctgccggacctgtttgggtagagggccccgttcagctgaactggatcctcctgagccggccgggggccgaggtcccctaataaatgggcccctgggccctcagcctggaacccccggccatcagtgaagttcccgctcagccaggctcccccagccctctggcaggccagaagccttacctgcttcctccgccctggccccatggcagccctcccccattgcagcctgcccggcctccctccctctttgggtcgggagcgttgccccttagtgtgcagatgggttcttcctcaaaacacatagccgtggcatttcctgctcatttaaaactgtgccacattaaaacaaaaataaagtttcagtttgtgtacagactccgacatgtgaatcctgcttttgacattctcgtgaattaagaatgatttcagagtttcagaaatgcgtttcctgcacaaaaggcaaccatcctaagctttttcgttgataggaggatgggtgggaagaaaaatgttgcccagtccct

SEQ ID NO: 59058 - DNA, 938 bp, Homo sapiens
ttaacgaatgtgggcacgaacagccagctgaccgaccgcgcgcgcagtcgagcgtcggttcctcgccttgggagggaccactggaggccccgccccctggccgcgagcgcacctcggccccgctcccgaggccctacgggcgtggcctctgtcccgggtcccgccccccagcactccggaacagcgcgctcgcagcgggaggtcgcgaagcctgggactgtgtctgtcgcccatggccgccgcgctgctcgcccgggcctcgggccctgcccgcagaggtgagtgcgctggggatccgtacggcggggcttcagcccgcgtctggcccagcgggcggaggtcctggcggccggctctgtcagagccgctggcaggcggagccccactccgggagcgctcacggcctttgccccagttctgctgctccttgcgccgacccagcccggcccttcaggcgtccctggttcctgcacagacccctaccccccgattgaccccagccaccagcccagttcccagttcccatatctccctcccttcatttcacccccactagaggttcagggtgcgtccttcttccggagccaggcctgggattgaaccagacccgcatctgtgaccttgggcaagacagcccctcctcagcctcggttggcccatgtgtaaaatgtccacagagaaaatcagagttgttgggaggattaaatcatagggtatgtaaagcacttcgtgcctggcgtgtaacaggtgttccacaaatgctcgttcttgctggttaatacagtacctttcccatcttacgtgtctccagttgtagcagccgtgacacatatagccacggcttcctttgcctggcctgaattacaaggggaacgctactgagaactgtgttaagcgctagttagtctttctttcgcactccgaggagcggaatacta

SEQ ID NO: 59059 - DNA, 486 bp, Homo sapiens
actaaaaaggaaattatggcaaaagcagccccaattcagttaactgaatttgttatcaaacagacctgatgtattcagagaaaaatttttctgtgagttaggaaacactaaagagcatctgtttattgagcacctgaaaggagtttggcttggtagagagaaaagagagtggaggtgagaaaacaaatcccaaaagaataaaggtcatgatcttaactctctagtaacagggcacatgtacacaggaatatcaacaggagcaaatatcgcttgtcttacggaagaatggaattccagagagactcactgcaagatcagcttctgtttacagaggggttaaattatggtgtacttgaagtcaaggtttgttagcaggattttagctgctggagttttaacgtcacctgaaaacattgcttttattcaactagtagagtaaaaatcataagagtctataatatttttggaaaatcagtcaggcagaaa

SEQ ID NO: 59060 - DNA, 2168 bp, Homo sapiens
tacgatcatgccatttcttgcttcctcactctccagctatgacttccttctcactacccgatttccactcttcatggatactgccatcattccttcaacccgtcctgcaaatatcccacctctacatgctaaagggagacccctcatgttccttcccccaaaccctggcactcccttctccggatatgtaggttgtcaccccataaactacacagtagcttctcgcttctcggcccttaacgagctacttactaactttaaaagccccacagaaatgaacttaacttgcaggtcctccacctccacacttggccctgggcgccattcctctgaaaataatagtaccaacccttacaaagactctgcccatgccccactgtcaccaacgaattccttttccagaaggaaaaggaaacaggttcttcaggctcctcttccaacctcttcaccagtgactcccctccaaggttcgtggactctacccccgcagttttcctcccctcactcccgggcctctgcccacctcaccaactctccctgcgctccctgtcccagagccaagcggcggccgctccactctcccaacttagaagttctgcctctatcacctgttctcactagagcttcctctcagcccagcggcccacctttgccctggcctgcctctctccaccccttcgagtcctcctgcccaggaaacacccccacgagtcagttccggggtgcctgtcggattcaacttcccatccgtgggattcccacccccggggtcatgctccccttctccatcacctgctccgcccatagccagatgacatccgccgctgcctcctcctccattccccttctcggacgccaggtccccggccactcaccgccctccgtgcgcgccagccgccccctccggtggggaagaggggggcgtgcaccccaacccgcgccccccccccacgacacgcacctgttcttcctcctcttcccctcggcgggccgcgccggcgccccgacccccacccttgccgcctcccggcctcccggagccccgcactcaccacgagtaggtctgctccgccatggcgctgcctctcgtgggctccgctgcaggctgtggccgggcccggcggcggcgggctcgctcgggccgtagctgaaggcgcggccggggtccggtgcttgcttgcttgctcgctcgctggctcgctggctgcacggcgggccgggaaggcggctggcggggagaggccgggctccgaagcggccccgctccctgggccccggggcggggcgggctccgctctcggcctccctcacccgcggcggcggcggcggctccgctgcagctccaaacccaacatggcggcggcggcggcgcggagaacaagggggccctggggcgggcgaacggcaagacgggcccgcgctcactgcgcgcggggccgcgggagcgccgcgctcgggcggcggcggcggcggccgggggacatggccggcgggcggaggcggcggcgactgaggggggcgctaggcgatgaggcgaggccactcgatcacacccgccgaggggaggaggggcgggggcgggggcgagccttggccccgcgcgggtcacgtgcccaaaacacgctcacgtgatgcgcgccccgcccctcgagccgggcccatgcgcagagacgtcggctcctgggttctaggcggctgctgctcgcacagccagagcagttgggccgcctcccgctgcctggtgccgcccccctccccacgcggagatgtcgcctcgggtaccctcttccgcccctctccgaggggctgctgcaccagccaatcgggaaccccgatgcgcgtctgttggctgccactcagctgtcaaccgtcagtcaacagtctgctggccacgggccccccaactgtcagtcaacctgtcagtcaacaggcagagggctgcattccttcgttcgtatgttccttggttcattcattcaggtagcaaatattccaggcagccaacctttattgcgcccaggcccggcaccaagtcgaataccccacgcttgccttcacagaatcaatcaacagatatttgttgggtgccaaccatgtgtcaactcactctgccttcctagagcttacattctaaaggaagagacatagtccaagcccacaaataagat

SEQ ID NO: 59061 - DNA, 708 bp, Homo sapiens
acagggtttcaccatgttggccagattggtcttgaactcctgacctcaggtgctccacccaccttggcctcccaaagtgttgggattacaggcatgagccactgtgcccggccagatgaacttcttaagaagagaacttataaaaaacaaaaatatcaacttgaaatgggcaggtgggtagaagtatgtatctccaacccttagagttccgagagcatccaccagggggccgtgcgccttctccttcttccaaaacttcactgacccctggaagcagtcatttcagaaaggaagagaaagttgggtttttccatgggtttaccccatggaaataaacaaagccaatacaatctcggtgtggctgggtggggaaaaaaaacaaaacaaaactcaggccagggtaagaagaagtaagtctgggtctttgtttcattggccctggggaggagcctaggtgatatctctgagcctcggttttctcatctggaaaaatggaaataatcctatctagtgcacagagttcttgggagcaccaaataaaagcattttctttttttttctttttctttctttcttttttttttttttttgagacggagtcccactctgtcgcccaggctggaatgcagtgatgcaatctagggtcactgcaaactccgcctcccaggttcaagtgactctcctgcctcagccacccgagtagctggg

SEQ ID NO: 59062 - DNA, 2562 bp, Homo sapiens
gcctgggcgatagagcgagactccatctcagaaaaaaaaaaaaaaaagagaataccctcatttccttgcaatttgggacaggtgttaggagcctcattttattcttctgaaatcaaattatccctgattcagacttcaggtaaggtggcattcaaatgcagtcgtgactcagggcttactatttctattcttctaaaaagactatgggattctcatgtaggtggaaatgcttgagtgggcgcctctggcctttggtctacacgcactagcctgatacacgtctcctccaccaggctgtaaacctcgtgaagtatcggttttattcctgactagaacaaggcttagcacctagtgggtgctcattaaacacatgaagcatgaatcagtgagggatttcacatctcgtcatctctgaaaagcctgttagctcacttctaggaccaggaaactggcattatcaagagtgttattccagctttggttggttctgaaaataataataatgtatcagtccagtattaggtttagctgtatagaacagaaaacccaaagtgaaatggcataaacatgtaagagttgattccttccagaagcaggcagtctaggactggtgtgggcctcccctgaaggctggcaagaccactatttctgtgccaacctttggcgcaggggtctttattcagattggctactccatacccaggatccagcctccccaagttttgcctaggtcaccaatcctcaggatcccccaaatcatatctccagtcttggggcatctccaacgtcccatgaatcatcacccatctctgtaaaaataaaaaagtcccaggctgggtgcggtggctcatgcctgtaatcccagcactttgggaggctgggacaggtggatcacctgaggtcaggagttggagaacagcttagccaacatggcaaaaccttgtctttattaaaaatacaaaaattagccgggtgtggtggcaggcgcctgtaatcctaactactcgggaggctgaggcaggagaatagcttgaacctgggaggtggacgttgcagtgagctgagatcacgccactgcactccagccagggcgacagagcgagactccgtctcaaaaaaataaaagtaaaaaaatttttaaaaagtcctagagtacacagttcctgagtctgctgactgtctaaagatgttcttctctgatttctgctgactgcagagaagaacaggggactttggtctcgttcgttgactcctcagcagggaggaagggggcgtggtctctggttctccaaggcattggctggaacaacaggagtttccatgccaggctgtagctggttttctctcaacatatttaaaattaaacgtgtttcaaaccataaagttcaatttccttctgaaaacattctcctctatcttctgaataggaaactgatattcctgtgagttacagcactttgatttaatgttatgaatcctgatcttattatgctaagaggacactgctccctccctgctcagagtcatatgacaaagacttcgcatgtcagtacccgcagtgaagggggccaggcccaactggctcctgtacatgcgtgcgtgcgtgtgtgtgtgtgtccctggctacagaaggggcagagggcaatcttgggggcagagggcaatcttgtttgaccgggccacatttattaagtacttaggactgtgtctagcacataataagtgctcaataaacggagatgccatgatcatttgtagctagttacatacccaatatccattcttcctatttttttccttaataacagattcagatcgtgctgcctggaatgaagacatttcccagtctctcttgcattttggtgtggccccgtgactacactatgttccatggactgtagtaggtaaaagtgtatgaggcttccaggagcctcagccttgaggttcactgcttttgtcctctattctacctggtatttggatataatggctagagtccagcagccatcttggaccatgaggtaaccctgagtacagaagccacccactgaagatggtagggcaggaaggtcaaagctctggtgacactgtggagcccccacactagtcctggactgccagcttctggaaagaatcaactcctacatgtttatgacatttcactttgcagtggcatccttgataatgtcaggagtttcctggtcctggaagtgatcaaacaggctttttagagatgatgagacatgaaatcactcgctgattcattcttcatatgtttaatgaacactcactgctaggtgctagggcttgttctagttatgaacaaaacagagactttatgaagcttacagcctggaagaggagatgcatacaccctcacaaatgtgaaaaagcaccctgaaagagcaaatacagtgcagggatggagagtcacagaaaagaatctgttcagatgtatcacgaagggctctgtgcagaggtgacgtttaagctgagaagtaggatgtcttagtctgttcctgctgctataaaaaaataccataggccaggcatggtgactca

SEQ ID NO: 59063 - DNA, 4483 bp, Homo sapiens
gggaatcgcttgaacctgggaggcggaggttgcagtgagccaagattgctccactgcactccaagcctgggtgacagagtgagactctgtctcaaaaacacacacacacacaacccaaacacacacaacacacacacacaaaatcagctgggtgtcgtggtgcgtgcctgtagtgccagctacttgggtacttgggtggctgaggcgggaggatcacctgaacccaggaagtcaaggctgcagtaagccatgatcgcgccacagcactccagcctgggtgacaaagtgagaacatagctcaaaaaataaaaaaataaatttgcacctgaggcaagtgtcacactcatcccaactcagtctcaccttgcatgttttctgccttgctggctgtatgaccctggacaagttacttaaccgctcagagcctcgatttcctcctctataaaatggggataatctctgtaactgctcacagttggtagcagaatgcaatgaagtgaattcgccctcacagagccagcactgttcttggcacatggtaatcttaacatattttttcctacagggaggcctggtgtcaggccgggagtggggtggaagggtcccaaaatggatggaagggccccaaaatggccgtgagcatcctctgcccttgagaagagctagcccagctgtctagagctccctgctgctgccgctctcgtaagcagcaagcatttttggctctcctgtctcagcatgatgcccctacaaggttctttcgggggtgggacccaacgctgctctcctgatggcctccctggctcccagcaccttccatcccagctgctcagggcccctcacctgcgcctcccccaccctcccctctgcccactcccatcgcaggccatagctccctgtccctctccgctgccatgaggcctgcactttgcagggctgaagtccaaagttcagtcccttcgctaagcacacggataaatatgaaccttggagaatttccccagctccaatgtaaacagaacaggcaggggccctgattcacgggccgctggggccagggttgggggttgggggtgcccacagggcttggctagtggggttttgggggggcagtgggtgcaaggagtttggtttgtgtctgccggccggcaggcaaacgcaacccacgcggtgggggaggcggctagcgtggtggacccgggccgcgtggccctgtggcagccgagccatggtttctaaactgagccagctgcagacggagctcctggcggccctgctcgagtcagggctgagcaaagaggcactgatccaggcactgggtgagccggggccctacctcctggctggagaaggccccctggacaagggggagtcctgcggcggcggtcgaggggagctggctgagctgcccaatgggctgggggagactcggggctccgaggacgagacggacgacgatggggaagacttcacgccacccatcctcaaagagctggagaacctcagccctgaggaggcggcccaccagaaagccgtggtggagacccttctgcagtaaggagccctgccccgtccccgctcccaggagagcctagaggggcccccctcagctcctaacgagccccccttctgagttgagtccccatgaccttcagcctttagcctagttgctgggaagggggacagggcccatgagagcccaggggtccttgcttggaggtttgagcctccagcccctgaactgctcctctgcagagtcccaaatcccatgagcccaggcctttagcccagtccttgggcaagggggacatttcccaggggggtccaagatgggagaaaaagcaggtgagttcacaactcaaatgcctggagaactgggaggtggtggaaatttttagccactctgatcatttatactctccagaccctaactcctgcactgagtcctcagtgggtaggctccggggcccaggaagcactgccagggaggagggcccgaagctggggtttgggggctttcctggcctcctagggactcatgcgtttagccagggaagcccaggtctttcttacctgaggcagacagagcctcgaggtgggagctgctcccctttcctgtatggccacaggcaccccacctcaccagcaggcgccattagaggctgcccgttctacatccccatccgctggcggactccccgtctcctggagaactgggtgggtcctgagctcgatgcctcccctctcctcagcagagctgacctagttactaattacccatgtgctttattatttctcttttgttttataaatttataaatggcaaaaggctctgataaggtctgtgatcattaacttgtaggaatggtggcctggaaagatctgggccaacccacctcccacctagtgggggtgggggatgggggtgtgggggagaaggaaggatggcctgggggctacaggggccacccctccccagcggctccctgacctccaccctacagcgcctgcttgaggaggttcactacttcctgggcgctgtgctgaggtttcacaggaataatttcccttcatggtgaggagtcctgggcagaagctattggtgactctgcttcacaaatggggaaactggggcttagagccgggaaggagctagactaagttcaccaaactgaggccccaaacctactctgttcggtgctctcaattgctatgaccggggaccagaggcctgcagggggtggccagggagtcagagagagaccgagccccaaagatgctccaaaggggcccatctcttttctgtccaaggtcctgatcccagctggggtgggggagggctggtggattcctgctttcccagaggcctcagggagcctcccgagggcctggacagggggcaggggagcagtcagggccccctgacttggcaggaagaggagggcaaaggactccagagctgcaggggaggggcaaagagtcaggcatcccagacccagggcgaaggcaacctgacggggtggggctgggcctgacctgcccagggccccagatgggactgggggctttggggtgagggtgggggcaggggatgctttcttacctggctgagtgagctctctcggtcagcagccccctttggtgggatggtggggttggggaggcttgatccacagcatttgaaggggaagcagaggtcaaagtgcttcctagggaccagcagagacctggaagctgaggcagagagtgtagagagaggccattgggggagatggacagagaagctgggagaagcagaacggaggagccaggggggcgggggctcagacccagctgggagaaggggcacgggagagaatgaggcgccccaagcttgcaaggaggctggagtgcttcccgcctgccccgattgggttttctttaatgctaacagcatgctatttactttccatttaaatttgagatgttgctataaattatcaaccagctccttgttcctgcagagtttataactaactacctgggttacttattgttcaggtaacaaaagggatcggaaaacgccctgagtgaaaaaagtggggcctccagcgtcagggtcaggaaaggagccagggagagaggggcgggggacccctattgaaggcctgggccattggggaggttgaggctgggaagacggtacagaggcagaatgtctagtagaagctgtttcccgggagaagtcagtgtctgggaagaagccggggtgggtcctgggtcccaggcctccctggggtgccccatgttggtggccacagcaggaacctgagctctttcttcagatctcccccttagctccctgagtgaccttgggaaagtctgttcctctccttctgcctcagtttccctccctggccaaggaataaagtccaaactccctgccttggtttcgttcccctccctccaccccaccaaattcctggatctcttcccaggtctttctcttcctctcggcctttgctgcagtcattttggctttgctgttcctcagtaccccaagccaattcccaccccagggcctttgcacgtgctcttcctgctgctcagaacctctttccagatcttcccatggccgattccttctccttcagctccctgattgctccatccaaaagggggccccacccccgtcactctcttccactactgttgttcactttctctggttccctgtcaagacttgtgatcatctgatttgtttgttttctatctcctgccatgaaaatagaagctcttcaaggacaaggcccgtgttgccttatttaccacttgtacccacatcctgcccagtggctgatgcacagcaggaatgagtgagtgactgggattgtctgaggccctgaagatatctgctgccctgttggtcagggcccagcagcctgagacgtggccaagggagaaactgggacccagagttccttcctgggtgtcctcccgggtc

SEQ ID NO: 59064 - DNA, 1474 bp, Homo sapiens
aagtgatcctcctgcctcagcctcctgagtagctgggaccacaggcatacgacaccacacccagctaatttttgtatttttagtagagacagggtttcactgtgttggccagggtggtctctaactcctgacctcatgtgatccacccgcctcggcctcccaaagtgtggggattacaggcatgagccaccacgcccagccttggcctcttagttctgagctaggacagttggagaatctgccctcaaaaatagtcaggcccttgaagactctgtgtgtgtgtgtgtgtgtgtgtgtgtgtgtgtttgtgtaagagacacacagagagacagaagagagagagtgatagcaagggagtggggggtagggagagagagacatcgattcagtaggttctagaaaaaagtggcacaggtggcttctcccagaaaagggaaagacatgccctcttggttctctgactcctaactggcatttaaaattcacttttttgttgtggattttttgcccaactctactaggaattgtttaaaagtggaacgttcgtatcagctcactttaacagtttgctttccattttcacattcaaaagcctgtcttcggtttctaagggttgcacatgtatttgtgcagggtggctggcctttgttttattttcaagttcagcttaaatttgacctggcatgagagaatgagaatgagagagagagagagagaaagaaacagacagacatggaatcagatggacaggggcacatagaaaatctttggtttgagcccaggagaggctctcaagaggtgagaggaagactgaccctattctctttgtgggagagagaagggaaggagggaggaagggaggacacaggaggacatggcacaggagggtgatggctgcagatgggggaggggaggcatcaggcagcctggctctaggatcagataaacatgtttgccacagagcaccaggctggactttgtactgcccttccttctgagctctgactggcactcagcaaagcagggagatgaaggagagaggatcctaggagccccggaaagaagggagagagagaagctggggagaggcctgcgggggtggggtggtcctggcaacatgaaatatttttgagtcccaactagatcaccttgcacaagtgactgcacctttctgagcctcagttttctcctctgcaaaatgggcacaccgtctacttcctagggttataagatgtaagtggccagtcctcagcacggtgcctggctcacagtaaatcctcaagaaacatgagttctcagacttttttttttttttttttgagacaggatttcactctgtcgccaaggctggagtgcagtggcgcgatcacagctcattgcagccccgacctctcgggctcaagagatcctcttgtctcagccttctaagtagctgggactacaggcttgtgccaccacacttagctaatttttc

SEQ ID NO: 59065 - DNA, 2108 bp, Homo sapiens
ttgtttattgttgtggttgtcccctttttacagacctccctaagttcctttttttttttttttttttttttttgagacagagtctcgctctgtcgcccaggctgaagggcagtggtgcaatctcggctcactgcaacttccacctcccgggttcagccaattctctgcctcggcctcctgagtagctgggattacaggtacccgccaccacgcccagctaatttttgtatttttagtagagatggggtttcaccatcttggccaggctggtcttgaactcctgacctcgtgatccacctgccttggcctcccaaagtgctgggattacaggcatgagccaccggtgcccggcctagattgccctaagttcttacagccagtagatgggggctcttacccatctacctcctcaacagagcagaggttgggctgcccccaaaagtctctcctttctataaatattgaataaatattttaaagaatattggcttgaaggggatcttgggcttgcttattaacttggggtgactgcaagtccatgattaacaccagctctttgagtggggcgcagtggctcacgcctataatcccagcattttgtggggccgaggtgggcagatcacttgaggtcaggagttcaagaccaggctggccaacatggtgaaaccgtgtctctactaaaaatacaaaaattagggcatggcggcaggcgcctgtagtcccagttacttgggtggctgaggtgggaggatagcttgaacccaggaggtggtggttgcagtgagccaagatcgtgccactgaactccagcctaggtgacagagcaagactccattaaaaaaaaaaaaacaaaacccaaaaacaaacaaaaaaaacccagccctttgtactccagggcttgggagggagctgcgacttcatctgtgtaatcgaatgtgacacaggctactggaatgaactggactttgggctccaggctggctcctcccaaccctgactgctccctaaaacagtcctgcctgaaagtgccaggctgtcctatggggtggggtcactgatctaaagtggctcattctgttggctggcaggtgacccaacacatggggtctgtgtcccgtgaccaggaatcagactggttctctctggggtttggacatggggatgatggagatcccttatacctgggaggcagaggggagccggacaggtgtggagagagaagcagaggctgaggggaaaagtgctgtagttcatgagagagagtgacagagagagagagggagtctcaggtcctgatgctttctcgatttttctggccatggttataataaatcctcttttcatgagcagacctggcttttcttccttacaaaagagacccaatactacataacagaacactaaatactgtgatgttgcttacacaggcccagagcttctaacacagagagttgtctgggttgggcttcccctgaagcagatccccagataaggatttggcttatttggaaagtgatcccaggaagcacaaataagggagtgagacagtgagacagataagggaaggcagacaacaaagagtgggtattgaagtaattactactgtggtccactggaggcgatctttaggaaagagtatggaatggggcccagtgcggtggctcacgcctgtaagcccagtactttgggaggccaaggcaggcgcatcacctgaggtcaggagtttgagaccagcctggccaacatggcaaagcactgtctctacaaaaatacaaaaatcagctgggtgtgggttgtaggcgcctgtaatctcagctactcagaagcctgagggaggggaatcactcgaacccaggaggcagaggttgcaatgagtggagattgcgccactgcactccaccctgggtgacagagcaaaactctgtcttaaaaaaaaaaaaaaaaagttacgcaatgagacccagattccttccatcttttgggtgagggagctgtggtatttatccaccaactcccaccagatctggtggagggctcttctcagagtgggtctgctggcaaagggatgcaggtgctgacagctggaagtggaaccaaccttccctaga

SEQ ID NO: 59066 - DNA, 1079 bp, Homo sapiens
catttgctaatctgtaaactgggcaaagaatagtacctatctcacagagtgcaagaattagagatagtgtatgttaagaggttagtccagtgagcccccaaatgtgagctattattactagactcattctactcaaggcagtggtgcagtggggtgtagacagctaggtgggatggggtattctgagatgtcatcagcatgggctagggataaggaggacaggggtccccagcatccccagggacgtggactctgatactgggttttgtcttgcgtgggggctggaggagcccagtcttaccttgactaccttcagcacccgcacatcctggtccagcccacgcttcccctggaaatgctcctgcctcagaaactcctccacggtccgcacagcgtctagcacctcttccttccactcccggtggggctgcagccactgagccacgaaggagtccagcctggaggctggtgtgctatacagttcctgcatcagtgccatctctgtcccgagagtaccgctgctgggcagatatatagccaggctcctacccagctccctggcacacacctccttttttaaggtagctcctcctcagctgccctccagtgctctgtgggaggagggaccctagcagagaggaaaccaggtgtgacgggctgactccaggtcccccttcttggagacacccttgctgcagtaggggcacaggaggactctgggctgaggctggaatatctggggccaccttaacaggctggccgtctagtcaatctgtcatcagtttcgattctcaacttttagagttctcctttatgacgttgggaaactgaagttggatagtgtttgaccccaaaggaggcaacttgcccagtaggttggggttggatagttgttagtcaattcaactgcttacatctgtctaaggaaattgaggcttgggaacggaagggactcactagtgttcaggtggtggagtgagaatctggagcccaagagaacagactgggaattctagtctacctgtgccagactctaacctctttgaccctcactattcatagagtgggtttttttgttt

SEQ ID NO: 59067 - DNA, 667 bp, Homo sapiens
tgcctgctcttgaacaaagcacagtagccagggaaaaattgtgctttgattatctaggactggatcctggacctgcccctgggacttgcggaaggggacagctcaatctgagccatatcaactgagaacacaggaagcatggtcctaccaagagatgtctattccaggtatggtggagcctcagaggacagcatgactctcgttcagctggtggatcagggaatggtccaataagccacagctgtggatatgaaggtctgttgatttcagattgagctatagggggatactgggcatggcagaaaaatctatcaatctctgctatagttaaatatttgaatattggattgtttgcagatcttgtgaaatcagtgacctctgggtcatgtagaaacccagcacattcccacaggacacagcctagcagttgatcagagcagtagttcatacctgagaccctggattttcagaccctcccccaggccccaccagcctctgtcagtgccaagctggacggaacaaaccacatgaggttggtcaggcctctaccccatggaaaaacacagaatggtgattttttgcctgtacattcctggacaaataaattctcttttgggagctttttcctggctgggctatgttatatgcctcagagctgcccagatcc

SEQ ID NO: 59068 - DNA, 1589 bp, Homo sapiens
aaagaactgatgatctttcctcctgaggatgaacccagcaacaagggtggcagtgcatagagacaggaagaacccagatctttgatgatgttgtcaaaccactaaatcaaccccatctgaagtatcttcccccaggatatcccaatacatgaaataataatttatttcatatttaagccagcttgagtcaggcattctgctactttcagacaaaagcaccctaaataacttaatttgcaacttgcagcaaaagcccagtcctggatcaatgtaaatttccttccattctgtttttatacctgttctgcttagactggtggagaaaacaataggtcctcagtcttccagaaacctcagacgtctctctacccatccaccattaggagagcgtttccccatccatctccagcctttgtttagggttgcagaagacctgcgttgttatgtgaagtggccagctgtcttgactaggaaatagatattttttaaagttcccaaggatagcatgggtatttggcttgggtagaggggaacagaggggagatcttgaggttaaaagaaatccagcattcataaggaggtagggtagttatactcagattaagttgaatgaacgaagtcattcccagtggctgagttgagttaggggacaaagagaagcttcctgcctggcaggggtgcaagccccaggggagggtgacctatgggcagagcaactgaatcagccttttgctcctgtatcttggacctgactagctactgtcccagtaacacatgtcaacaccataacaaacatagtagataccaatgatgacacatcttaaaactatgtgaaccagttggcaagtcctggtggttactgagtgtggaggtaggaggcggttcctattggtgggaaggcccaggcctctaccataatctcagtcacctagactgttggcaataacaaattcatggtctctaattcttaccactactctggaattcctgttttccctgttggctctctcctcccattcaccatagcaactattttgaatcttctctacactcatcccacctcccacctgcctgccttccctctcactctcaggcacctctgcctccccttccttccttgcttccttccttccttcctccctccctccctccttctctctttctctttctttctttcgttctctttctttctttcttttctttctttttctttctttctttctcctttctctctctctttctttccttcctccctccctccctccttccttccttcgaatcttctctatactcatcccaccatcccacccacctgccttccctctcactcttaagcaactctgcttcctatttctttctctctctctttctttcctttctctctttctctatttctttcttttttttttttcagagtcttgctctgttgcccagactgaggtgcagtggtgcaatcatggctcactgcagccttgacctcctgggctcaggtgatcctccctccttagcctcccaagtagctgggactactgtgcctcctatttcacacagaaaaaaaaaatttttttattttcgtttcattatgttgc

SEQ ID NO: 59069 - DNA, 485 bp, Homo sapiens
aaaggcacattcactgagaaattgccccggagaaataaagaggaaaaaaatattgctttgacgtgttgttttagtcgtggcagttatgaagaaggaaaccacacagtgaaccatggctggaacattggttccatggtggtacatggctctgtacacatgacagagaagaaaagccttgtatcatggctgcaaagccccactggtactgacatgctcacagcgtctgtgggaggaaagatggaacaccagccacgtagagaagagagtgaggtgtcgtcatcagttgagtaacttcaaagagtgtccagttttctttgtttgcactttctacctttcatgcaaaatgtgtgcaacacaaacatatgggtaacttgcacgtcccattttgtgtagctgattttgctcacttttggagactctgctcctggggcagtcctggagaaacagccgagagagcaaaccagctgaacactcattattttctt

SEQ ID NO: 59070 - DNA, 980 bp, Homo sapiens
gcctgggcgacagagcaagacactggaaataaataaaactaattaattaattaaagagcaggtcacggctgtgggcatctgggctcagaccccctcaggccctctggagactgcctagacttgtctcagagttgtcccacctgggggaggaacgggtatttaaccagcagtccctcagccttggagcctctattctctgagagtcacattctcattctctctctccctctctctctctctcttcccaccccccttctctctctctctctctcccgccatcttcctttctttcctccctcccttctcccccaacggaggttggcccttgacgccctgtgtgattatggccccgcccacagccatagctgattggaccagggataaagaattaggccaatcagattcattccccttgagttctggaactgggcaggggatctgggcttgcatttgaactgtggaacctaacttggagagcattgctgaaccacgtgccctgggagaaacagaggaagccagtgtttagagagactcgcaatgggcacacagagacaaacagaggcgggcttcagacaaactgaaagagcaacctcagcacaggacagtttggtttctgattctattaataggttctcatgaggttgggcacatttcctgcacttgcagtctgtgagataagtgtttcctcaaaaaaaaaaactcccttttctgctgaagaatgtcacttgattttctgtaaattgtaaacacacccacacactcacaagactaagaaatccaccgttcaatccccaatttttttttttttggtaactttatattccttccatcacgaggtcagaacatttcattgctgctgtgagactctccagagttctcattaaagagttcaagacaatggctgttccgttagcctcgatctctgagtgattacagagagctgagccatctgggagacccatgatggacatatagtgtga

SEQ ID NO: 59071 - DNA, 1176 bp, Homo sapiens
tttaaatatacatttcaatgacttttagtaaatttcccaagttgtgcaaccatcatcacaatccagtttcagaacatttcatcagcccagtaagagccctcacacccattaacagtcactccccactcccacttcctcctggtggttgctcaacccaggtaaccatgaatctattctctgcctctggagatttgtcttttctggacaatctttcttcttaaactcagcagagtgagttctgttgtttagaactagaaaccctgcccaatagaatactaatatcctcttgttttgcaagggagttagagtctcgctctgtcgcccaggctggagtgcagtggtatgatctcgcctcacttcgacctctaccttccggattcaagcgattctcctacctcagcttcctgagtagctgggattacagacgtgcaccaacacacctggctaatttttgtacttttagtagagatggggtctcaccatgttggccaagctggtcttgaactcctgacttcaaatgggccacccgccttggcctcccaaagttctgggattacaggcatgagccactgcacccagccctaatatcctcttattacaaaagaagaaacaatgactcagaaagattaagtcacttacccaaggtcatgtagtcagtaagcaatagagctgagactgaacctcactccaaagtctatgctctcactaaagtattgcagtgtagagagtagaggggacagggtgagactggaggaagggagggcatttaggagactattgggatgtccagatctgagagctgttggcgacctggactggggaggtgatagaggcagaggagagaagtagatgaatttgagcatattaggaagtgaaacagtaggatttggcaactgaacgggtgagtggacaagaaggagaggatgagtcaaagagtgcaccatgcttctggcttgggcaactgatgggtactggaataacttgctgggataggaaatgcaggagaaacagccaatttggggtggaagatgaggtcaggactaaaggcattgagtttgaggtgtctatggaatgtacaaatggagatgttgaatggatggttggatatacgaatctgcagctgagatgtaggtttctatatcaccagcatatagacggcaaccagaaccctggaag

SEQ ID NO: 59072 - DNA, 1245 bp, Homo sapiens
actccagcctgggcaacaagagcgaaacgctgtctcaaaaaaaaaaaacaccctaattccaggccaaccagcagccctaaaaaattaatcttcgtttggcttctaccaaaagtcatggtctacacaaagccctgcctactagaggcaataaggaaccatgaccaccacccccatttattcaaattacccactggaatgcaccgagtggggtttcaccctctgctgcttgtatgtttctcaacccatgttctaatcccatgcagtcatcattcaggaatccctgaggatcccctgattcaacttctcttttttgaatagattagaaattcctatcttctttcacttttactgtgacttttcagcttcctgttttccattcctgagggctatgaatcatatttccaaaataaatgatgatctatggagaggattttgcatttccaacatccttagctaattttaatgaattatcatggtcacatgatcctaaggcttcaggaatcggaggaagtggctgacactgacttaccattttaaccaaacaatcactgcacttaagcttggataagggtcaaataaaactaacagggctcttatgcaagcccttccagtctggtaagttatgagtatttatgttttatttccccccaaaaacaataagaccctcagaggcaaggaactcatcttggtttttgtcccttacacacctatctcagtccagtggtatgatgggcactggaaacaaaccacctggttcaaatcctggcttggtcacttattggccaagtggcctgatatggtttggctgtgtccccacccaaatctcatcttgaattgttagctcccataattcccatgtgttgtgggagggacctggtgggagagaattgaatcatgggggcggtttcccccatattgttctcgtggtagtgaatatgtctcacgagatctgagggttttataaggggtttctcctcttgcttggctctcattcttgttttgcctgccaccatgtaagatgtggctttgctcctccttgcctttgtcatgattgtgaggcctccccagccctccccaggtgacacattggaactgtgagtcaattaaacctttcctatataaattatccagtctttggtatgtctttattagcagtgtgagaacagactaatacatggctttgggcagcttctcatgtctagccatggtagctattcttatgatttggatggtgcccaagcattg

SEQ ID NO: 59073 - DNA, 1896 bp, Homo sapiens
tcagtacccctaagggaggtcgctcgttacccctcacttgaactctgtcccaaatgggaggtcactctctcttcgcggaccccatcttccccgaaagggtctcttgttctctctggccctcctgagaaggtcattactccccaactcgccttttttgttgttttttggtttctggtttattgaggcagggtctcgcttcatctcccagactggagtgcagtggcgcgatcacagctcacacggcagcctctacctcctgggctcaagcgatcctctcacctcagcctccctgggactacaggcgagcgccactacgcccgctttttttttttttttttttttttttttgtatttttgatagagacgaggtctcgctatgttgtccaggctggtctctaactcaagattcctctcacctcggcctccgcaagtgctgggatgacaggtgtgagccaccgcccccggcccctcgcccgccttttgaaggagcctttcgtcctcaagggcgaggccactccccccccgcgagttccatgccccctagagggtcatcgttcccgacggggaggtggcgccctcccccgggccccgggccccgaccgcccgtgctgcctccttccgggccctcctccgcgatgacggcgccgccagcaggccaggcggactgggcggggctccgagcggggactgggacccagaccgactaggggactgggagcgggcggcgcggccatggcgggctgctgcgccgcgctggcggccttcctgttcgagtacgacacgccgcgcatcgtgctcatccgcagccgcaaagtggggctcatgaaccgcgccgtgcaactgctcatcctggcctacgtcatcgggtgagcgtggggccgcgcggggggcgcggcgggtgctgccctcgcgtccgcgccgtgcggcggctcatcctggcctcggtcacctgggcgagtccgggagcggcgagccgaggcggtgacaccttccctgggccccagccgccgcgccggggccccgggggcgggaggctgcttgctgctgttttaaaaccacagcctgggccaggcgcggtggcgcaagcctgtaatccgagcactttgggagcccgaggcgggaccatcgcctgagcccaggagttcgaaaccaatttgggcaacatcgtgggaccccgtctctgcaaaaaattaaaaatcatccgggcctggtggcgcgcgcctggggtcccagctactcaggaggctgaggtgggaggatcgcttgagcccaagaggctgaggctgcagtgagctatgatcacaccacttaactcgagcctgggagacagtccgagacccgtctgtttacaaaataaataaaggcaaagcctggctaggctgttaccctctcctgcctgaccccccatagtgccccttggctgtaggggcttcgccctgaacgtctcaatcttcgctctccacttcccatcctgctgatttgctgacaaaaccaaagcttggaatttccgcttggttccttctgggtgggtggcttttggtcatttcttttgatcactatgcggtgtcactatgtggtagtagcgaggtcagactgtagcgagtgtttaaagtttgcttcctttgttttctgggcttgtggggctttttgtggtacctgccctagcctagtcagtcattccccatgctgcccccttaggctagagatgccctaccgccctcaggcctcgctgaatgtgccattgtacttgaaggcacctgttacttttttaatttttttatttttttgagacggaatttctctcttgtcgcccgggctggagtgcaatggcacgatctcggctcactgcaacctctgcctcccgggttcaagcaattctcctgtctcagtctcctg

SEQ ID NO: 59074 - DNA, 2155 bp, Homo sapiens
tacaatcatgaggtttccatgttgcccaggctggtctcgaactcctgagctctagcaatctgtctgcctcggcctcccaaagtgctgggattacaggcatgagccaccgtgcccagccctttctatttctttttactttttgacatggctactagaaacttttaaattacagggtcttgccctgtggtagctcacgcctgtaatcccaatactttgggaggctgaggcaagtggatcccttgagcttaggaattttgagaccagcctgggcaacgtagtgaaaccccatctctaccaaaaatacgaaaaattagcttggcatagtggcgcacacctgtggacccagctacttgggaggctgaggtgggaggattgctgtagcctgggaggcggaggttgcagtgagccaagattgtgccactgcacttcagcctgggcgacagagcgagagcctgtctcaaaaaaaaaaatatgtggctcgcgttatgtttttatgggacagcgcagctctgtaggattccttatgacgcattcactatctcggtcatgagaatctttaaagcagtaaatgctttgcttttgtccgtcttgctataatcaaaactgactcaggacctgcattaaggctctttttttttttaacctcatctcttaactttttgatgcaactcatcttagtgaaattgtggtctcctcctacagcaaccctccctcaaaaaaagaccgaacacgcaattctcatctatctaactctgttaacaatcatatgaggaggaaataatcacatgataatgagtggcatgaaaccctgtgtctctaaattaagcaactcactgtacttgatgagtacatcagtcttcctgccccaagcttttgtgtgtcagactggaattaaatggaagcttacactgcagctgaattcctagaagccctggacttgtcaggggaaaagcccatggggggaaagcccatctctaggctgggcaatgaacttggagactgctcgatcacacacactcataagtaacaaaaccattaatttcttttcttttttttggtggagggacagagtctcactcttgcccaggctggagtgcagtggcatgatctcagcccactgcaatctccacctcccgggttcaagtgattctcctgcctcagcctcccgagtatgtgggactacaggcacccaccaccacacccagctaattttgtgtatttttagtagagtcggggtttcacaatgttggccaggctggtcttggactcctgacctcaacaaaaccagtgaatttctgaagtctcagcatctaggacttagaagaaggagaagcctagcatttcctgattctataaataacaacactgatagtctctagtagatgtttaacagcagttcgaaggggaggggttctgatttgtagtactggccaatttccacggtgtcagtacttgctctgtgaccaacgatgactcacaaacattgttgtaaacatttgacctacattaattcttttaccctcacaagaatcctgtgaagatctactatcattcccagattatagatgggaaaaactgaggcacaatgaggttaagcaccttggccaaagttatgcctcgtgaatggtggagctgagccatgaaccaagacctctgcctccagtctgtcctaacccctataagctaatgcctgtagatggttttttttttttttttttttttgagacagagccttgccctgtcgcccaggctggagtgcggtggcatcacagctcactgcagcctccgtctcccaggctcaagtgatcctcccacctcagcctcccaaatagccgggatttttattggacagcacagctctgtaggattccttatgacgtattcactgtctcagtcacgagaatctttaaagcagtaaatgctttgcttttgtccatcttgctataatcaaaactgaccatgcccggctaattttttattttttgtagagatccctatgttgcccaggcttgtctcgagctcttgggcacaaatgatcttccccccttgacctcccaaagttctgggattacaggcgtgagccactgtacccagcccctttggatttttaattgttcaaactggtagtcatagtcccacttcagaggagagaacc

SEQ ID NO: 59075 - DNA, 462 bp, Homo sapiens
accttgctcctgtctcagggctgggaagactgttgatgttgtcattccaaagatcccacctggatcaggggaacatcccccacagaagggttagccatacagtgccagattctccaggagaaattcaccaaagaaatggagtccccttggggacagattcaacttgtattgtcagccaggagctgacgtggcacttctgagaagaggccggcgcacctgctggcgggtgctttgtgcacttttcagacaggtcaggatccagcctgtaggcaaatttacttttgctttgacctgtaaaaccggatctgcccagccttcattctctccctggagaacgcctgcggccccaaagccaggcctactgatttccagtgaggccacaaatcccctccctggttagcaattcagttttcaccgccttgggggagagggcctgcccttccttgaggggaagaacctgga

SEQ ID NO: 59076 - DNA, 626 bp, Homo sapiens
atgcccagctaatttttgtgttttttggtggagacagggtttcaccatgttgcccaggctggtctcgaacttctgacttcaagtgatccacctgccttggcctcccaaagtgctgggattacaggcatgagtcaccgcacccggccgggctgagtttttcaggaaggggccaacaattacaggcatagccctgccatgtccacatattgcgtcctgaataaagtccaggctggaccaaaatctctaacaagggatttgggcaggcagcccattcctctgccttgctgggacctcgacctgtgtttgagagagatgagagcgaaagcacagggtctcaaagtgcttggaggagaaatgcacaggatttgggcacagggacatggacatgactaactcatgagagctgtggctttggcctccttgtttacagctgaattcccgggcctagaactttctaggacactgctcgcactcagtaaatactgactagaagttgttgtttatttcttctgtcccaaggccactcagaaggtcagaagctttctttagctggcctagagttgaagtttctttagtctgataacagcagcccaatttatgtctgggaagccatccctccatatgag

SEQ ID NO: 59077 - DNA, 2568 bp, Homo sapiens
gaagagggtggctaactcccccaaagccctccccttgttgcagcccccgcctcctccaaggaacaaaggagcttatggggacataaagccatcctcttctctctcctctgggggcagagctaggggagggggagtggtaaatggcagcacagctctagggcacctgaagtttctatcccctgcgtggagactccaaacaccaggctggggaaggtaaaagtagcctgtagggagatggacgctgcaggtcccatccggaggccaggtatccctctcttgctgatagcactgagacgccctccccaaagctcagccttctcggggagatcggaggggctgagctgcatcctgtccagcactaagtgagagtggccaggagggcaggctggcagagctgtgaaagcacccacttccccagctaggcagtgcaggggctgggggaaagccaggaaaagctcaaggctgggtcgggtggcaccccaggcacagagccccaatgctgagaggggctgggtccagtgtccctgagagtcaggcggacgcctctccgcattcacagcatactgcaaccccgaggtgaatttaggtcagaaggaccaagcctgtgaggctccggctgagagaagaggtgcggtgggggtggtcaaagggcagaccgaagacagccaaaggtcccctaggtccccacaactgctggcctagggtcctgccacctggtgtccaagccaccagggcctgggtttgccccgagacaggcaggctgcggggtgggggtgctccaagtccgctggtcctctcttccccggaacgctccagatttccccacctgtcaaacgcgaggggctgggcctaggccgcctccacgaaccctgacggacccggcccccggtgaccccggttccaaactccaggaccgcccctgccacccggacagggcgcggcccagccgaggaggccatcccgaggcccagggcgcccagaggacgcgggggaagggctgtcggggaccgtgtccctccacgtggcggggcgtggggaggcgcacgtggggtccctccgtgttgggagccccaggccagcctccgggctttgtgtgccatgccggcggcggtcccccgcctcgagagggaaacggagcgggcgcccggggccgcggcggctgcgtcccttgccccgggcccggctaccgccagctcacctgggctccgcgccgccgccgcctcccgcgctctgcgcccccagctcggctcggctcggctcagcttgctctgcgcggccgcgcgctcctctcctccgcccgggcggcgggcgcgcggggggcgggggcgggaggagccgcccggctcggcttgggcgcgtcgccgccccgggcagcgcggggattggccacggcggcgggaaacccgaaagcggaaccgcccgcgcccgccgcgcaccgccccctgcgcgcccccgccggctcggccctgcgccggggaggggtggggaggcgggagcctgcaaagacgaaagtagcgaagaggcgaagggcaaggagcagaaagggaggaggcgaagaacgggggaagagaggcccggccgggaggatcggaggcggctgggaggagagcctggaggggcgcggagcgcaggaggtggcgccgcaactttgtacccgctcgcccgcggcgcgcacctgcccaggttcttcccgcggcgccctcgggcgggccgcgccggcagcgcttgctttgtttagccaaatgccggggctgcagggcgcctccgggctgaccctgggaaagttcccccaagccggcaagaacacccggggcccctcctgtggcgacccggctgctgcccctgcgctaggcgccgggcggtggatgcggcctggactttgggccaccaccgactcgggggagcccccttccgcagctgcctgccgactgaccacttgctcagggccggccctaaaggctgggggaaggcgttcctctcccatccccagcccacctggatgcaccattgaagttcattctggcttttccagatggctacttagatgctttttgtgaaatacagcatattcttcccattctcccctttttggcacttactttgctggagccttaagtgtgcgttggatcccccagctggataacagcactgtgcggggaagaggagaaacgaagacctggagggctccctgaaccgtcctacggggtcgagcgacccaggggatgtctcactgaccctgccaaacagccaaaagggaatcgagttgacaggagagtcaacctccaagttaataaaaggttcaaagccctctagttaactgggtggatttccagcccgttccgatgtgcttctcttgtatttctaggccgtagggacactcacatgcaacgagccaatgagagctccaccccgactcccttttttttttttttttttttcttttctgaaacggagtctcgctctgtcgcccacgctggagtgcagtgacgcgatctcggatcactgcaacctctgcctcccaggttcaagcagttctctgcctcagtctcccgagtagctgggattaca

SEQ ID NO: 59078 - DNA, 1991 bp, Homo sapiens
cctgggcgacaaagcgagaccctgtctcaaaaaaataataataatttaaaacaaattttaagtaaagtgcttagcacacagttaagtattcaatcagtgctcgtccttggctttatgccttttttttttttgaaacggagtcttgcactgtcgcccaagctggagtgcagtggcgcgatctcggctcactgcaacctccgcttcccaggttctagcgattctcctgcctcagcctcccgagtagctgaaattacaggtgcccgccaccacgtccagctaattttttgtgtttttagtagagacggggtttcactacgttggtcaggctggtctcgaactcctgacctcgtgatccacccgccttaccctcccaaagtgcggagattataggcgtgagccactgcgcccggcccggttttatggcatttttactgtttattacggtcctctaggatagggagcctgtatgacttatccctgtgtctccaacgctctattgtatagccccattttaaagaagatacaggatctgagactctaactctcagctaataaatactggagccagacatgaacttgcaaaaaaaaaaaatgcatgtaaagcgcctggcccaccgtaaacgctcagtacgtgttagctaccggtagtagctatctttatttcttcacgttcctccaggcagggagagtatctgatggacacgagtgtccccaagcccagggttccgcacagagcagatgctcagtaaaagtttgctgcacgagcaggagccagcgggcgcctctcacctgcagcaggggcaggagcagctggttgagcctccgccgctccatgaggctgacggcgccctcgcctgtgcggctcatctcgttcagcagcaccagcaccgcgatcttgtacggcgtcacccagtccttgatgccgaacacattggcgtgcacaaccccattggtcatcatgggattgaagtagaggctctcgtggacgctggccatggcggcccgagactaagtctcgggcccgcggcgcgctgccgccagttgtcaccacaaggcacaacactaccgggtctacatctccgcccgccctcacaatatcccaggaaacagacatccgcgtgctcgcggcatttgttaaccaatcagagcagtctgtcagagcacatgggagagcgacagccagtcagaatgtacaagagtgcggggaggggtgcaccaaaagactgactccctacagaaacttttgccgagtgggagcaggttcccaggctacgtggacagggaccggatgggaggggaagtcgatgcttggggtcggggctgaagggactgaggagctcccaaagtggtttttttgttgttggttgttgttgttggtggtggtggtggtggttgtcgttgttgttgtttgagacgatatctcgctatgttaccaagactggagggcagtggttattcgtagacgccctcaaagagcactgcaccctcccaaatcctgggctcgagcgatcctcccgccttcccgagaagctgggactacaggcagcgcgcctggcttgttcatgtaatttgaaaatagttcaaatagaatgtttaaatgattgtgtttaaaagtaccgaaattaaatttgcacccttaaagtatgtatttattatgttacttttaaactcaaatgtttaggagtttaactctgtctttttaaagataggaacatgagatttttcttcagcgtttcacaaatgccatttgcagacagccagatcaggttgccagtggtcgtgtatccttacgtgaaatagaacattagcaacatcacctccatgtgctgagtcagtttcctacctaataaactacaaaatctatactctgcatttcaaagccctccaaaagcaatccccagccaacattttgaacctgatttttcacaattccccttccgttcatctgtacctctcccaagacacttagttctctataccctgaattatta

SEQ ID NO: 59079 - DNA, 537 bp, Homo sapiens
gcccagctgtattttattttatagagacagggtttcactgtgttacccaggttagtcttgaactcctggactcaagtgatcctcttgccttgacctcccaatgtgctggggttgcaggcgtgagcccgttcccagatattttctgaacctttgttcagaaataccaatggtgaataggcagtggacaacatttggggaataggcaggaagtggggaaggtgcggagggggtggagatgaacacccaaactctggggccttgcctctcaaattttagacaccttgaaaatatacctgattccaatctcttacacaaatggtaaacataaataggaagatagcgcatttggcaaacaggtgccaagcaacagtcttgaacagatgattgaacatttcatttgtttctctgttaataattaatccatttggaatgtaaatttccagctaatcttttaactcttctttagccactctagagtaataggaaaagggtagtaagcttctggatttgatttttcctaagtacaaattatcctga

SEQ ID NO: 59080 - DNA, 2022 bp, Homo sapiens
ggggcgggcgcacgaagtcccagctactagggaggctgaggcaggagaatcctttgaacccgggagacggaggttgcagtgagccgagatcacactattgcactccagcctgggcaagagcaagaccttgtcaaaaataaaaaaaaggtgtaggaaaataaactgtcatccagtacagctgaagaaatcgataccttaatttacaacctcagtttctctgtccaaaggcaattccaagactcgagcaaattcttttattatgctacgattttggttattttgaatacagcttttcaaagagcccttgggatttgagagcccttggttttctaagtgttttcaataagtcttgtttttaaaggccgcgtcctagcgagtgcagctgccgctccttaccggacccacgagtgaggagccccgaggtcatcaccgagcatgaacgcgggaacgtctgggaaggaaatctgaggccctgctctgacggtcataacaaaggccttcgagccaaccggcgtgttcaaattcaccacggcccttcccgcgctcccctccccggaaacttgaccacctagcccagaaagccgcagcagcttcctcagggacgctatctcccatttcaaacacccaaccgagaaagcagcgccgcagcgcgccttccgccacgcccaggtccgcaggtcttcgctcggggcggaaaagaatcctccccgcgcactcccagccaggaggaacgccagaggccccgcccaatccctgtcgcttcattggctctggtgaccggcctcccgaaagtcggcttcctattggtcgtcgtggccgccgctctgcgcttttaccggggcacgcggcgagcgtgaccacgccccttacgtccggacgctcggtcgcctcccggggcgcggtaatcaccgcccagagggaaggaggtcggcagtgtgaggagctgctatggtgctgagtttcctggtagagccggccgagctgaggcggtcgcggccatgaaggtgaggggccggtggagccggacagaccctcctcgccaatcctatcctgccagggcacctgaagcgcctcctttctttccgccttagcggttacctagtcgtcatctcggagagctgcgctgaggggggtcgcttgcccggcttcaggtgccccaaccgagccagggcaggctgccggaccctctcgagctcctccagtgccacccccgtcagcgacccgagcggtggggagaagccgggcgtccctagcgttcgcgccgggtgggcccctctctgcgccgggccctgtgcgcctcctcgggggcctgaggcagagccgccagggctcgcctgagcctcggtcccttggcgcgcggcgtgccctttcccgccccgagtccttgaactaacccaagtgttggggacatcgtgggaccgaggagaacaggaggggtgcagggggtggtgaggctagggccaggctaacgggttaaagaactctcagggtggggatgccacccggaaggggtgcttcgtaggctgcacgtcggggccgcgaactagagaaggctggatgtgcctccatcgccactaggtaaacgcagcaaggaatttggcagcttgagttctccaaggtgggagtgagagcgtgggagcattactgatgagaagttgaagaaaaggggaaaggggagcggggtttccggcctacttctgagagatgattctcaacccgatcactgagagttctgaagagctttgtgaacagcagtcagttcagggtattgattcatttgccgaactcaaaccaagtgggatgagtcataaggtgatgataactttcagacctagatggtttcgttaatctcagtgcagaggtgtgctgggggtgggtaatctagcaggtgagctgctagattaacgctgtctccataaagcgtcaaagatttactatagaagattgaaaaagagtgtcagctggtcacagaaattcagcacatgttttgttgaacgttttctgtgcgttagccaagaggga

SEQ ID NO: 59081 - DNA, 478 bp, Homo sapiens
ttagacttttggaaaacttttatgaaccaccataacccgcacagcttcccaatactgagagacttttccaatgagatcagtaatcatattaacaaacgtgatttctaaaataatattatgtgccaatatttggaaaatccgcctaactcagggagccaatattttccagatgaccaatacatggtgttacaacatcatgcctgagcaaatgagctactcaaaggtcaagacaggctaatgattttcaatgtaacagtgtgaacagctcattgatacagtttcagactccacattgcaactaaactttaaaaaaaactgttgagttctagttgagtatcagagtatccacagttatcaaaaaggctattaaaatactcctcccttttccaagtagtatatatctgtgtgaggcaaaattttcctcatactccctccaaaacaacatatcacaatagacaaaacacagaagcagatatga

SEQ ID NO: 59082 - DNA, 1201 bp, Homo sapiens
cggcttcctccgccgccgccgccgctgccgccgtgcggattcgcccgggttccgggtggcccgcgccggcccgcggctcgcaccccttcctgtctccgtctgcccacggcgggcggcgggcgcgcggcgcccagacaaaagctcgggccgtcgggcccacgggccccgggagcgctccagccccgaagccgagggtcctggcacaactttgcgaacgcagaggcaggaggtgccggcgcccgcggggtccgggtgctcccggggcagccggcacgcgcgtgggccgcgggcgagggcgccgggggagggcgcggcgcgccccgcggccgccggcaacttgccccgggccgtggccggcgcccggcaggcccgcccgacggcgaggcccggcggcccacattgtccccgcggtgcccgatggcccccagtgcgctcgctcggccgcacacgccccctgcccgggccggctgcgggcctgccgcgctcctctacgccccgctcgggcccggccccggccgccccgccggcagcggcagcaaaactttctcctcatcgcggcggcggcggcgtcgcggccgccctcggcgcgtcagacaggcggtcgggaggtcgtgcggcgggtccctccctcagccccaccccgggccgccgacctggtccggctccgattcatagtcgtcgtcctcggcgctcacggacatggccatggctcatggtgggcccaggctcgcgcgcgctgacatggctggagcggcgccgccgccgccgcccgcccggagcaggctcggctcgccctggctcgggctcgggctcgggctcgggctcccgctgccgcgaggagggagccgcgccgcgcgcctcgcacgcccgcgctggagggggcggggaggggccggcgggggagggccggggcgccatgcatatgcatgaggcgagccaggaaggggctggccccccgggcgggcgggccaatggcgcggccgcggcgctggggccgcacacaaagggagcccggcctgcggtgacacgggggcgggccgccgagggcggtccctcgcggccggagcgcggggactggggctgcgtgggggcgtgccccgcgccccgcccggcccggcctggcccgcgcgccgcgggatgcacatgggtggctgcacgccgccaccgctgcaacaggaaatgcgcgcccggcctggggtgg

SEQ ID NO: 59083 - DNA, 805 bp, Homo sapiens
agtctcccttctttgttgctgaacccaatggaaaccagctgggtgaaaacaaatgctgatgaaggaattcaaatttttatttatttatttatttttttttccaagagaggactgcgggaaacaaaaatttgcaaagaattgacttacaaacaggttgtcgccttccacccttcgccttcaaaaggtttcagccacatgcctggggacattaaacatacggttgctcaacattatttgttgacagactcggagcctcaccaaattgagttaaccaacgtcagtccaaaacaaaaggcaaggcagtcacaaggcatgcaatgctcccagcctgcaggtcatccgtctaccagaggacctcagggcccactcagcggcacctggcctcagcccttcctcggaggtccaagtcatcttcaagctgagtgacctcaggagatgacaacaaaaggtttctcgagtgtatctagaactcccaggtctcaaggacttgaaaaagtcaaaatgtgagagtgggtggaagtgtcctacaatttgtttttctcctggaaaaaaaaaaaaaaaaatcaatggaaaaaaaaaaaagtccaatggtagggggaaggggagagggaaggtaaattatttgcaatttccaaatagattcagtggctgtaagggaatggggcatgtcggcattaccttttctgggaaggctgctttcactagagccactgggagggggggaaagataaataaaagataaatataagagagatggcaatttaatgatcatttggaccatacctattccctatcaacctaactg

SEQ ID NO: 59084 - DNA, 967 bp, Homo sapiens
tccccagtgccttttgtctgccttggctcctaaggcataaacaattgggcctcgtagccaagtccctctctcaagaccagaaatcaaggcagattaaacaacctgccgctgctcccagcccagtctgcccccaagcccccgctgccagcctgcttcggtgaaaccagatggggtgcccactcaggggaagggacagtaggccccggtgggggaggggacctgccattctcaacgaggacgtgatattccacgtaagctcagtgtgatgctcaggggtccggccagcaccctgccagtcgtcatgggtgggggaagggacctgggctcctaagggaaccatggggcccaaatccgctgagtttacaattgaattcccagggggacggggtggttgtccagcaagtagccacagcctttagaaatcccagcctgactccggctttcaggaattgcctggaaagtcgtgggcctgacttccactagatttctccatctctattccacacgtctgctcgtgcacaaactggcctgtactccaggacaggccaaagaacagttggccggagccccagacagcattgacccagactgtgaggtgaccgcttgtatccaaacagtgcctttctcctgaatggcatggggcggctcctccagaccagggtgggggctggccttccccaggtgggatggggatggtgggccacagagaggtgaggggaaaaagtccacaaaacgatggtctcccatggagccccagcccagacccaggtctctccagatctaggcgtcacgtgtcaatctgcagaggtacacatgcctcacaacatctgaccactgaactcaactccaggtggtctccaggaaacccccagacatgggcccacaatgccgggactgttcaatgttcagatacaaaggcagcagctaatactttgctcatgtatgtgattttgtgcaaaccaaggcc

SEQ ID NO: 59085 - DNA, 858 bp, Homo sapiens
agctgaaggaggagggggcacagagaaggcttccaagtccaggcctggcacatgacggtgccagggacccctccctgccacttgccccttcccactagagccccaggtggcacggatgggcagcctccccaccgctcacgcccatgcaccttggcacctccggagcccgcaacacatgcttaccccactgacctcttttccccgctgcactttgcctttccatggtttggggaagagggaaggaatggggcggggacggacagggaggagccagcagcgcgccggcacgagtggagataatgcggggagtggggctgagctggttagaaggcggagggctcctggtgccccctccctctggctgccttttgcacctcgctttcaggtggaccgggggctcagcagtatgcaggcggcgtgcccgcgtccctcctccccataggctggaaggagccttaaccatgtgtctgcaggaggctgacaaatcagaaggccttccagtacatcagagccccgctgcctagcaaccccatcggaggggtgtagttgacagcacaggacgcaggctgtcacgaagacaggcgcgggctgcggagctggcaatggggtggtcaaagtcccgactctgggctccacaccgtcctcacctgtaggccggctgggcccagcggggtccccgcctgaaggcctgggtgatcctcttctctctaaggaaagggggggtcctgaagccctcacccaccccacccccacggaccacactggcctcttctctctaagcaccacttcaaaatattagtcttcatttccctaaaaccatctcttcgtcttggtttttttttttttttctttttttaa

SEQ ID NO: 59086 - DNA, 2195 bp, Homo sapiens
aggagaggacaggagctcgcctcttgggctgcgggccccagggctgcctggctaaccaggtcacccccatcctgccatcctccagctccccgcaaccccgacctccccagcacgtgcagaaaagaatcgctgcaagctggctgcagtgtgcagggaaagttctccaagttgagtctgtgtctgatctgccctctgggtcaccctccagcatccagaggcccctcggggggctggggccgcctcttccagacctgcctctcccggagaggcccctcctcccggtgtccctcatttcctggccgccaagcctggccgcccctcccaccccgcgatcgcaggcattaggggagccagggtggctgggacagcgcggctttgtccggcccctgcagcgacaggccacccccgctcccgccccgcgctggctccggggctcccccctggctggtttgctcgctcgctctggcgtgacgcctttgcactgacctctgcagcttcctcttcccaagcacaccgcagtcacatgggcaccccggctcggtgccacggccgctaagctctccccacggccagccggctagcccggcttccgcctgggcctcggccgcccccggccgcccccagctcaggtggcttctgtgcagcaaggcaccctccaagttggcggcagatcatcgggagcccccgaaccgagcccttgggggttcccgcctgccacggccgggccagccggggaggagggcggcaggagggttgctgcacctgcagcaccaactttggggcgctgcctgggggctgcggaggcggggcggccccgccccacctttttccctccaacttggcgtaactcccccggtggctcgggaggcgtccccgtggggaaagggccgggaggggcgccggaacgctgacacccgaggggcgcgggaggtgccaagagcgcgccgcacactcgcacccgaccccgggagacacaaagagcggctccgcgacgccggccctgtagcccgcgggcgggaggccacccacacccgccccgcgcagcgccacaaaggagggggcgcccgggcagcgcggcccgcggttaccctcggcggcggcggcggcggctcccgtgcgtccccttcggctcccgggcgtccccttcggctgcggaggctcgacgcgcgcccggccccactcccggcggcaacgcgagccgagccccctccacggcgctgccaggccccggccgaggacgcggggcccccgctcgctgccttccttccgcggggagccgggcgctgcctgcgctcatgcccgcgctgaaactgaacacccgcggcgcggggccgccagggaggcggagggaggccgcggggcgaccgggaagcaacgcgggccggcgccaggagacgcccctcgcccggccggtgggggtgcagggctggctctccccacccccctgagccccgtgttccatagcaggtgacggccagcaaagccaccttcctaagatgtgcccctccagatacagccatagaaaggacccgagctaggggccgcggggagagtgggatccggagtatggtagcgctgagaagggggaagccgctctgaccccaaggcccacgcgctgtgtgaccttaaacaactcacttcccctctctgaacagcatcctcactgctcggcactgaagttcaattctgcattctaagatgttcttttaccaccccttcccctgcctggtggcttagtgactgtgtaccctacatcatagcatggttgagagactcctttgagataaatacatattcaccgcatcatccaaactgtggtacctggattacttaatccaaacttcacaacaaccctaaaaagtcattcccaggattcttcctgttttcagataagcacagggaggcttgtgactcaagcctcgagttcgggtccagcctccagttcgggtcaccagcctatcagaggcagtgctcacccaggcagcctgtctcccagtccctcagctttgcccccattggtctacctgacacacctcaactccaggaggagtccagaggttacagccaaacctcaccactaacctccagctgcaggtggtgatcccgctcaaatcagaagtcccacactcaaggtcaccagagtccccgccctcctcccaccctgtcccacacccttctcccaaaccacaaggggg

SEQ ID NO: 59087 - DNA, 570 bp, Homo sapiens
atacgttttgaggggttttccatttttgttaacggagggggaaaaatcaaaagaagaatactattttgtgatatgaaaactatatgaaacccaaattctcaggtccatttacaaagctttcctggggcacagccacggtcatcggttcacatattgtatagggctggctccgtgcgacaatggcagagctaagtagttgcaacagaccaaatggcctgaaaacccgtaagtatttactctctggcacttaacagagaaagtttgctggcccttgaactagacagaactctcatggaacttagatgttgatatgggtaatagtctcatcccgttcactgaacctgccctctaacaggcccgtggtcaatatttgttgaataaataaacatagcctttcatgtggtcggaactgaaaaataaaagtaactctgtgtaatcccagcacttagaaaagcagaggtgggaggatggtgcttgagcctgggagtttgagaccagcctggggaacacagcaagattccattctttttttttttttttttttgagacagggtctcgctctgtcaccca

SEQ ID NO: 59088 - DNA, 1768 bp, Homo sapiens
caacccaagcaactttgcgcaattgccaaagatgctgaaaagcaggacaaggagaggggcccgcaccccgagggtccagctgcgctctacgcggggtactcccctccggtgtcttcggaagcactgaagggacatctggggaccctcccctgccccccgcccccgaaatgtgctgggcttcgcccactcggccgggagcctggttatgtaacccgcgaagggggctccggacacgggctggcggggcaaatgtaggccccaggaggagccgctgcggcgcccggctcggcggtaacagcagccccagcggccgcggcggcagagccgggaagccggaaccgggggccggcggcatttctaaagctggagccgcccccgagctaccggggaagctggaaagctgaaatggaagggctgagaccccagccgcccccgccgcccgcccgccagtgcaagaagaggaggtggggggaggagaatcggggcttggaagggggagaggcagacggcccgccacaaagctcggatcggagaccccaaaacgcaccagcagctgcctcatctccccacaagcgcgcgcgcacactcacttcctaaggagactcccccaccactccccgcatccccctgcctcctccctccaccgcccagcgcccggcccctcagccccccagattccgggcgaaccccgagcccgctcagcccccctccacgcctttccccgataccacctccccacttaagtgtctgagactctaagcctcacaaggggctggaggagtaagcagcttgcttccttttgcatgcaatttattatatttttttcccggtcctcttgcaaaatacagaaaaggaaagaaaaggcagcgagaaacaaccaaaaaaaaaaaaaaaaagatctatcatatgccagatacagatttggaaaaaaaaaaaaaaaaaaaaagctacacaccaatcttcttccagagtctttctctgcctccatttttttaggagagttcaccaattaattgtcaacactcctgccccctgcattttggccgaggggggaaggagggaagaccaaagaaaacaaaccaaaaaataaataaataaagcaagccagagccgagatctacaaagttttgcaccaacacttaggcagatccgtttgcaaagtcctaggaaaccattttcagcagttgtggggggggggaggcgtcgacgtcataatccccggaacgtaaacattgttgccgatcgcgctcggagcccgcggccgggctatttgggggggctctcggcccgggcttgggggggtgggggcggcggcccgaggaggtatggggcggggagggagcccgggaggcaccgggcgccgttagcgccgtggcatcgctgttttgttgttgggtcacgagtgcgcctctgcacgcaggcgccgccgccgcccgggagttgtgtgcagagctgacttttggagggccgagttgcaggcggcgggcgcatcccggagatggcggggcagggagggagggaaggaggagggggcggggagggaggtgcagatttgcacggctggcctcagcgggaggcgcggaaatgcaagccgagcatgctggcgtgaaagcccccggggcctggcacccccaaaaacgaccccccacctccgttcctgccctcattgcccagggctacccctcttcctcttctttcatccacccctcccccaacattacctgtgtggccgactcaaattcaaagcattttgtatatataactgttt

SEQ ID NO: 59089 - DNA, 2023 bp, Homo sapiens
aaaaataataaatcaggaaccggtcacctcaatacgtatcagatgctggtgaacacaggtggacaaagtggttaacagacaggttttgtccatctcgttcaccaccctacccagcctcagcacctagaccagtgttggcacccagtgggcgccaaataaacactgcttgaactccagacgtcagccgctctttttcctacagaccttgagccaccttgttccaaaggggatatgggcctcaggaggcgcccagaggtgacctcaggcggcccgacccaggagtccaagctccaggagcagggccacgggagcagctgcggagaggggcggcgccaggagccggagcgggcagccgggcgcttccaggaaaagtggcgggcggcggcgcgccagggaccgtgggcggtgccgtcggagcgggcgggtcacgtgacgcccacaacaacgcccacttcttggtgggcggggcacaggtgggcggggagcatgcaaaacagcccagggcggcggccaatcgcggcgcgcgccgggggtccaggccccggggatccgaggcgccgcccgcgcgcagtctctggtcactgccgcccgggggcttttgccagcggcgccgcgggcctgcgtgctggggcagcgggcacttcttcgacctcgtcctcctcgtcctgtgcggccggccgggtgaggccgggcccgcgtagggggcagtcggcggctgcctccggcggaggtgcctcgcggcgcccgggccggcccgcgcctcggcggcgtgctccatgcatccggagcccgccccgcccccgagccgcagcagtcccgagcttcccccaagcggcggcagcaccaccagcggcagccgccggagccgccgccgcagcggggacggggagcccccgggggccccgccaccgccaccgccgccgtccgccgtcacctacccggactggatcggccagagttactccgaggtgatgagcctcaacgagcactccatgcaggcgctgtcctggcgcaagctctacttgagccgcgccaagcttaaagcctccagccggacctcggctctgctctccggcttcgccatggtgagctccggccgccctgccctgccccctctactgtcccggctgctcccgcccgcagccccgacggggctctctgggcgggccgggcgggccagagtgaggggaagagctgggagaaaccgtggtgagcgctgcgcggggggcagaggtgctggacgtgagcactggtgggcgccgagtactccgatctggggtggtgacaagccatatcagagtccgggctcggggtgcttgggtgcctccacatggccatgcctgccccagcaagagtggtagatgcatcccgaagttagctctgtaagaagcccgccccatgtgcgttcaggagcgaaaggagggactcagaagctctaacccagctgggggcgtcaggaggtggggacaaggagaaagaccttgcgctgtcttgtgccccggcacccgaggccggaagttgttagccgtgttcttttatcagctcctagaggggatttcctgacaccccttttccaccgcattttccgagagcctcagcctgggggtttgacaaccagtccccctcagttttttctccagaaacttgccactgagtcactgcgtgtgagggaggagggagggacatgttcccgttgaatgggctctttattttttatttgttccaagacggagtctcgctctgtcgcccaggctggagtgcagtggtgcaatctcggctcactgaaatttccacctcctgagttcaagcgattctcatgcctcagcctcccgagtagctgggattacaggctcgcgccaccacgcccggctaatttttgtgttcttagtagagacggggtttcaccctgttggccaggctgatctttaactctcgacctcgtgatctgccaaatctcggcctcccaaagtgctgggattacaggcgtgagctaccacacccggcccaatgggctctttcttga

SEQ ID NO: 59090 - DNA, 956 bp, Homo sapiens
ggaggaataaatttatgcaaaaatatacatatgaacgtaattattacatattattacaggagaaaaattgtaaaatgcacacagcaatgtaagtttggtttacacatagtaggtgctcaataaatgcttaatataaaaaagcaattcggttgtatctacagctaacaatatactatatggtacactttaaaaatactctcatgtcaagtatttttaccacaataaaataaaataaaattattttaaaaaccccaaaccaaaaaatccataattcggaggaattctggccctttaaaagccagaggctggttaagagagaaaggcgggtcctggagctggtgtaataagctctttgccttatttaaatgagcatgcgtgaaggtcgccccggtgcctgagtcacgttcctgtactcaatgcgcctgcgcttcctgaagccagactgggccctcggctccgcccgcctatttaagtgggcggagacagtcgcgtgagttcagtggacccacaatctcccgcgcaattaaccagacccgcccctttacacatgcgcatacgtcagcagttgacagttgctgaaggacccctggagttgggcctgcgctctggacgctcctgccggaagtgggcgggatcgcgttgcaacgcggcaagggcgatgagagcgcggaggaggcgctggtggccgagtttggggcggggactgtccccaatgctccgcagcaaggttactcgaccaaaaaatgtcacgactgggaatatgaacacagagaatttacccttcaatttaaaaaagatttgagccgggcgcggtggctcacacctgtaatcccagcactttgggaggccgaggcgggtggatcacctgaggtcaggagttcgagaccagtctggccaacatggtgaaaccccgtctctgccgaaacaaaatacaaaaattagctgggcatggtggc

SEQ ID NO: 59091 - DNA, 585 bp, Homo sapiens
tggaacaatgtctgacacatagtagatactcaatcttttttttttttttttcaaagacagggtcttgctatgttgcccaggcaactcaacatttactcaacaattaagtatccactatgtggttgtttccctccacgggaatgtaacctccacaagatctcagggaacttgtctgtgtctcaggctttgttggaacccgagggcttgacacatagtagaccctcagtaaatatttgttaaaggaatgaactttaacacttagtaacacttagtatcacttaacacttagtatcactttctaacacttggaatgtgaccctatttggaaatagggcctttccagatgtaaagttgagatgtgatcacactaggaaagggtgtcttttttttatttttatttttttgagagaggctcttgtcctgtcacccaggctagtgtgcagtggtgtgatgacagctcactactggaggctgcgaaggccccgagccctgggagcccatgctatttattggtaatccaacagagaaacaggtggtgagaatgtggaggtcaagagggcacgttgcattaagcccatgatttac

SEQ ID NO: 59092 - DNA, 2089 bp, Homo sapiens
agaatacatttctattgtttaaactacccaggttgtggttatggcagctttagcaacgaacacagggggccgggcacggtggctcatgcctgtaatcctagcactttgggaggccaagtcgggcggattacttaaggtcaggagttcgagagcagcctggccaacactgcaaaaccccgcctctactaaaaatacaaaaattagctggatgtggtataacctggctactccagaggctgaggtatgagacgcacttgattccgggaggcggaagttgcagtgagctgagatcacaccactgcactccagcctaggcgacagaaaaaaaaaaaaacacccataaaaatagaagaaaaaagaaagataaaaaagtaaagtaacacaggtgtcatttgaaactgaggcctgaatgatgaaaaaaaggcacatcgtatgaagatttagagggaagaaagttccatgcaaggtcaggaagagaaaaagcaatggctggagggtacgagtccagggcggtgagatagaagggactggaaagctaggcaggggcagttcttgcaggacttggcagaggaggggacagaactggatttaatcagcttggaggcggttgtcccttgagcgacagaaacagctgttaagaacgtcacccagagcgttagagggcaggaatctaggatgtattagctgcagcacataataatgacaacgtgaaatgaccgtgccctctctgcgctgcgccgcccggcccccgacctttttggatggtcgatgtcagcgccagccttccggggcgctggcctgggctcaagtcaggcaatgaccaggggccggtgagctttcatttcacctcccccaaatctcctttccccaaactctagacacccccaaaacacacaatctaagtcaaataatctctgcaaatgcaacctgcagacaagtcccccaactcttcctggaagagacagattctggaggcgcagaggcactgccaagggggccgcaacagaccccgaaagaccttgcgagcctgccatgtcccggtccggaacgccgcacgcggggcggggcggggcacatgcgcacgcgcggccccgcctcccaggcgtggggcggggcgggcgccggggcggggccgtgacgtcagttgcgcgcgtggctctggctgcgcaggaacagctggtgcctccgagggcggtcggcgagcgcgcgggcgtggggcgctggggggccggtcgggcagcgctgcgggagcagccgccggcaccgccgccttgcaccatcgcatcatgtccgggcagctggagcgttgcgagcgcgaatggcacgagctggagggagaatttcaagaactgcaggtagggccaggccacctggtcccgcaactctgctgcccgcggtgcagcgccttgcccttcctgagccccccggcccgggcggtggggacagtcagggcctagggagtgccccggagaggccctgggggcggacgggaggcatggaccagccccctcccatcacccggcgcttcagctcttcgtccacgtggggcgccgggtcgcagccccctcttccgccgccctcccactggctctctgctccacgcacccccttcgctgcagaaagttggtctgtggcctctgaggcaagttccaggcgtgttcatctgtgggggtggttcaaagagaacagcccagcccccacctctgcagggtctccccagatctcaccccgccccctcccatctgcttttggtagctcagctcccaccccgtgctctggcggggcagcactatcctgcagctctgttttgggaggtgtacttaagagctgttcaccttgaacctctaggttgtgcttggggattagggacccctatttcctgtctttgggggctctgacgctgctgcaggctgattttggcgtggagagcatctgtcagttcggacagctgagtagcctcacccagtgataggggaaactcccagctctatccttctggcccggagccttacacggggtggagtgagggcgggtgtaaggcgggggtcccctgagagaatggcattgctgctgggtgtggggagcggtc

SEQ ID NO: 59093 - DNA, 689 bp, Homo sapiens
tttgagaccaactggctgttactatgggcaggttccctctgggagcctcagtctccccatctgtaaaacaagggtgacggcagtccctgcctcacagggctgtgacaattcagggagctggcaccgtgtgtggaagctccaccctggctggcacgtggaggcgctgctgggggtgctccccagctgctggtaccgtccaagtgcagcacagccatgccgtgaggctgtgggctgctgctgccctgcctgggctgctgttcctttctctggccctgggttctctgtccccaggggaagcggtcaagtacggtttgggcatttggcctatgtgccaagcgtttattgcctggcaggcacttggctgggcatccggctgctggtctggccacttgaatgcccaaacaaaggctctttcaggccctgggcccgtgctcgcctgctgcccagagcctggcctgtttccacgagggcaaaggctgcacacatctgtactactcctcatgtgcctccctcaaagagggtaaaagttgtcaatgtgcagccacagtcccttgcacagggacctccagggccctccgaaggcaaacccttgctgtcctgaggcccaaggttccccgagggcctgggcgtctctttttctcctacctgcttctgtgttcatctcctagggccactgtaactaagtacca

SEQ ID NO: 59094 - DNA, 1903 bp, Homo sapiens
ccaccaccacacccagctaattttgtatttttagtagagatggggtttctccatgttggtcaggctggtctcgaactcccgacctctggtgatccactcacctcgaccttccaaagtgctgggattacagggatgaaatttttgtattttttaagtagagatggggtttttgccatcttggccaggctggtcttgaactcctgacctcaggtcatccacctgcctcggcctcccagagtgctgggattataggcatgagccaccgtgcctggcccctattgccctttgcataaaatccaaacatctcccctggttcacatgacttcatcgcctgccacacccgcttgctcactgcagtcccgccaaggcaccatctcactgtttctcaaacccaccaagctctcatgtcccagcctttgtgcttgctgttccacatgccaggaaggtccttccctcatttctcttttcaccgttttctctctagcattttattcttaaacatccagattaaccatctatattttttcccttttgaggataactgcctgccctctgcgactgcctttataataatacatcctatactctatgcagttttcagggtgctttagtctagaaatggttaagaaatccttggtgaagcgtggtggctcatgcttgtaatcccagcactttgggaggccgaggcagggggatcacgaggtcaggattttgagaccagtctaaccaagatggtgagaccccgtctctactaaaaatacaaaaattagctgggtgtggtggcaggtgcctgtagtcccagctactccagaggctgaggcaggagaattgcttgaacctgggaggcagaggttgcagtgagccgagatcgtgccattgcactctagcctgggtgacagagcaagacgtcgtctcaaaaaaaaaaaaaaagaaaaaaaaatccttacatgacagccagatatggtagggaaatgatgaatactcccacaacataggaagaacctgagagtcacagaaatgaagtgatttgcttgaggtcaatgactcagtgactgggccaggagtcaaccccagctcatgaaattccaagtgggatgttccttctgctgatacacactaacgtgctattttgttttgtattgtgcaaaaataggttctggtcctttaagatgtaacaatggggttcacagttctggcataacttattcccttttacaaatatggccggagtgaacaggtacattagtccccctaacccacaagggtggattccaagacccccagtggatgtttgaaaccacagtctagaactctagatacgctgtttttttctatatgtacacacctataagacagcttagtttatgaattaggcacagtaagagattaacaacaagaataaaataaaacagggccaggcaccgtggctcacacctgtaatcccagcactttgggaagccaaggcgggaggatcacttgaactcaggagttcaagaccagcctggcttgttaccgagccagctactgactgactcacaggcaggtggtgtctccagcagggatacacagaggaaggggcgaatcatatcccgggtgggatgcagcaggacagcgcacgatctcatcacgctgctcagagcagtgcatgatctaaaatttatgaattatttctcgaattttccaggtaatattttcagacctcaggtaactgaaactacagaaagtgaaaccgtggataaggttataaaatggggcccccttggacgtcttctctcatttctttttttctttactttttttttttttttttttttggagacagggtcttgctctgttgcccaggctggagtgcagtggcacgatctcagctcactgtaagctacgcctcctgggttcaagtggt

SEQ ID NO: 59095 - DNA, 1985 bp, Homo sapiens
aagtgctgggattacaggtgtgagccacgtgcccagccttttcttttctttgtttgttttgagacagaatctcactctatcgcccaggctggaatgcagtggcgtgatctcggctcactgcaaactccgccttctgggttcacgccattcttctgcttcaagcctccagagtagctgggactacaggcgcccaccaccacgcccggctaattttttttttatttttttaagtagagacggggtttcaccgtgtaagccaggatggtctcgatctcctgaccttgtgatccacccgcctcggcctcccaaagtgctgggattacaggtgtgagccacagcacctggccttttttctgtatttttagtagagacggcgtttcaccatgttggccaggctagtctcaaactcctgacctgagatgatccacctgcctcggcctcccaaagtgctgggattacaggcgtgagccaccatgtcagccaaggttgttccactctcgtcacacacagcagagacaagggttgagacttgcccactgggtttggcaactatggcatgcagtgacatcaggacaggaggtggcggggcaggcatcaggctgcagtgggtgagggaagaagtcagccccggggcgctggaggcagtcacaccctgcctgcctttcctggggcctctgcccttgctgttcactcctccagaaggctctttcaacagggagcagtgtggctccttccctcctctccttcagggctctatggaatgtcgcctcctcccagagacctttcctgactgctctgaaacagcttccttggcagtctgccccatgacagtggctttactcatggctctcacccctacctgatttcacaatacttctctggggccgggcggggtgattcacacctgtaatcccagcacttttggaggctgaggcaggtggatcacttgaggtcaggagttcgagaccaatctggccaacatggtgaaaccctgtctctactaaaaatacaaaaaactggccgggtatggggccaggcacgtgtagtcccagctacttgggaggctgaggctggagaattgcttgaacccaggaggctgaggttgcagtgagctgagatcgtgccatttcactacagcctgaggaacacagcgagactctgtctcaaaacaaaaacaaaaatcaaaaacaaaaaaaacagtaattctctgggttttttggtttgcctctcctgcgggcaggaaccacctctgtgctgttcactgttgggtccctgggaacacaggcgagctcaatacctgtttggtgaaggaaggctcaaaggaaggagtggttgaagagggttaatcgtcatctctctggctttaggtgccctgcagccttggcaagggcattccacttcctgacctgtgttcattcaagcagccaccctgggaggtgcgctgggtggggacagttcttcctgttaagaacgcaagtggtggagggggcctttgtcaaggtcagagacaagcaccctgtgagccagaggccaaccagtccccaaggtcagctgcctgccaggccattctaaaagcaccagttcttccaggaagctgtccccagccttcccaaccgggaattaacctctgggcctcagttttctcatctgtgaaatggagatgtgaaaagtgagcgagccttgatgacagtcataataaagatggttaatatcgactctctttctctcatataaaagtcatggtctagaccgggcgctgtggcgcatgcttgtaatcccagcactttgggaggctgaggcgggcggatcgcttgaggtcaagagttcaagaccagcctgggcaacatggtgaaacgctgtctctactaaaaatacaaaaattagccggatgtggtggcatatgcctgtaatcccagctacttgggaggctgaggcaggggaatcacttgagctggggaggtggagcagagattgaaccactacac

SEQ ID NO: 59096 - DNA, 16446 bp, Homo sapiens
ccttgtctcagcccaggcctccggtgcttctggggctcacaacacacatctgtccctggttccttgtcttagcaaatcctactccattgcctaacaattttctttctgttcccatctcaggctgaaaaggggaccaccgctccccgggcaacccctatcccatcctgtgcccctctaaccctggaccccacaccttggccctgatgagctcactctcccgtctgtgtcttcacagcccacctcaccccgcctcccccggcccaggaaacttcagacttcaccgcagcttcctgcctcagaggatgtcagggccccggtgaggccgacagagcagtgagtgccatggcccccgccccttcccttctgagccctgcgagccccgtcacccgatctgccctccctccgctgtggtgtctgtaactacttcctcaggagggagacagccacacgggccttccacgagggcccctgtgggcagcgtccggcccctgcccaggaccagcgtttggtcctgggtgtggagaaattcagcctctgagagccacccctgtctcacagctctggtggccaccagtcgggaagatgccccttccgccactgtgtgtggcccattgggttctagaactttctacaactacgtttactagactcatttctggcttggccattccctcaccctcttggcctttgcctctctctacgtggccgcctggccatggctttctgtcctgttctcctgagagccgtccacctgcaggccgagatgaatcatctccggcattcggatccactacccattcattccatcaccttccaggccttgctccatgacaagcactgggacctgggctctccctggtggcactcactgaccaggggatttcctcctatgagcaagccttccctggtcacggggggataccctacagggagcagccagatctcttctccctgggtgcccctccttggggtctgtcagactgtgaggctagccacctcccctgagccctgcttctctgctgcttggaagagacttgccagggaagatagatctccccgctgcagcagggtctgggggtcagcttggggcatggcaccgtagattccaaagcacaggcttgagctagggctgggcagggatggtaggaggatctttttaattttttttaatttttattttttgaaacagggtctcgctctgttgcccaggctggagtgcagtagcgtgatcttgactcactgcaatttccgcctcctgggttcaagcaattctcctgcctcagccttccgagtagctgggactataggtatgtgccaacacgcctggctaatttttatacttttagtagagacggggtttcatcatgttgcccaggctggtcttgaactcctggcttcaagcaatcctcctgcctcagcctcccaaagtgctgggagatgtagtctcgccctgtcacccaggctggactgcaatggcacaatctcggctcactgcaacctctgcctcccgggttcaaacgattctcctgcctcagcctcccgagtagctgggattacaggtgcccaccaccacacccagctaatttttggatttttagtagagatggggtttcaccatgttgggcaggctggtggacatcatatattaatctgatttaatcctcatgaccctcttagtgctcatgacagatcaggaaactgaggcccagacatccccaatgatacgtagccaatagagctggggtcaaagcccagatctgactccaaagaggatggcaggaacaggatgggaccatggatgggatccccatggtgccagtggtcgcctgcttctggtgactgtagcaggggatgctcctccatccctctggtagcagctcttagcacaaattcttcctacagcaacttgcagctttccagaatctccacaactcaatctactctgacatgttccttgagcatctctctctgggcaaggccagaaaggccatccctgttcttatgatgtggaggctgccctgaacagtgaaccccgggacctgataggggaggccctgatggcagaggaggaggaaagaaaaaacctcctgacctcttgcagggcagtgggttgctgtgaatgtctccacccagcagcacttgactcaaaaagtgggtcaatgaccttgcccctccctggctactgcacaggaaacatgagagtaaaggtgtcccagaccatgacttttactacccccgggccacgccccgggaattcctctgatgcctcagctctcccagctcaccaggggctagagacaggcgctgttttggggttggccctacagggcccacatcccacaaagacaggttcctcagaggccacgataggacctgctgaagtcggaatggaggggggctctgagctaggacagccccttttcgggtcctctccaaggtctaggtgggggtggaggtgtctggattttggctccatcctaggtcagtgtctgacctcacctcacacacacaaggcttggctggccggagagggccaccggatgacgtggttccctgcaggtcactaaacactgagtcacagaggtggggtgaggccccacctggggatctcaacctttggtccccaatgttgatgaagcccagatgggagtcagggtcctcccactgactgtttctcctgtccccacccctcacaacaccgactcccaagcaattgcacataaatccgtaaaccacccgtgggggcctgcaggtggcaggcagagcctggtgtggggcccctgcccccagtgctctgttccttcctcagttcattttctacactgtctggttttgtcccagggaactaggaaagcacagaagtaattgtagccacgcaattccagaaccaccaactgcaagccgtggaatcctgggagctgcagacacagaactcgcatccacaggaccccagagcctcaggctgcagagcgcaggccacagagccctggagccacaggctgatctgcagccgggagcatcccagaaccacaggacccagacacacagcccaggcaatccgagcaccaagggactcaaatctgcagctcacagagtctgcagagaccacagcaggtagcgcagcaatcctggaaccatgggaggcccaagagcagcccactgctttctagaaccacaggagaggaacgagctgtgggctctcagcacagagctgggagggtggccccagagttcacctcctcctccaaacaccttccacttacgtatagggcttggcctctagggccccgcagccagcgcccctgagcggcctccaggagtgaagagccggccaaggccctgccaaggctgcagggcggggacacccagtgggggacgcccgggaggggaaacccttcgggcgggcggaccctcgggccccccggcgcgcaggcgcactcaccggccgtgtcgtagaggttcagggtcacctccttgctgccaacggtcacgctggccgtgtacttctcgaacaccgatggggcgtagtgctgcgggagagggggtcgggttggtccttagtggggccggcgggggccaaagttccagctgaatccactgtccacccccctcactcgtcccggatcagccccccctcaccccgctgggctctggaattcccgagggggcgccccggggtggcggccgcctgtccgtgctcgggacgctggggactgagggtcggggctctgggctcagggtaaggggcgtccctcgcccccaccccagccccgctgcgggcctcacctcggggaaggagccctggctgtacaccatgagcagcgaggtcttgccgcagccgccgtcgcccacgatcacgatcttcagctccttcctgcccggaccgggggcggcggtctgggccagggccccgggggcatccattgcccggagcccgcagcactggcggcggcgcgccgggcactagcggagccaagaggtcgggggcggggcggggccggaaccagccccgcccactcggagcagcgccgcctccgccaggcagcctcccggccgacctcccagcctcagtttcctttctgctaaggtctcagccctgggtgtgggtattcagctctcagtcccagggatactgcagcaccggaaaaacggggctcagctgcgagcaaagctcccacccccaacccaccgccaccctccgcgcgtcacgtcgcgcccctcgccggcgagacccgatcgtggctgcccagcgactccaggtgcccctgattagcaggctccgccttcggcagggaccctctgattggctggcgcggccagacagggtctcccggattggctggctgtgcctccgcaccgggttcgagaagcccccggcctccagctccgggaagagcccctcaactttgcactgccccagcggtgtggcttggcacatgtccgcctctggcctcagcttccccacaggaggtagcggcggtggcaccagggaagatgctgacgcgagagtcatgtctgcccacctcgcctgggccagggacgccagcgtgcacgcgggttcggggtgagggactgggctccgcttacccgcaccccgaccctgggctgcagggtggacgtctgacgccctctgccgggcaatcgcctcggcgccggccgctccgggcgcaggttggcccgaaaccactaggggcggccgcctccttccggcaggagccagaggcgtgaaccacgcaagacgtcgtcagggaggggcaggttggagtagctctagttgaagtcaacttggtccctctcctggagctttggagactgataaccccacacccaccaagaaatgtaagaaaatgcgtttccttgccagcagccacatgtccttcatcccaggaatccccccaactctcccatcccctgatcaaaacagcttatttgttgagcacttactgtaggcagtgctatcagggctgctggctgaattacccgtaacccccacccctcctcttactcctcaccctgggcgggctgactgccctctgcaccacccagatgagtcgacagggtggcagagggacccccccctggagccggtccacggcagacaggcacgagagcatggccgagagtgggatcctaccagctggggtaggaagagcccatttctaacaaaacccccaacagcagcatggttgggggcaagtggccttcgtagtttcctcagataggggctggcaggactcaggatctttttgctggcgaccccaccccgaagactcccagttttcaaggtctcggcaagggtcatgtaaacctcacttcgtggaggaaaaccgccaacctggcagttccatggtcaaggttctcacagtgcaagcaaggcacggtctgaccaccagagggcagcagcgaccgcccacagaatcccaagaccacagcagagctgggaaggggaggccggggaggcaccccaggttctcagtggacgccctcttcaggcactgggcaaagggtaatctcctgggtcaagcaccccctagacaaatgcacagcaactcatccattccttttttgcaacacgtttattgagaggcagttgtgctccagccttccaggaggtcacagtcttaggggaagcagtgcaatggaggttggaagcaggggaaccctttactgaaggctgagcgctggctggcacactaggcctggcagcactggagggcaggcagggaaagtagggtgggtaacccagcctggcaaatgcacggcagctagaaaacctcttcaggttctggggtggctgggccatgagaggggaggccaggcagggctgtcaaggtaaccggggtcagatcatggagttgcctgccaggctccacaggagtgggggacagaagcagagcaacccagctaccagccgggccctgagctccctcagggtgaccagggaggagctgtgactggctggggaggcagggctggggccgaggttccccaggacgacaggagggagccaaggcactctaagaggtggaagaagaggaccagaagctggtgagtgcatcactggagcccataggagggctcctgactgtcctcaaaagcctcagacctcagtgtccactttctccatccaagaaatggggctgtgatctctgcttatgacagcacaagcttgcacagaagtggaggcgggaaataagcacaagtgtgccttcccagcccggcctgggtccaggcagaacagctgatactggccccagtctgcccacccacccctgctggccaggaggctggcagaaccccagccccacctgcctggagcgcgtttgatttggactcgactgttgtggtgatggaggggggctggatctgtagctaaaaatacctcggagccaagccagctgctcagagcttcctcggaggctgggccgcgctgggcccactgaggaactgggcatgcccacccaggaggtagctcccttacctgctagaggttgagggcctgagtcactcccccttccagtcaccaggaattcctggagagtttgagaaagcaagaaagattctttaagctggttcctgacacaacagctgttaggccactgaagcctgggggagcggccgggtggcatttgtggggtcagctcatcggtgtccacacaggggcctatgccatagtgcggccaacagggaaactgagccctggagagttgcaggggcccagccactgctgtgttgtcagagcaaagtccagccagccccagtgaggctggaggcaacgctgtggcacccacttccctggatgcctgagaaccctgcagaggggccacccacatgaggcagaagacactcagccttcagggatgaagctactccctgaggtcccagggacgggagctggcctggcaaatacatctaccctgcctgagcagtccccaggccttggctgcccatgagcactcggggacaggccagagacaaggccactccttgagtgctaaaagttcccgtcacaaaagccagactcagcaacagctcaaaacattattgtccggccaggcgcggtggctcatgcctgtaatcccagcactttgggaggccgaggtgggcggatcacctgaggtcagtttgagaccagcctgaccaacatggagaaaccctgtctctactaaaaatacaaaattatccgggcgtggtggcacatgcctgtaatcccagctactcggaggctgaggcaggagaatcgcttgaaccctggaggcggaggttgcggtgagcccagatcacaccattgcctgggcaacaagagcgaaactctgtctcaaaaaaaaaaaaaaaaaaattattgctggacctgctcctcccagcgctcaggggcaggagcttgctggaagtcacatgccagctacagatgcactgggccagacgacctgagatggtggtgccacctcactgcacagcccaggcagaggctgtgtctccacccagagggtccgaaaggtcatgttccacgctagggctccgggcggagaggccggaagaggcggggatgccggcgactcagtagtaaggcaagtcctgccacctcctggccggcccttccgctggcgtggccctctctctgcaagccctggggcccagcgccagcagcggccccgccccgcgttcgctgggtgaccggtgggcggggcgccctcgagggaccagcaggaacagcagcaggaggacaaactgcctcaccctccctgccccaagaggtgatggtggggggacaaagaaagaagagggaccaaagcagagagagaggggtacagtccagccaggtgggtcccgacaccgtgccgagaaccacatccagaccacagctgagcacccaacagctcactgattggatccagggaggggagaaactggctggagccctccagggtgcagctgggagggagacgtacatcaattacttaattatccaaagcaggtggggagtaaagaccccacccggagagcaacgaagactctaaagggaggcgccacaccctcgggcggcagagggtaacgtgagagcaacggggttcaatggcagagccaaatttaaaacaggtttcagggagtatagaaggaggaggcttttgggatattaacaatgtgaacctcaatttttatcaggtgctttcgccctcttgctgtacttgggcagcggggagtctgggcaggaacactcttccctcccagcaaaggagctggacccagcacggctcatcggggattgaagacccagccctggccctcacaggaggagccaacagcaccacgccagttacttccaaccagacagtcccgggcagggatgccagcagacagctggcacgggaggaagcccaaaataacccagacagctggggtgagggggtgccatgggcacaggcgctggctgccaagtcaagccacctggaaccccatcctggctctattggtggtggccttgtgaccttggggagtcacttctccccggaccatgggtgggtgacccaaatcttgaccccatcatggaacagcccctgtggatggggaaaggcctgcagctggactcaaccactccagaggagaaccgcgttggccgccttcccagggagcgccagattcccctttgccctgaggcagggacacgtgcttcagcaggtgggctggtgcggggggaagctctgaggcagcccagcccccaccccctgcagccactcccagcaataaccacgatcacaatggaggccaactaaaagcttgggaggagggcctctttaacgcacttaatcctcccaccaccctttccagcaggcatccttatcactttacagggagacactcacccaaggtcaccagcactgagagatcctagcccatggcgaactatctcccttaacttagcaccaagatacctttagcaagatctccttgttaatccgaacaggcccccagagctcggtgtagccctcacagcgggagtggggcacaagtcccaaataggggaggtggtgtgatcaggagcacctggacccaaatggttcatcaaagcaatcacaaagcagaaatcacaaggaggggggctccgagaccaagggccgccatctccagctgtggagcttcttagacactgagatgggaaactattcaatacatgaagtcggctagcgttagaatgaaatcaattactatgtgccaagcgtggaacgtggcacttctgcgtcaaaaccccaggtgttaccaggctaggggctggagtctcaaaatgtgttcccagaccacagcatcagcctcacctcacctgggaacttgttagaaatgccagtcctaaggaccaacccactgaatcagacacttgggcaccaggcccggtggtccattttcagtgagccccccttccggtgtgattctgatgccggttccagactaagaaccactgatctagccctgttttcggagatggagaaataggcttggaggctataccgcttacgcaaggccatagctgttcaatggctcgccaggtttcaaatccagctttgtctggttctagaaacaaggcttatatacaggcctgcccattcggggactggagaagaaaacaatcccaggaaggtggagaagcgtcaaggaaggccctttcatagagaaaggtggccggaacctcgggtctctgttctttgcctctctagcagccagacatcagaggacggctcacactgtcaccccacatgccccacgggggcggctggagggaaggccacagcacagttgggctttctgacagtgacctgtgtctttcagaagtaggcggcacccagggccctccccccgccgaagaacacacaactgggaaatacttgcaagtggatcctctcgtatgctgctatattcggcagagacttacacgccccaaatgcctgacaacagaagctgacagacggggatggatggccccggcggcccagcaggcggccctacgcgctcgcagctgggggggggggggtggggtggggcggggccgcagaaccagcccggcgtgtttggggttcggccctccctgggctgcaggccagagccccccaaatctccctcacggtctgggcaagtactcacacctaccttagtgggaggactgtcagagtcaaactaggcctgcccctgccgttgacagaaggaaagattgtccattcggggggtgcccgaacgtcgccccttctccggcccagaacctggaggagaggaaggtggagggcggatcagggcgttgggggagagagatgtgaccggccgaatacacagcagacgggctccggggctgaaagggagcaccccagacgccgcccctcccccagcggcccgggcggccgggggtggctgagtcagaaggttcaaccccggcccgggcggcggctcatctgcatttccaaaggcccgccccgcccgcaccctccccgggaagggccggagatctgaggcttcgccgggagccccgcgcctcgggggatcccggggccccccctccgctttcccaggcttcccccacctcctgcctggagagctgggctggagggctgcccaacggggcgtctgcggccaccccgagggcctcccgccctgagtgaggacaaagggggcgaccccccgccccgcgctgactcggctctcagagggcgactgggaggtcggacctgggcgcccagagctgggtgggcagcggggggcggcctggggtcagggccaggccggtccgcggcttccggaggagccggtgggacccggggcggcctcgaagccccgccgaccccgtggccctcggctgcgggcgcccgcgcaggacaaagacgaaagagggaagcggtccggggcgaggcctcctggtgcccgcgtgggccgccgggtcgcccagccccctacccctgccgctcctcccgcccggcgcgcggcggccgccaccgccccagccacgggcagcgcgcgaaatggcgcccatcaggccgccgcgcccggctgaggcgagcgcgggaggcgcggcgcgcgacgcccccgaggcccacggcccccgaaacggcccccgacacccggtcgccagcgctgcgccccgcgggctctcggggcccgacctggccgcgggcccgcctcctgctccgggctccccacgaccggggggacggaggaaaggaggaaggaaggaaagagagccgccgccattagcaaagcagccctgcccggctgggcccgcctgccagaccagcccggcccagccgcgacgggctcgaagcctgtaaagaaaactggtgtttgggaggaggagcgagcgcggccgggaggacagcagctccgggctgcgggcggagatgctgcgtcatggtgccaacatggacgccggccttttgtcctccttcgcgttgccagcgcaggcgcgccccggagccccgagaagccggcttcggggtgcggaatcctcacgatcgaaaggaaagtgggcccaaggctgggcgatgaggctccctagtgttttaagcccccccgtctccaaagcacttcaatttcttctccccatccaggttcagacctgggaagagcgagggggcgaaggcaggcggctccatggacccccgagggtcgctgcgaagcccgtcttctcgcccttggggcagaagaggcacaggggtccgaagagcccttcgtgtcccaaccccccgcccactgcccgctccggctgccaaatacaatgctccagaatcctccttctcctctcagctcccaaacacttgcagcccttgcttggcctgcaaaagggtttcctcgaaggggcaaaaggcactttttatctttcttacttacccgctcagcccggtgccatggagtctagaagatcaagctgggcggtggttttggagacgttattgtaaaaacatatatattttttgatttagttgggaaatttgggggttatggtggtgtctttgttcttattacctttttgtaagttacaccctcacgttctgctccttccacttctgcaaactttccagggttgggtaggcaaaaaggcggcttcgctgaggactgtttactgctctggatatagcaatggtgtgatcgtcattaagagacaaaaggcgaaaatacagtcaaatcaaacaaaaggcacaagacgcaccagccgcccaaccaccatagaaaataccccccacttaacgttggtgtttgctggaaccagctaggacttgttttccagttttaatctagtttcctgtgacggctttagtctctctacacaaagaaaaggtcttcctttccctcacccaccagctccccccaacccccaacaccaaagacgagaaaaacagggctgtttttcttcaaatagatcgattttcaaagaaagtgtacaagctacggggaagaaagctgactagcatttagtgctgtaaacattttcaaaagcataaagctagaaccttagctttataaagcaagatcgtctcaagcatcttaactggcttatattagacaagagagacaaagacatacatgcagatgaaggttcggaaaattaaggacatctcagcaacattaacatcaaaactgtactgcgtcaggacagaatggattgggtacttacaatgtaaaaggttttttaaaaactaaaagagtaacaactgctcacaattttttgttgctgccatttcgctagtcctaaagctatatacatttaaaacattaccttgttaaaaagagagaaggagttaataagatggccaggtttaagtgtttaatagaggaaactagatatatttaaaaatttattgttcagtcaagagaatacagattaagacagctccaagctccccccacccacccatagaacaaaaagaggaaaaaaaatatgtcatttacttaggtttttttggaattcaaaactgttaactgctgacatgaatggtgtgctatgacctagttatacaagacaaagatggattccaagtcataaggaaaaatccagatctttttaaaaagtcttctccagtcttccaactgtgagtccttgggcctgttgacaaatgttaaacacactgagacgtcctgaactggatggtagagtcaaaggaaaaacattccccatttgcaacaaaggaaaaacccacttggccatttaattccattgcagaaaaatggcttccctcatctgttggcctctccttcgtgtctgatgaaggatgttttgagatcagcgtctaataactcaagccctatagaagccgcgcgctgattggctgccgcgccctgccgccctgctccagccaattacctacccacggccaaattacaaaccccgaaaagagccccaatatgagctacaccagctccgagccccggcgaggcggctcctgcgcctcggccgccagagaggagcggcagagggggctgcaaacgcgtcctcgcgaagcccgggagcctcggagttgaactcacaaaatggaagccgcgcgctgattggccgccgccactcccggacctttaataaagaaaggggaaggaaaagataaatgcaaaaaagggggactctctcctccgcgggtggctggaggaagggggggaagcatgtgttcaggacaattacagggcgctcccctccaaaaataaaaacagaagaaggcgtctatcgcccaggtccaggcgagggctgcatcctcccaggaatgcgaatgctaacgtggtgaaccctggtctcccttccccagctcagctccggggagggggtcgcgggccgcaggaggaagccggagcgcagatacctcgattgcaactcctctgagtcgacgccggcctccccccgcggctcccagcgtccacacacaccctcggccccccagaccccagccatctccccgggccccgcgcgcccgcctccggcccgggcagtttggaaacagttttgcaggcccgggacgcacgccgcggcggtcgcggctctgagggtagtcccggccgcgggaggtagagcccggggagaccccctcccccgccagccaagacccccaccccagtcccagaaaaataaataaattaaaaggccttcccccggggagggggaggcagtgtgggagcgcgcgagtgaggggtggggggccgctggggcccggggctttggcggcgcagctgccgccgccgggagagtgcctggggaagcggcgaggaaggagaggggaggaggaagaggaggaggaggaggaagaggaggagggtgagcgctcgggtcgggctccttagcggtgtattgtgggatgtgcggctactgggagccgagcctccgccgccagccgcctcccgggcagcagcagcagcagcggcggcggcagcggcagcagctccgggcccggcagccgcggcggcggcgcccccccttcctggcccccggtccggccgccccggcctcggctccctcgggggacaccatgtactggctggcggcgcagggaggccggcgcccggcggggatgtaagcgcggctcggggagggagaggccgcggccggcagccgggcggcccaagcccccggccccggccctggcccgagcgggcgagcgggcgggcgggcggcggcgccgccaggccctgccgccagcctcgcgccagagccgggccgagctagcgggtgagcgccacgccgggcggccgggcgggcaccatgggccggagtccgcgtcctccgggcgccccgggccccgccagcccgcccaggggacccccgggagcccctcgctgccgccccgagacggtggccgagcgggcgggcgcgtaattctcccggaagggttattctctcgctccattcttgttttggggggagccagcgagacagctcctttcggggcgcgctggcaaggtgggagggggtgggggcctgccgattggattctttcgcgtgtgtgtagaagcggccgccgccgccgccgcggcggagacgacaacaacttgctggttttcaggttgggttaacggcatggagaacagtcaccccccccaccaccaccaccagcagcccccgccgcagcccggcccttcgggcgagaggaggaaccaccattggagaagttacaagttgatgattgacccggctctgaaaaaggggcatcataaactgtaccgctacgatgggcagcatttcagcctggcggtgagtagccggcgcgcccccccagccgtgccccgcgtcgtgtccggggagacgcgcctagcggccagggaccccccgcccgatcccccggccaactgtcagacggggccccagccctggagtttgacaagtgcctcgagaaaggggtctgcccatggggagggggaccagttctctcatcccggccccccaatttctccccacagatgtccagcaaccgcccggtggaaattgtcgaagatccccgggtcgtcgggatctggaccaaaaacaaggagctggagctgtcggtgcccaaattcaaggtaggacccctccccactgccccgccgtccctcccccacctccccgagttcgaaaataacgccagtcctgaccgagcccagccggattcccagttcccgccgtccggggccagggaagttttggcggggaggggtagagcgctggcgagagggtgtcccctctcagctactgaaaacaaaataacactgggtgaaactgtaatcacggcgcagatacagtgtcctgcacgccccgcggggggctcggctccgagactctcccctctcgctagcccactacaggacaacttcttaagcctgaggggtcgcccctgacccggcagcaggaagagaaggccagaaaggggggtggggaaagagaaactgtttctttttcccctttccttccgaacccagaggacttccacgttccaaacgatttaatcctccgcttcccgggcccgcccgcgtgcattttttttttccaaaaaaaattttttttttttttttaatttttagtttttttaccctttattgttttcaacgggtgggcgagttgcgggcggggcgggggggatgttgtgttttcccttaggtttaaacgttcttcaaactcccttccccctcggcccctgccagatcgatgagttctacgtgggcccggtgcctccgaagcaggtgacatttgccaagctgaatgataacatccgtgaaaacttcctgagggacatgtgcaagaagtatggggaggtggaggaggtggagattttgtacaaccccaagaccaagaagcacctgggcatcgccaaggtggtctttgccacggtccggggagccaaggatgccgttcagcacttgcacagcacttccgtcatgggcaacattatccacgtggagctggacaccaaaggtgagcctggcaggggaggagcgtggggagacctgtcagcccgacccttt

SEQ ID NO: 59097 - DNA, 1907 bp, Homo sapiens
ccggtgggcatgggcagtcaggggcttagacagagctctgcgtccctgtgggcggaggggaggaggactgcccccttcttgggccctttgattaggcgggtctggctgcatcagggaggaacgagaggaacttggcttgcctgggagggtgctgcaggtggctggggctccagggggcctccaagcagttctggggaagtggtttctggcatcaaggggtccaggcagggggccttggcagggggcgttgacaggtgtgcagctgtaggggggccgccggccctggcacccgtctcctccgctccgtctaggctgcctggggtgaggagtgtttaccatgctgaccacggtccagggctgagaggcccgcagtggctggagcgaaaggcaggctgaggccccgggagcgagggtctgggactgcccggccgccagcgcagggagtcgccgagtgccgggaagctccgggccggcccgcgggcgccccctgctggcgccggggaatagcgcctgggctttctgcggccgcgcgcagtgcggggagctggaccccgtcccatcctaggtgggggagcggcgcaggcggggccagccgagggtgcagggggggcttttcttctaaacagtggctggtcgttaaaagttcaggctcaagttcttgagtcctgccaagtcacttactggttatgtgaccctggaaaaggcacttttgcctttctgagtctcagtttcgtcatctgccaaatgggcctgtgagagtccctgcagcacaggacctcagcttaagtgaggtgccgcacaggatgctcccggcaccgccaggcctgctggactcccagttctcagcaaattcctgccgcttctcaccccgagactgctgggcagagggaggggcagggccggccggggctggagcgcaggatctgcctccctgtgattggctggcggcggcggcccgggttaaccctctgtgtgccgcggcgcgctgtgctcggctctgtccaggactgatctggggagtgctctctgaggatccacccgagcccgtctgtctcttcttgatgtgcatggggatcctgagaaggagagtgtgtgcgtgcgtgcgtgtgtgtgtgtgtatgtgtgcacagaggggacctggtaaagtccagagcttcctgccgctgccttagtttgggtagtctccgtcctcctaccccgctacctgcagttttcctctgaggccttcctcacctgtagtctgacctctgatcttgcaacttgcacagactccacctccacccccactccccctcagccttcaaaggtccccccaccccaagtccagacctgtccactcggctccctaaagccccacgcccatccttgacacctcccacatttacccctcaccaccgccctggatcccagctgcagccccgcactgggcaggtcctgggctccagaccttcttctgactggctgtgccgcggggccacggctgaggctctgagtgtgtttattaactgtcaaatgggtcggagcagagccccccgccctgtgaggttatctttcggataaaaaatgaggcagccgtctgcagcgcttagccccacgcgggcccacactgattgtgcagtcacgagactaggtgaaaagagtaatcaaggaaaaataaataacaacacacttcctgtttatgggccttagtgctgctaaacccccgctccaatgtcacctttcctgcctggccgtctgccgcagagtgaggacagcagggtgactgagagcacaggctgcagaaccacttcctggttcaaatcccggctccatctcttcttggctgtgtggccttgggcaggttacttaaattctctgtgccccagtttcctcgtggggcaaaaatggagttgaaaatagggctgttc

SEQ ID NO: 59098 - DNA, 4902 bp, Homo sapiens
ccatctggcagctgtggaaactgaggctcagtgagagagaggacacgggggaaggcagggcacccccggagcccaggtgtgtgtcacaccagcatctgggcttgtcactgtgatgcagcatctgggcttgtcactgtgatgcagcatctgagcttgtcactgtgatgtggcatctgggcttgtcactgtgatgcagcagtgtccttccagccctgactgatggggtccccatggcagacggaggccttcctctctcagtccacccaggtgctttcttacctgcacgatgtagtcacaatcttccacctcgaacgcaatgtccttcactccgtcaccgtgtttcaccaggtgatcgcccatctctgtggccggcagggagaggatggcactggagtctggagtctaggtcccctcacctggcttttagtctccatccaggccctgaacccagagcccacccacggagccatgcgtccaccctcccagaacccagatcccacccacagagccatgcgtccaccctccccgggcacctcacctttgttccaggggttgagcgctgaggagaggacaaacacaatctaagataggaggagaaggaggtgaggctagtggctcaggggggcatggggaggtgcacccatcggcccctccctgccgacccgaaacacccctgatggagcacaagaactcctggacctgggttctagctccttctctgccttagtttcccacactggtcctgagggatggggctttcagccagaccccctctggatcctcagaggaactgctaggtcaggtctccctcggggagagaactccagggaccccatcggtcagggcactgcttaaaattcctctcctctgatatcccaggttttctgagcacctgtggggtcagtgttgggccaggctgaggaggaaacgaaactaggaagggccgtgttgcatggctgtacaaagatgccagcggaggggtcggtgggagctgaattatatgtttttgttgttgttgttggggttttttgttgttttttgtttttttttgttgagatggagtcttgctctgtcgcccaggctggagtgcagtggcacgacgttggctcactgcaacctctgcctcccgggttcaagcgatgtgcctgcctcagcctcctgagtagctgggattacaggtgcccaccatcatgcccagctaatttttctatttttaatagagatggggtttcaccatgttggccaggcaggggttgggggctgtcctgggggtggtgactcaccttcccttgtttgattacatggctgaccacctcccgggaaccggtctccaggcccctgtaggctagaggttcaaagcccatcttgctgcagtagaatgacgtggcctgaatcacagggttgcagcagggttcatgagggtcaaggggccagcatgggggacttccgcaagagagcccctggcccccctcagcctgcctgccctattgcctcaggggcagagaccctcctgggaagatagactgctgcctgcacattttgctgacagataactttcccgctggtgtaattaggattcagagtatctggcccacccctggcctgatcctccctcccaagggccaatcacagaccctgctggaggcctgcccttgtcaggcagccctctgccctgccgtctgctcactccagcaccttgccccggcttctacctgcttggcgttgccaacccagaaggtcacagagtggaagtggaggaatcggcctctctcaggctgcagaaggagagaagaggtgaggttgagtccctgaaagtgagtctagaaaagtgcgggtggagtgatgtcccctagccaccctccttattccagcctcaaccacagaacttaggagcagcggaaccccatgcagccttgccaagcctcaaaagaggtttctcatgtggaagttgagctcctgggtgtcttggatggggaaaccccctcaggaggcctgccaaggtttcacacagggaaatagacttatgttgcagcaatatggatttaagttagaccttagaaagaacttccagatgggattaaaagattggcaggcatttgagaaggggtacaggttttgttttggtttttgtttctgagatggagttttgctctattgcccaggctggagtggagtgcagtggtgcaatcttggctcactgcaacttccgcctcccaggttcaagcgatcctagggttcaagtgatctcccccaccttagcctcctgagtagctgggattacaggggtgcgctaccatgcccggctaattttcgtatttttagtagagacggggtttcctcatgttgaccaggctggtctcgaactcctgacctcaagtatttgcctgccttggcctcccaaagcactgggattacaggcatgagccaccatgcccggccaggatacaagtttgttgtgagggtgaggttgagtccagctcagtctcggggagccccgggggtaaagctgagtgtgcaggcatgcacgtcatgtatccactccagtccttcctcttctgctctctgctgaaaccccagtctccctgcactccgacccccttctagactcaggcccctacatttcccacatttcgcctgcttacctttgcccctttgtcactgtaagtcgtctaaggagaaaaagaaggacagtgagacttggaggttccaacacaaggtgcttctggaagcgttactgaagatgtcccacccaaggggagatggccatggcacttaccatgattgatcttagtcaaacctcctactgggactagaggcctggggagtgctgggccggagtatttaaccccaagcaggtcccgcccaggcctcctggcctacctgggggatggggtggggagctgagcccagccctggaaggttccaggcctggggacctctgatccagccgcagcctcattgaacaggatggtgttgccaggcccagagaggggcagtgacgtccactagtcagtgggaggcagagtcagggccagaagccaagggcaagcttttccaggacgctgggaatgtgaccattactgcccagaatccaaagctcagaagccaaggccggctggagtgcagtggcggctccagaactcttgcctagaggaaatttgagggggcatttggagactggccccaaagtcctgtttgcgtcacagcgttgtattccatagctctgagaggcacggcaggagaaggtttgcatcctggctctgttacatacagtgtgacttgggaaaatcaccatatccctttgagcctcatttgtaaaacaggaatgagaatagtgtggtggggattaaaggagataagcacgctctttggaacaggacctggcacacaggacactctcagtgttggttataattcattgggacagagaacattcctaggccatgaggtcagcaagcggcagggaagaactggaacatgaaccgggctattctaactccaggacccacactttaaattgctagattgccctctatacaaatgggagatattgatatccccatcagatggggaaactgaggcctggagaggtgaacacatgtctcccaggtcatggaactggtaagagcagagccccaaactctggcctgtttgattctgaagttggatctcattgcaccagtgcagaccacttctccctccttttctctattttctgggccattcaggaggcaggcaaggtggtcccacccccttattctgcctgtcctgggcctgcccagtgtgctcccagtgtccacctcagctccttaagtctaaatttccaactgggggccgggggtggtggctcacgcctgtaatcccagcactttgggaggccaaggagggaggatcacttgaggccaggagtttgagaccagcctggcaacatggtaaaacctcatctctactaaaaatacaaacattagctgggcacggtggtgcacgtctgtagtcccagctactcaggggactgaggcaggaggatcacttgaaccaaggaggcagagattgcagtgagcagtgatcatgccactgccctccagcctgggtgacagagtgagactccatctcaaataaataaataaatatccaactgggaaaacttgagtggaggtggcccagggtggatctcacaggcccagaaggttcccatggaggagaagagctctgtgtagcctgcctatcccctccaggccagcaggaacatcttgtcactttgattgctgtggccaactcaaacccccactcctggagcctgccctggcttatatgctaagcacaaaggccaatgtttactaactcaaggaagtgtgtcaacagcagtgggttgcaaaggctggcaggcatctagaggtaggaactctgtccccaacactgtaggtctcagtcccatgctgggtgcacccctagatgccattcacatgtctgggcagagagcagggaggcaagcctgcagggcccagtatccagagtcccctccctgatgctctctgttcaggctgggctccactggataacagatcagcagtggctgggtgtgactgtctctgttcttcatgcccgaccatgcagaggtgggttccagaggccttgctcaagaagctcactgatcagatgggttcataggacgcatccttgaaaataccctggtgtgcagaaaagcattcacctagctgggcctggtagtgagcacctgtagtccccagccactcaggaggctgaggtgggaggatcacttgagtccaggagttaaaggttgcagtgagctatgatcacgccactgcactctagcctggggaacagggtgagaacttgtatcaaaaatagataaggcagggcccagtggctcacacctgtaat

SEQ ID NO: 59099 - DNA, 1017 bp, Homo sapiens
gcacctgggaaggccgaggtgggaggatcacctgaggtcaggagtttcagacaggcttggtcaaaatggcgaaaccccatctctactaaatatacaaaaattagctgggcgtggtggcgggcgcctgtagtcccagctacctgagaggctgaggcaggagaatcgctggaacccaggaagtggaagctgcagtgagccaagattgtgccactgcacttgaggctgggccacagcgagactgtgtctaaaaaataataataataaaaactggcccacaaacttcctggagaattgaccgtgggctctcctgagtgaataggagctacttccctgctttcgttgcctgaggtttagaggtgggaggcccccatgatagggaaaacagccaccagggaggccgaacagctgatacgggatcaaggcccggggtacatcaaagggcttttccttcctctcaggctaaattaccatcacgtcagtagctccatcacttgcataagcggagggtaaggttactcaagcccagccatcgatccctttcaggctgaacctgtgtcctcatcatccaaagtccccatgcttgcatacgtctcccacccttcagtttggagcactgactttcatcgttggcaagggcaatggggagttctctttggcctctgatttgctgaattgccttcaatacatggcttaacctctctgaacccccatccccatttccgagtcttaggaagaactgtggcagggcgcggtggctcatgcctgtaatcccagatctttgggaggctgaagtgggctgaagtgggaggatcacttgaggtcaggagttcgagaccagcctggccaacatggtgaaaccccgtctgtactaaaaatacaaaaattagccgggcatggtggtgcacgcctgtaagcccagctacaagggaggctgaggcaggagaattgcttgaacccaggaggcggaggttgcagtgagccaagattgcgtcactgtactctagcctgggtgacaca

SEQ ID NO: 59100 - DNA, 2015 bp, Homo sapiens
agcctcccaaagtgctgggattataggcatgagccaccacacctggcccattgcatttagttgatgcacatctttagtgttcttaaatctaggcaattgcatatccgcctcctttctctgtcccccaccccttattccccatgtgtatttcacaacattgactttttttgaagttttcaggccagttgttttgaagtatgtcccttcttttggatatgtctgttttccaatgattagattcagggcaaacatgtttgaatactacacagatgaccgctgagcccttttcaagacaaaatattagaggcacatggtcagatatcaaagttgattgtttaggtaagctgggttggaattttggcctcacattttgctagttgggtaaattggttattgagacggttttctcagctgtcaaattgggatgtaataatctagcttcatgaggttgttgaattaatatatgtaaggcatttagaacagcgtctggcacattataagtatcaataaataaacactgttaccgttattattatcactacgatttttagaggccttaacaggaacatccagcaccttcaacagtatatggctcataggaatcattccatgaatatttgttagcagaaggacagctctatgagatagattgctatcaattactgccccattttacagatgaggaaactgaggcccagagaagccaagtagtgacctagggtcacacagattgccgttaagtggcaagatacggggtgtgtactcaggcatatcggatctgtaaagtgagggataaggaaccttaatgtattttgtaaatcctccagggctgtgtggatgtgaagaactgaattggagcgccacgcagcggttctctggcgtacagtatccatccatacagtaggcgctcaataaatgtctgctgcacgaatgagaaaatgagtcagctggggcgagatcatcccctagcgttggtgtgcaattgcgtggggatccattgcttccgacgctactcctgccgggtcaccacaggcgcacgtgttccggcagggcgcggcttccggtgacccagctccgccctaagccccatcccaagccccgccccttgactgttctcgcgttcgcggacggctgtggtgttttggcgcatgggcggagccgtagttacggtcgactggggcgtcgtccctagcccgggagccgggtctctggagtcgcggcccggggttcacgatgtccgacgaggaagcgaggcagagcggaggctcctcgcaggccggcgtcgtgactgtcagcgacgtccaggagctgatgcggcgcaaggaggagatagaagcgcagatcaaggccaactatgacgtgctggaaagcgtgagtgtgggttcggggcgccccaagtcgcctaacccggcccggagtccctggggtactgggatgccagggcggcctcagtttgggcgctccgcaacggatctccctgggaggcccaaggcgccgcaagtgcggcctctgtcggcacaagaaggcaggcaaagaactttagcaactgaagagttagccatattgatatccagcaagagtttgtggagccctgctgtgtgctaggcgctggtttaagtgctgtgcattgttgagttaatttaatctttgcaacaaccctttgaggtggatgctgttactctttccattttagggagggggaaacaggtgttacttggtgattaaacagctgtcatgtgcctcgctgactgccttatcttaattttgtactttttgtaaagacagagtctcactgtgttgcccaggttggtatcgaactcatggcctcaagcgatccttccacctcggcctttcaaagtgctgggattacaggcgtgagctactgcacccggcatttgctgattgtatcgtgaattcttaaacttcagtgtgtatatgaattacctggggatcttattaaaatgcagattttgtttgaggcaagggagcagattctgcatttgtagcaaactccc

SEQ ID NO: 59101 - DNA, 465 bp, Homo sapiens
gatttcaccatgttggccagggtgatctcgatctctggacctcgtgatccgcccacctcggcctcccaaagtgctgggattacaggcgtgagccaccacgcccggcctagacttgtgtcttttaaagttcggttaagagctccgactggaacacgtgtgactgaacatgaacttgagagcggcatctgcgttcaatggtgttgctcagcaggcaggaaattccagacatagtttgtctgttgcatagggtgctatttcacgtgggagatccaaactccattccgcccctttccccagcttcctcctccccctttccttcccgcttcctctccctcttcttcccttccctcttcttcccctcccctctcctttcccttttctctcttccctcctgtctcctctccttttttctctcacattgtaaaactcctccttcatgctgccaattccaccccttccccttct

SEQ ID NO: 59102 - DNA, 3258 bp, Homo sapiens
aagaaacttgcacgactgcacccgccgccgcgctctgggggctgggcaggggcagctgggctggctcccggggaacgcgacccccccgcgccccgcagaccggctgtctcccatggacccctcggcacctgcagcctccgaggaagggtcagcgcgcgtgtccgcacgcccgcccccaccgcgcgcccagagccgggggtcgccgtgcgcccttcgccacctccccaggagggcgtccggggcgtcccctctgggggcgcaggaggcccgggggcgctgcccggtggccgcggcgcccggaggccgcactgccggcggcggcggcggcgcggctccccctgctctgtgcagctgccgcccggcgcttgcgcactgggccaggcgcgcggcggccccgggctttgtgtgtgtgtgtatgtgtgtgtgtgtgtgtgtgtgtgtgtgagtgtgtgcgtgtgagagtgcgagtgtctgtgcgcgagtgagtgagcggcgggcgggcgcgagtgtggccgccgcggagcgcgagcaggacccggcgggcgcgctccccagcctccgtctccccgccggaaccatgtcgggcaggtcggttcgagccgagacgaggagccgggccaaagatgatatcaagagggtcatggcggcgatcgagaaagtgcgcaaatggtaagcggaggcgcccgccgccagccgcctccccggccgccccgagcccgagcgcggctccagagagccgcggggcgcagcgccccggccgcctgccccggcccagccccgccgcgggccccgggacttggcgagggcgggcggacgggcgggcggcgcgcgagccgggtcacctgcgccaggctggggccgcggccgctgcccaggtgcgctcgcgcctgtagcccacctggcgcggcggcccggaggcggcgggcgccggggccaggcggttggagcggcggggcggcccccgccgcggcgctcggctcccgggaggggggctcggggccggccccagaagccatttcgttttgtgcaagtcacatgaaagcggcttcccgcgcgccggggccgcgatgccggcggcggcggggagagcgcgagctccattgtgcaggctccgagcgggccgccgccgccgtctcctccccgcgcaccccggcccgcgccccgccgccctccgccagccccggcccgcccggccgcccgctcccgcctcccgggcccggcgccctcgagtctgcggagtttgcagagcgcgagccgtttaaatttagcgctttgggctgcctggagcgagggctctcggcgaccaggaaagatgggggcgagcgctgggagccagcggccaggggcgcggggcgcccacgtcccaccccgctctgcgcggcgccccgggcggggggctcgggccagccgatgtttttggccagaagccgttcgtcctgggccgcggctgcctctccacaccgggagctcgtgtttgttttgcggagggagctgttgtttttgttctctgcaccggggagagggggacttggtggcggccgcgcgtggttttcgggatcacattagcgtccgcccggcgtggcccggtcgacattaaggggatcgaacctttccgcggcctcgtcggggtctgctcggaatcggcccctgggccaggcccgaggcgcaagcagatcgccaggttgggtcagagttgttgaaaactccccgctgcctgatttcaactttattatttttttcccacgccttcactggggtcccggagggagaggagccgccgcaacgctggctctgagtgtcagcgcccgcgggctcgtctcgaccctttatttcgagcctggaagctgggcaggccctgtggcaggggatgtttacgtttgggggtgtcgtttctcgagtagcgcctcggtctctaaaagccactgggggcgagcctccggtgtggcggtgtcacaagttagctgtcctttctgagtcaaacccaacaaaaaaggcaagaggaaaatcaataaagtccacgtgctccccggcctcctatggaaagggctggctgcgatggccggatgcccggccgtgggctgggtttggctccagtgggacaaagaattttcagaaccgtgagaaggggaggctttccaaagttgagatccaagtcgtcggtgtctcgggagctcccctggtacacagggtgcccggtgcccgactggagccatttaaaaatggcagaaacagctgcaggccaacacacacacgctggaaaacaacccgcagccccctctactgtgggattccccgcgggaagcccggagttgctcccctccttgcctcagcccctgtgcaaagaaagaactggtgtctgtgcctgggtcccttctgtcgccggcctggaggttgggaaacagccggcaagccgcctttctctgctcgaggaggcgtggtggggcctcctactccaggttcccggctggacagaggctcctgcaccctgacagctgctcccgcagagcggccagctgctctgcagggagggcagatggagagatggggcttcccaccccgcgggccccggggcggccggcctggaggccttccagcccgctgaccccgcggggaccaggcctgtagttggagcttgaggggctgtacctctgcgcctccctgggtttggggaaacaacacatcgtgtcctctgaagacctcaggctttgggatctcatggtccagcttccagttcacttcgttgccgcgaccttgggcatatcattgtcacttctctaaccatggtgacccggggttttgtgcttggcttccaggtcccctcgggttattgaggacgattgaggtcatgcctccgagagcaccgcgccctgggcgcaggaggagctgttgctcagtgttgtctgtgttgtaaggtggactttgtagaaacttggctttgaggttttttgtttttttttttttttggccccttctaagcgaaagccttggacttattgcccaggtttctctggcccctgagaagccatatctcaccttccccgcgccttcggattgggtcttagactcagcccatgagactgtgggttgtttattaattgtgtggtcaccaaccatgcatttcaccactggtgggggggtggggttgccaggtttaaccagataaaaatacagcacacccagttaaatttgaatttcagataaacaatgaaagatttttttaaaaataaatgtttttgagtatgtctcatgcaatatttg

SEQ ID NO: 59103 - DNA, 587 bp, Homo sapiens
ctgcactccagcctgggcaagagagtgaggccgtgtctccaaaaaaaaaaaaaaaaaaccaaaagatccagatttgtgacctggataaactctccagaaaaatctaggatgctgaacaaaccaggtccccagacacaggtgccctgttgactttctgattttcattttagtgcacgtgcagccgaaagccagtcagactgcagagtgtgtaaatgggaaggtcagggaaaggtgtgggccgggcaagttttctggaaggcttcaagtgggaggatgggtacagcaggggatgaaggagagggcggtgccccgggccctttagtccacaagactcagctgaagttagcccaagtatcagggtcacgctgttaccaggctaccaggctagaccagacgttaaacattagtgctcattgtcattcattaacagagcctcaggaacctacggggccagcctcttgcgcgtgtgcttgccataggaaggaagtctagtttttctcaagggagaaatcggggagcacacatccttcttttttttttttaagtcccagaattcacaagaggatgcttttgtgtaacgagcaccc

SEQ ID NO: 59104 - DNA, 1938 bp, Homo sapiens
tgggcgacagagcgagaccctgtctcagcagaaaataaaatgggataaacagaagctgcctccctcgccgggagcgaagggggcgagaacgccagcaaagtgctcggcctggagctggggcttaggaggagggtctgggagctgcagggttgccttgtccacccttctgtcgggggagcgattgcggggttcccaaggacggacatgggcttcgtgtgcagccgcgttcctgcttctttcccatcctggtttctttctggccgtggccttgtttctcccacgttgggggtgtgtgtctcctttgctctagaagcccgatttgagctccgcagcaggaattatgttttgagttagtgtgtccagttggttgctactttctcgccactaccaccagatgctaaattggtgggacgcaggtgggacctccaccagggtcctctctggccaccccaggcccctgggcctgcacggctgccctgcactgctcagccaggatccacctgcctgctgcccgagctgcccgtgggaagggcacaaggacagacccgtgtggccttcccaggtgggtgcgtgctgtctgccgggatggggcaggtcggccaccagctgttgaccttgctttgaacttgtttactgctgtgtgagttcagggaatgacataattcctgtccaagctccctggactaaatttaggtcccaggaaaataattttccctgggtgagttccagcaccgcagcgcccagagaatcggctgctgccctgagctcctgaatgctctgtgggttccaaggccagttcccaccaagctctagggcctggctctcaggagaggcctctgccgggcacctctctgcccagcacgggtcagcgtgagtctctgggtgactggccaccttcatgatttctaagcctacatctggggcacccacctcccccaccactctgcagagcctgctgtgcccggcagaaaaggagctgtggtcagatccaaagccacagatgggcaacttttctagtaaaaactttaaatatttatgttaaagcaaacatttattatgaaatagagtataacaataacatgatttctctctctctctttttttttttttttttttttttttgagacaaagtctcactctgtcacccaggctggagtgcagtggtgcgattttccgctcactgcaacctccgcctcctggggtcaagcgattctcctgcctcagccacccgagtagctgagattacaggcacctgccatcacacccagctactttttatatttttagtagagacggggtttcaccatgttggccaggctggtcttgaactcttgacctcaagtgatctgcctgccttggtctcccaaaatgctgggattacaggtgtgagccaccacgcctggcctggcctggcccctctcttttaaaaaaaaaaaataaataaactagagatgagatttcactatatttcccaggctgttcacaaactcctgagctcaagctatcttcccaccttggccttccaaagtgttgggagtacaggtgtgagcaactacacctgggtgatttttctttttattgagatgaaattcacataaaattaaccaggttaagtgaataattcactgacagtacactcacaaggttgtgcaaccaccacttctatctggttccaaaacattttaatcaccccagaaagaaaccttgcacccagccgcaatcattctccacttctcccttccccagcaacactgggtccctgcccagggcaaccacgaaactttctgtctccatgggtttgcctattctggacttttcatataaatggaatcatatactctgtggccttttgtgtctgacttctcactcagcataatgttttctttctttttgtttttttattgttttgttttttgttttgttttgttttggagacag

SEQ ID NO: 59105 - DNA, 1526 bp, Homo sapiens
tggcgaaaccccgtgtctactaaaaatagaaaaattagccaggtgtggtggcacacacctttaatcccaactagttgggaggccaaggcaggagaatggcttgaacctgggaggcagaggttgcagtgagctgagatcacgccactgcactccagcctgggtgcaacagagtgagattctgtctcaaaaaaaaaaaagccacacctgatccgcctaccccgagacctgggttccagcagggacatgttttcagcttccctgtctctgaggggactctggattgtggtagggactcaggggcgttagtgcatgggtggactgcaacctcggcttgacttgtcctaacagcctctagtgacttacatggttgggctggaaccagacctttcccagggctgtgaccctttcagcccagactccttcccccacgctgacttccccacctctgtccagcgtcacctggcccttgggtcagcccctaaagagagctggcaggggtgggggtgttgtgtcagcgggtctaggccaagctgcactgcgtggaccggctgcaggcagatgctctctcctgtttgttctgtctgactctccttcctacccgttcctttttaacatgttccagtgtttttaccagaattggctgctcagctaaataaactcctgatatggaaagttcagcctgacaaaacacaaatcatagaggccttgtttgcttaaggaaaaaaaatgcctgagctggcacacgttcccgcgcttcctttctgccctccctgcgtgtctgttcccagctctcactctctggatcggtccctccctcctctctctaaggcttctgccctttccccctgcctcccttgtctccacccgcctagatcactgtctcacagtcattctgtggaacttcctctgtgtctctcactggagccgcctaacttcctctcccacctcccttcatcaaggagcagtctcatgcccaggagctagaaatgtaggctttgccggcattggttgagctgtgctgggccctaggcagcgatgactcaaacttgacccttaacccccaggcaggtaagtgagccgcagtgctttacgatgccgaccacagtttggaattaggggatacagacattctgatggcaagggtcagggaatctcctaggacactggaggaataccaggcctggggctaagcagctcgtttttcctttttgacacaaaggaggggctggaggcttctgagccaaggctctgctggactagggatggtgttgccaatgaatagcatggattggaaaagaccagactggaagtgggagccgggcaactagggaactggaacaataggccaagcggggggccagcggttggcaacagggcccatgtggccccaggcaatgtgaaggcggtcagtaggcagggaggtggggtgggaaagggatcagctgggggaggtaggcagaaaaggctcaggtccaagttccaggccatgctaaggcaacaagtgtcacagaggtccgtggtggggc

SEQ ID NO: 59106 - DNA, 1173 bp, Homo sapiens
ggatcacaaggtcaagagatcgagaccatcctggctaacacagtgaaaccccgtctccactaaaaatacagaaaactagccaggtgtggtggcaggcgcttgtaatcccagctacgggaggctgaggcaggagaatggtgcgaacccgggaggcggaggttgcagtgagccgagattgggccactgcactccagcctggacgacagagcagactccatctcaaaaaaaaaaaaaatggtcaccccttttgctcctaaatcaccctcaaagtaaaagagaacaagaaacagaagcagaaatccatatttagtgaaataagacaacacctgtagctccaaacctgtagaagcagatcccagagaaaagcaggccagttctctcctggaatcccagaaagtcccaggaattggaggcttcagtgctgcagtagggaggggactaaaaacaaagtctgtatatggagcagtaagacctccgggttctcatcccccatcctgtgtgctctcgggtgactagccctctccctctccaggtttagcttctggagaaattaaatcaaagaggctctagaactggggatggcaggcattgagtgcagggagtgagttgccagaggctgagagcagagagatttagtggcagtgggcagagcaaacagcaaaatgactgccctcttccctggccttgctccagaaactgagcagccagacatacacactcccagaaggcagttggaggtccccccgggcaatcagaaccacccacagagaagacctccagatactgacatttagaagcctctgaccaaagagctgcctggccacccactggcttactcgctgacaggccatgctcctgccgtacacaccgatcctatcagtcatcctcatgggctcctttccagacttctgaggaaagcttccaacatgaagagggagttcaaaacaaacagagagagagagagagagagagagaaaagaaatataaacaatgcagggagcaaaagataacttcaaataaactcaaaatattcttctgggagagatgagacaatattgcatacataaaacaagaagaggatgctatcactaaattttaaaaaaaagtaacagaaagtaagaaagacctctaagaaatgtttctgaaatgaggtataatttttttttttttgag

SEQ ID NO: 59107 - DNA, 4873 bp, Homo sapiens
tctcggctcactgcaacctccacctcccggattcaagcgattctcctgcctcagcctcccgagtagctgggattacaggggtgcaccactacgaccggctaatttttgttatttttagtagagacagggtttcaccgtgttggcctggctggtcttgaacttctggcctcaagtgatccacccgcctcggcctccaaaagtgctaggattacaggcatgagccaccgcgccccactatagccatttttaaactgtcccaagtttctgaggaaacggaattgttcaccatttgacagagaagaaaactctggctcagatactccccttttagaattgtttcgggggctggctcgtccgtcaaactttaaaaaaataacaacagcatgctgagttgaagttaaaagagctggggtctggaggtcgctgggctcaggggcgctgccactcaacagctgcgccgagctggggacgcgcaggggaagcaagttcccagctctgtggactccaggtctgagaaaaatcctgtcggtattcagccacccagtgttcccatcaatacgatgagaataatgaggacaatagccaccacgtccggcaaactcaggcgtgagctgcgaggactcggtaccgcccggcagggaaaaagcagggcctggaggccgaggagccccacccgcacccaccacgtggagccggccgggcctgcggcgaagccacagggcgactcccggggcgcggagcggggcgggggcgggactagcacggccccactctgccgacgcctctcccaggtcgcgacaccggcgagccgctccgcccggccaccgtgtccctcagcacccacggacgccgggagaggaggaggtggcgaggggcacggccgggaggcgtggcctccgcttcccctttttttttttttttggtccgcctagctaaggaaaggttcccctgcgcctttaagaggccgacgcgggcagccgattggcccagacgcctcggtgacgtcacgccggggccggagccctccccctcccgccgcgccgcgcgctcgcggacagtcggcgcgcgggccgggccgggccggcgcccctctgcctcgcgcgcttgtcgcgttgccccgggctccgggggatgcccccggccgagcccttctcatggccgccgacgtcttcatgtgctccccgcgccggcctcgcagccggggccgccaggtgctgctcaagccccaggtgtccgaggacgacgacgactcggacacggatgagccgtccccgccgcccgcctccggcgcggccaccccggcccgggcccacgcgagcgccgcgccaccgccgcctcgggccgggccgggccgcgaggaacctccgcgccgccagcagatcatccacagcggccacttcatggtgtcgtcgccgcaccgagagcacccgcccaagaagggctacgatttcgacacggtcaacaaacagacgtgccagacctacagcttcggcaagactagctcctgccacctgtccatcgacgcctcgctcaccaagctcttcgagtgcatgactttggcctacaggtagggacccccgcgaccccctgaggccccggccggaggcccttgtttgacaaaacaagcgtggagggaagggccgcctggcaaccccgtggcttcatgcattccctttgggtcttcctccttcgggagggtttatggatctggggttccccgcgttgccagaggagccggggtcctggcctcttcccctgccagcagtgccggggtcctttcgggttcacgttccccatccaggccctcccctccagtgtcctgggaccaccgatgttggacgaggaagaggtataaacactggctgcatcttgtgttacccgactctatcgactccttcctccaaacgctttgtgtgtttcccccatatccagcagcggtcaggaccacctgttcggggtgactggaggctggctctgctgtttaatggttgtgtaacacctcggagcctgtttcctcctttataaaaggggaatgactgtagtgtctgcctccaaggggctgttgtggggatggagtgagataggtaaattgcttattccagtgcttggccagagttaggtgtccctgcacctggaggctggcccccttacaacctcatcgggaggcccgcccccatctcgggagggctttgggtgcctcctaagaagacttttggtgccacagctgttggaggtgcagtctgtccttctggcaagttggagggttttctggccggtcctgaaacattatatgagggagatgtcattgttgagggcagacatcccagacaccgttctgacatgtggattcggctctgggcagagattcctcttttccaagtcacagaaaatgcctggccctcaaagattaaagcgctttttcactctctctccctttcccactatgaatattaggtatttgctgcaggtaacttttttgtctgcgcaacagaacttctttggactggcagcagcggccttgagcagcttggccctgcagaaagctcatgatgggatctctgctgagttaagcttattgcattaggaactggactagcgggggctgtcttaggtctgctctggaggcatcgcgggagaagtttcctaggagactccataaacagcgtaataaaagagcaggaatatcttgccccctctcacctcacctttttaagagagctgtgagccccaagcatatccaggtttaaatgttatgcttttacctgaagttaaaatattagatacttagccctggatggcacccccctcaccgccgcggtccctggaataaacgattagtcaacttgttctttgttatgttcctgaaacacccctatttcctctcttgaaggtttccctgatgatctgttcccgtagctcctcctcccatcccccttacccggcacattggtcagtctctgctgattctctggtcttgccagtttgagctggcactgagcctgtaaagatgttctgctttttaaaaaacaaatggtgttgaggctgcagccctgtgcgccctccagtctctgattttgagcagttccattggaatcaaacccgactggatcgcagcatatgctatgcctcgagagagccttttcaaacaaagctcgaggtgaaagactggaatgtatcttattaagaaaacttaatcctcttctttattttaatataaacttctacatatacagggagagaatggatgagtcacggggggcatggactggaaaggtctcacctaagtaagctctgctaaatgaaaactaaatcagtctcccctttgcactcttgtttggataacctaaaggcttattaaacaacaccaaataattttagtaatggcattttttttttcatttctctcaaaaatattttggcagctggccgttgctcagttaactttcttgattgcaaaatgcaccatcagtttggtgcaagaagcttatcttgctctcttggctctctcactttcgctgcttttccctgtgcctaaggtctcctgctgcctaaggtcggccacctaaggtctaccaccacaggccctcggatgggatctgtccagtcatttctcatgaagatgccctttgtctgtctgtgtgaggctggtttgtccagtgctgagtttagttggcagtgtagaactttggtatggatgacagacaaatgactcaaaaccagttgtctgggctgtagtctgtggcacagaaagaaactagaggaaggtgagtttctgaccccagctctcctagtgagaactgctacctggctttcagggaaggaaggttgagatcggaggcaacgcggggcgtggtggctcatgcctgtagtcccagcactttgggaggccgaggtgggggattgcttgagcccaggagttcaagatcagcctgggcaatgtagcaagatccccatctctaaaaaagaaaaagaaagaaagaaaaaaagggattgggggcagggcagaaagaagacttaacctcagagcctgtctggcttccatcctggtggggttcatgccttccctgccggctgtctgggtcctcccctcctgcccgagctgagaaaggccagctgggtctcctcttctgtgtgactgtttctggcctaggttctttctaacttcaacttcctgtctgtcctctggcctcttcgttctagctgtctaactctccgtggtacactctgctttttgttgttgttgtttgatttcctgttagctgctgcctcccagctgtttccagatgaggttcaacagctctctggggaggaactaagtgcaggggaagttgtggttattttttaccgagtcctgagaagtggcctagggattctgactgtgatccattcctgaactggcagggcttcacctcctgaagggtctttgcccggggctgactttgggtgtggaacagggtgtttgaggacttggatatgagtgtgcccagggcctgctgggtagggaaccgtgcagatgggattccttgtccttctcactcagttttgctgagaagccctgtggcgaagggtcttgatttggtccagaaacatgtgctcaattattgggacattttggagagaaggggttgcctttccccgaggcaaaccaggtgttaatgatggaaaaaatccttatttttccttagacttatctgaagtctaagaatgctattcaatgggaaagataaaatttccctgcaaggtggaagtgaggatcagcagagataacctctgggaatggagctgggaatggggctagtgcctggcaagtaacacacaagaggagggtttaacgggctccgcatagcaagtgggttatggcagaattttagtt

SEQ ID NO: 59108 - DNA, 1650 bp, Homo sapiens
cagagtgagaccctgcctctaaaaaaaaaaaaaagtaattaattaattaaaattgctcaggcccagctgtgtgaaggccggtgtccccacactgcccaccatccccctgctgtgttcttgctgagagttccttactgagggctccatttcctggcccggtggaatgcctgctcccagctccctactctcccaggctgctcccttatctattgggccagtctctgtttccctttagttttggaatccatgggttccccctccccacaagaaaccttggcagaaggctttgtccatagggaagcaaagaacccagttagcagctcagctctggcctggccttggccttgacctttcacagtactgtgagccagcaggtaggtaagctcactggtgctatgcacggcctccttcagatccttctcagggcagcctaccagagactgtatttgcagaggagctggcagggcctgtgtggagccagctgcgctgcgcctgataagtttgtttgcttatctttgtttgtgtgcttgttgctggctccttggagctatgggtgtgtttgtggggtgttggagatgactgaccctgattggtaaaatagggatgaagcgagcagggcagggtgtggtgtgagaaataatgtcatctattcttccggtgccccccacttcttccccacagagagattttccttctgttccctgtcctagagggccctggggcagcagcttttaggttcttggaaagatggggagcagccacccccgctgagcaactcagattgaggttggggtgtgctgccctcccagacgactggaagattgacacagcagcgctctttcagttctttgttctttgttggctgggatcactggaaatatatcagtgagacttaaatgtgtcctgggagcttgagctgcccagtaggcgacccatggctgcagaacagccagctccagcaatgtgtcatcctggaagggcagctggcctgccttctgtcaggtcacatgggttggctgatgttggtttctgtgtaatttttttcctcctttttaacatggtgcctcaaagtcacggggacttgagggtagaaattaggagggaagggcaggtttttcagctggctcttgggctgtgcttgacaaagccatcattgttttgaataaagtgccagttggtgtggtttgcgtcgctccggtgctctgaaattggcttctcttcttccacctctgctgctgatcctgggggtgggctgggaggaggaccactggttccagagaagaaaccacttccctttgcctccctgctcagcaggagcagcgggaacagcgtcttaggacagtgagttaactactgcagagcagctgggcgtggtggctcacgcctgtaatcccagcactttgggaggtcaaggcgggaggatcacttgagcccaggagtgtaagaccagcctgggcaacatagcaagatcttctacaaaaattatttaaaaaattagccagtcatggtggcatgtgcccgtggccccagctacttgggaggctgaagtaggaggatggcgtcagctggggagtttgaggctgcagtgaaccatgatcgtgccactgcacttcagctggcctaggcaacagagcaaggccatgtctccaa

SEQ ID NO: 59109 - DNA, 1004 bp, Homo sapiens
ctgcctcccaggttcaagtgattctcctgcctcagcctcctaagtagctgggattacaggcatgtgctaccacacccggctaatttttgtatttttagtagacagggtttcatcatgttggccagactgttatcaaactcctgacctcaggtgatccacccacctcagcctcccaaagtgctgggattacaggcgtgagccactgcgcctggctgactgccttcatttctaataccaaatgcaagttggggagttcccaaaaccaccctcagtttcaataattcactagaaaaacagaacgcactgaaaagtattatattcatggttgcagtatattataaggaaaggattcaaattaaaatcagccaagacgcaagtttttactggacttgatccattctacccctgtggttgacctttagtttctagccccgcccagatgtctggctaagacctttagttagcctttcctctggaggttggaactgataccctgtgctccaggcccccattgtaagtcagattggtaactgttctgtggccaaagcccccaggcaaacaaagacactcccatcaggcagaactaatttctaattccaggggcctagaattcacctcccagcagcccagggcaaaggcttgacctctctttgggaaggtgacttcttttttttttttttttttggtggggggggacagggtctcactctgttgcccagactggagtgcggtggcacgatctcggctcacctcaacccccacctcccgggttcaagcgattctcctgcttcagcctcctgagtagctgggattacaggtatgcgccactactgcccggttaatttttttatttttagtagagatggggtttcatcatgttggccaggctggtcttgaactcctgacctcaaatgatccacctgcctcagcctcccaaagtgctgggattacaatcgtgagccaccgcacccagccaggaagactacttctttgctacacaatat

SEQ ID NO: 59110 - DNA, 2528 bp, Homo sapiens
ccagctactcggttggctgaggcggcagaatcgcttgaagccaggaggcggaagttgcagtgagccaagatctcgccactgcactccagcctgggcaacagagcgagactccatctcaaaaaaaaaaaaaattattcctttcagtaataacttaaccctagatcattgagattgttattaatatctttgtgtttgctttagggtttaccagttgtgtgtgtgtctaaacatgtatgtgtgtgtgtattttactgtacccaaatgtgctttcatttagtccttattaacacactctagaggaggaggcgtcattctgattttacccagggcactgctgtggtaggcagcaggtacgccatgacacagcagtggctgtctgattccgtagctgcctgctgtaccaccggtgaggccaggccatcagcatggaggtgggttagatgagcctttgaacttgggagagaaggaaggaaggaaggtgtgtgactactctgagtccctgacccgttgtgcagaggctgctgctgtctgcgtgtctcttgtgtgctgagaggatgcactgtgacatttttctgggggagtcataaccttctggcctgtattgcccaaagcctgggctccttgggggtttgggtggggataggcacaagggtcctgccaggggcacagccagggcatctgccttccagggcaggttccaggttcacagaatgtttgctgctcaggcgcctcctgtgaagactgcagctactgttggcaaatctcggcttgccacgtggcctttctgagtgggactggagaaggggcagggctgtggcctgtggtcagatcaaacctccacagccgcactgtgatatggaccagaaatagtgccttgcccatctcaagccatctgaaaaagagaaaccctatgcgggctgcccagagatggctcccggcctagcacttggaaaactgagctgcccaagacagctgtgccaccagggaggctgggtttacaagtgctctggacttattgaatgaagaattgttaattgagcccctactatgtgccaagccaccaaacgtcctccctagaggagctgcagtgtcaacagggaaaggtgcttgtgtgcagacactactacataagagctcccgtgagaccgtccccgagtggaggagagcagaggggccctgaaggaatcagcagcagcctgggagaggccaggccagctcagaggagatggtgtcgggggcagcatcttgaaggattaggaggtggctgagtggagggccatcaagagtgaggaccatgtcagaggctctgggaggcagaataggccctgccctgcaggcactcaggccagtgggatgctcgggtacttggattgtgaatgcctcgtgggggctggtggcaaagcaggcaggccacgaccaggtcacaggagcctggtttgcactctgtggtcaacagatttcttctaatttttagttatggaaaatttgtaggatatgccaaagtagacggaagaatgtagtgaaccccacatgctgccaccgcacacaccagttgctgtgtgacccatgactgcccttggtctgcccctctctggaaacaagaatgactttgaatccaggaagggaggctggtcaaatgtgaataacaatgaacagcccaaatgtaacctttgctcctcctggagggcactcactgcatgcccagtgttcagtttgttagtctggttcatggaatcctcccagcagccctctgcagaggtgtttgggttaaagtcccttcaacagatattggtgggtggctccaaggctgcaaaacccccacggccagtcctgccctccgcgccctgacagtatccccaccatgccctgccctgtgtggctctgaagaaatcccccagtgacctgaattccatgaagccgggtgtatggctgggggtggatcagtcaagagtttggtcctggaatgatcgggtggcactttgtaatttcacttcaatttcagagtaaccactgagtctccccgctttgccttgcctttcagtgggaagttggtgtctccaaagtggaagaatttcaagggcctgaagctacagtggagagacaagatccggctcaataatgccatctggcgggcctggtacatgcagtgtaagtgccgcccagcctgggcgccggtggtggtcagaacttcacggcctggaggcctgggcacccagggaccagagtctgctcctgggacctggtgtttctaacagaagttcagtctgtgcagacaggaaacccaagccatcaggcccagcagaggggtggcatctgaagagtcagggagcaggtctaggaagactcaggcatgggccttctctctccagcccgagtgtcatggatccggtagcttctccgggagatgagtgtgctagggcaggcttgtgttgggctggtctttctctgagaagccacactgcctctctgactgaggcgttcgttattgacagattcctctcctttcacctggactcctttatttccct

SEQ ID NO: 59111 - DNA, 778 bp, Homo sapiens
ttacaggtgcttggggctacagagctgagtgaggtaccattctttgtccttacggagccctcatgcttatgcccatgaccagttagacactggtaacctggcaccatcttcaaacgggctccgggaagaattgctactgcagagactgggatctgaaccattgattcctcgtagcttttcttatttaggaagaggtggcctgatgaccagttgacacgtgaaattgtcctcggggattcccgagcagctgcaatccaggctgcctctgctcagtaatagaagatggcagagactttggggagactctgctggactccagaaacaagatattcccaggctgctagccagctgtgtgagggccgttgccttatctgagctctgagttatttagtttttaatggaaacaagacccccgcagacacgcagggaaacacaaatccctatcagatcagcagccatggacgtggagacgtggcctttgtccctctgtcccagcgcccggcctgtgtagttggacttggcagtgtgcagcgctagaaaggaattgtctgaccccagcattgcttcctggctcctttcttcctttttcaggagagcatcctgccgaccacagccctccccactgtgagccttcctgacagcctcatcgcgccccctaccgccccatccctggctcacatggatgagcagggctgtgaacacacctcccggactgaggacccgtttatccagcccacggacttcggtccctcagagccgccactgagtgtcccgcagc

SEQ ID NO: 59112 - DNA, 680 bp, Homo sapiens
tttttctttacttcccaaactgccacaatatggctttcaccaccccactaatgtaatcaatatcctctagcagagtccatggtaggcatgaccttcatccacaggtgtttactgccataattatgttgcattgcatggcaaaaggggttttgtggatgtagtcatgattactattcagtttacctaaaatagagagattttcctgcattccctgggcctccccaatgcaatcccatgagcccataaagcagaagaggaagtcagagagattacgagcaagagaagggctcacctgctgttgctggcttgaagatggtggggggcagcgtggaaagcacgagaaggaaataatttggtcaataaccactgagcttggaagaggatgctgagacctagatgagaaccctagccagccagcacctttatttcagctcagtgagttcctgagcaaagaatctatccatggcatgctagactttgacctacaaactctatgagagagaaagtgtgtgtgtgtgtgtgtgtgtgtgtgtgtgtgtgtgtgtgtttaatagaaaggatcttgctctctcacccaggctggagtgaagtggtgtgatcacggctcactgcagccttgacctcccagactcaagcagccctcttaccccagcctcccaagtagttgggactgtaggcct

SEQ ID NO: 59113 - DNA, 1530 bp, Homo sapiens
cagagcgagactgagtctcaaacaaaacaaaaagaaaaaaaaaaattagccgggcgtggtggcgggcgcctgcaatcccagctactcgggaggctgaggctgagaatcgcttgaagccgggaggcacaggttgcagtgagctgagatctcgccactgcactccagcctgggcgacagaggcagatcttgtctcaaaaaaattaaaataaaataaaatgttgcctttaaactttttagaaacggatgccacaataaccgctcctgcaggcagaatttagctctggacccctggcctgggtgccagttgtgtgtgacggtcccgctacaatcgcccaggagcctgcagcgctaggtagagagccctgcgccagctcccccggccccttctgccctcgggaggacgtcttcagacgctcgtctcccttcccggactccccccatgccgtgtccctcctcctctccacgtctcctcagggacttcgagtggctgacgagggctggtcaggaggcggagcagccccaagaaggcagcccggggtctcggggactcgtttctagaagatggacgaactgaaaaggaagccgggcttgacccagggggcggaggcggggctgtcctcagtcctcccgaccggagcgagacgccgcgacccagctgggcggacgagagatgagcgcgtaaggaaggcgggcgccgtgggccgggccacagcgctgtccgcgtcggtccctccctctggtcctgtcccctctacgcggccgcagcggtacctgaagaatgaagttacgctgcgcgacagccaactcttcagagccgccattgtgcagcgcgcggacgccagacgcacacgccggaagtgacgcagcttcgtgagcgcggagcggggcacggcctccacctgagagcgcctcgccccatagccacgcccccacccaaggaagcagtcgggattgggcaggcagggggaaagggggcgaggcttagggcaaaggctgtaacggccgcgcaaggcaaccaaccgccggaacttccgcgcggggcggggcatatgcagggcctgagggcgcggaggtgggtccggcgcggagctgagtcgggcgccgtgacgctggcgggtgggcggggactcagttcgggccagggcttgaagggaatttcctggtgagttagggaggcggggccgggcgggaggcggggccgggcgggaggcggggccgggcgcggcgacggcgctgtcacttcagcaccaggaagtaagtggtccagccggccagcagcagcgccccgatgagcaccgtgtagctgaggagcacgaaggcgagcagctcccgcagcagctgcagcacgtggacggtggacgaggccggcatcgcgctgcgcgggagccccaggacggtcggcggcctgccgggctggcgccgtcccagaggggcggacgggaacacacgaggtcctggccctcgaaacagcaaacgaaggccaggaagcccacagtgccgacctccccaacagcctcctggacgctcgct

SEQ ID NO: 59114 - DNA, 450 bp, Homo sapiens
aggttcagaagcatgtgttgtcacctggacgatctaaccagtccctaagctgagacgaggtggagaagtgtggcttacttgctcattaacatcatccatccagaggcgtaatgttttccgtatagttgggtaattgtttctgccccccgtctgcggtttcagcaggccggccttctccaggttgtgtaaggtcaatatgtgctcatagccgtatgtctgcaagggaagtcatttggccttgatgtcagatcaggaaaaggatttctgcaattttcaaagaagggcacttccaacaaatcaatttggtttgtactgcaggacatgttaccaaagtccagcaatgttagtggatgggcacagaggacagggtggagggatgaaacttgtcctaaaactgcttgcctgttactattaattcagctcactgtttcaaagagaaatttaaaattt

SEQ ID NO: 59115 - DNA, 1504 bp, Homo sapiens
tgactgataaaccctaaggggatgaaggagaggtgacactgtttaaaagaaatcctataaaatctctgatctagttcctgactcccttgtgaaaagggtgctactagagaagttatactgttttaggaggccaggttaaaagcccaaatgattacaacttctctcataacacgcgtgagcagcaggttgcaaggtgcaggtgtttcaagagagcttctaaggtacacgtatgatccctgtaatgaatggacactggaccatccacattcttggaccgctcacccgtccggtgcctcggcaggcagcggaggaaacacctgacgtaaaccagctcatcagctgccgggctatcacagtggcttactctgctctcacaaaacagtcgcggtgccactccggctccaggctgtacgcccagggccccccccttcatcgctgcctcctgcacaggggtgcaggtaaaagggccctgaggctcgcctccttggaagccccaaggacctcataaaccgcgaactcaggcggtcagggaacggattaaaccaggccggaccaggggaggcgagggcggtgtcgctgcctcccgcccctcaccttgcttcctgcgcacttgtccaggaactcgcgcagctcgcgacgcaccgcctcgcgcaacacgtttaggttcactcggccgtaggacagatgagccgccatcttgctccaccaccccctgccccacaacgccaaccgagtccgccggttcctacgggaggaccacggacgcagtcacgtgaccaaacgtccacgtgaccggtacggcagcgcacgccaacccggaaaccggaatctgctgggttcgggttctacctagtctggccctagtgtccgcctctttcttctaccccggtggttattcagattctcgccaagacccagagcgcgtttcagagtctggtcactccaggagtcgtcgggcgctgaaaagcgattttaaagatctggagtagaccgggcgcggtggcttacgcctgtaatcccaacactttaagaggccgaggtaggagtgatcgcttcaggccgggagtttgagaccagcctgggcagacttcgtctcaaaaaaaaaaaaaaaagacattgactctctcttgtcccttttaaaaatcgcgaatttttatttgcagcaaaggtacttgctgcaagatgatatcttaaggctaaacttggataggaaaaaaaacttttttttttttgagacagtgtctcgccctgtcgcccaggctggagtgcagtgacgtgatcatagctcactgtagcctccacctcccgggctcaagtgatcttcccacctcagccgccagagtagctggaaccacaggtgcgcgccgccacccactgctcaaatcttaaattatagcagtcagaagtttcttagctttgcactaatcaaggctgttttaatttctgagctaaaatgtatcaatatggtgaggagtcgagggaatcttgagtggacttttttttt

SEQ ID NO: 59116 - DNA, 2972 bp, Homo sapiens
cccgggaagcggaggttgcaatgatccaagatcacaccactgcactccagcctaggcgacagggagagactctgtctcaaaaaaaaaaaaaagtacttcaaaaaataattggcccagtgtggaagttcacacctataatcccagcactttgggaggctgaggtgggaggatcgctggagtccccaaggctgcagtgagccatgatcacaccactgcactacagcctgggcaatagaacaagaaactgtttcaaaaaataataattgactcttgctattttccacagtgaggctctctgtttcttcacaactattaaaattatccttcctaggctgggtgcggtggctcaggtctgtaattccaacactttgggaggccaaggcaggcggatcacttgaggccaggagttcgagaccagcttggccaacatggtgaaactccatctctactaaagatacaaaaattagctggatgcagtggcacatgcctataatcccagctactcaagtggctgaggcacaagagttgcttgaaccaaggaggcagaggttgcagtgagccaagactgtgccaatgtactccagcctgggtgacagagtgagaccttgtctcaaaaaaaagagtactagttctagacttgacacatttgaccttttagtactcgttagtactaacacacaaatcatcacctatataaaattggtctcactgcagttgagtcaaaagaaaataaagtcggcctcaattttctccttcctcccacaccacaccattcagagcagcagtccagccagcatcatgtgagcaggacacagcacattagttaaagatgatgcaacctcttcagacaatgtgttaaattctttggggatgagtcgaagtcactgtcatgacaattgcttttccaagaggcatctaataggctatagtcaacaattctccaagcaaactacaagcttcattcagatcagctttgtaaaaagtaatcacaaataacaaattagcaactatttctctaaatgcaggtaatatacatgtatcctgaaaaaaaaattatgtcacaaaatttgtctgaaatgaatgattactagttcctagaacaaaaagttttcttatattctttctcccaccaaacatggaactcttcactcatttaacagaaaatgtatttttcttttccctgtaaaaaatcagtagttattctatggagacagaaagtcaggtgaagtcctaaaatcatcaaatgtttttctacttaatcattctacaatcaaaaaacgtgtttacgcatttcaacgggactttacaaagttaggttttatttctcatgtgttccagacaatgcagaaaagtctagtacatgcacgtacaggaaacagaagcattaaataatgcattgacaataaacagaaggcactattatcaaatcatatctaagaaatctatgttctaagacaaatatctaagttattaaagaaaaacattttcaatattgaaacaaaaaacaaggccaggtgcagtggctcatgcctgtaatcccaccattttgggaggccaaggcaggaggatcatctgaggccaggagtttgagactggcctgggcaacacagtgagactccatctctacaaaaatttaaaaattagccaggcatggtggcatgtgcctgtgatcccagctactgaggctgcaagtgagctatgatcatgacactgcactccagcctggacaagacagtgagaccctgtctcaaaaacaaacaaaaaaactaaaagatagattcccatggcaaacacaaacaagcccaattcgttctctttactctcagaatgttagcatgtaactcctaatactgtggtaaaagtcactactgaagacagaattaatttaaactagaaacgcaaaaaaaaccctagatactatttttatgctttagcaaacctcagatttttaagttctcatttatttattcaatatatatttcttgagtgtttggatccttaaaaaacaaggataaacagaatacagcgttggccattgagggagacagacaagaagattcagacaagaaattcctgtaaaaagtgttaagtacatcaagagatttctacaaaatgctgtgggaacagaaacaaatacccttcctgtacgctcctgtaaaaaataaaaacactgataaattcctgttgggttaatgagtgggtgtctacaaacaggaaacagaaacaatcctctctggactctctcatctcttcattatccagttctcggcaagccatttaatctcacagtgcctgagtgcataaagctataaaatgtctcaagagcagtaatgaggggttgtttcacaggaattttgtgagcagtcttgtaaggtggcttcttatctgccatattccaagataaacagcttattttaaaaagtaaacatggaggccaggtggggtgactcatgtctgcaatcctagctctttgggaggccgaggcaggcagatcacttgaggtcaggagtttgagacaggcctgaaattctgtctctactaaaaatacaaaaattagtcgggcatggtggcaagcacctgtaatcccagctactcgggaggttgaggcgggaaaatcacttcaaccccagaggtggaggttgcagtgacccaagatcacaccactgcacttcaataaaaaaaaaataaaataaaataaacatggttagctggtatttgccaaatacaaatgtaagcctcacttaaaacttaattgcctgtgacatgaaagagccaaagcacggtacttttttttttttccttctttttgagacggagtttcgctctgtcgtccaggctggagtgcagtggcatgatctcagctcactacaacctctgcctcccgggttccagagattttcctgcctcagcctcccaagcagctgggattacaggcatgtgccaccacgcccggctaatatttttgtattttt

SEQ ID NO: 59117 - DNA, 1158 bp, Homo sapiens
ttttatttacttaaagggacaatcctttaggccaggcacagtggctcatgcctgtaatcccagcattttgggaggccgaggtggacggatcacgagatcaggagatcgagaccatcctggccaacatggtggaaccgcatctctactaaaaatacaaaaattagctgggtgtggtggtgcgcgcctgtaatcccagctcccaggaggcggaggttgcagtgagccgagattgcatcactgcactccagtctggcgacagcatgagactccggctcaaaaataaaaaaaaagaaggacaatcctttaaaaagttaatattaaccctcagagactagctttctgaatatctgtacgaaccaacaccttttcttccaactccaactgaaacaggtataaacagcacaaggcaaaataatcaaaaacagatggtgacaacttctcgattgtgatgcatctgaattgagacctctgggtcataaagaatttctgccactgataacctagtctaatcatttcaaactgttactttttcacagaagaaaaaactttatgtttatttgcagaaaaaatggatagtaaattccgtagcaaatagagctactgactaatcacgtacacacagtaaaaacactttctattcaactgtggagttttctgcctttaaaagtcctgccagaggatactcacaataattttctcatcattatacgatctctttcagcaaaataaagagggcctggtgtcaatgtctttactttttatctataagaagttgaagaaaatcaacacaaatctagaatatgaaaatagtacctcatggtgtctgtagaatcggggcaggcatcagctcatatcctgccagaagctgggcaaacattttgaacagcctggctatgaggtcatgacaatgacctcacaaacaggaattctcatgttagtcgccctctgggctgaagcctcaccactttaaaggaatctggagctgatgactcaagaaatgtccttcctcctaagaaattatcctcccatctgagattagcagcatctaatctcagttttctccactgctgaccagcatcagcaacacaggtaagcagagacaagcaagtccacctaaatagctgaacaccagtcatgtacgcatatctgtattacctg

SEQ ID NO: 59118 - DNA, 3690 bp, Homo sapiens
aattcctcaaataaattaattttaagggactgggcttggtggctcatgcctgtaatcgcagcacttcggaaggccaaggcagccggatcaccagaggtcaggaatttgagaccagcctggccaacatggtgaaaccctgtctctactgaaaatacaaaaaaaaaaaaaaaaaattagctggtcgtggtggcaggcgcctgtaataccagctacttgggaggctgaggagaatagcttgaaccctggaggtggaggttgcagtgagccgagatcacgccactgcactccagcctgggcgacagaatgagactccaccttaaaaaaaaaaaaaaaattaattttaaggacgagcctctaagattgaaatgctttatatcacaaaaagcattataatgtgaataattaaagtactatatttttataaaagcagagacattttactcgtaagaacaaaatatgtttttaaaacacacaagtttgcccaggcatggtggctcacacctataatcccagcattttgggaggccaaggcaggtggatcacttaagtccaggagtctgagagctgcctgggcaacatagtgaaaccccatctctaaaaaaaaaaaattttttttaattagccgggcatggtggcgcctgcctggaatcccagctacttcggagactgaggtgggaggatcgcttgagcccaggagattgagtccagcctaggcaatattagcaagactttatctctaaaatctttttttaaaaagtttaagaaaaaaagacacttattatagaaaatatatattttaataaaatctaatcccccttcctcctgaccagatatccaaaaaaaaaaaaaaaaaaccttaagcaatttacagaaacaagaggttccacaaaacaagcagttcccaaaaacaagaatggtgaaaattatgttcatacaaaaagcagtaatattcttcatattctcatctgatttcttaaggttatgtttactcctattttttaaatgtcatggttcaaataaataaaaaagtatgaacagagagctggactaggaagtgagacacctaaattccaccccagttggatgaccctgaacaactcacataaccccttccccggctcagtattcccaacttcaacctgaggacactaattaaataagatctgtttctaactccataccttcacagttctagtcctgttttgggtatcaaatccaaatcctgtaagcaaaaggtcaaggattcagaagtgaaaggaaagactgtggctctaactttgccaaagtgaaaagtacagacctctgccatcagtgaagaaagaacccagatctgataagagcttcaaacaggctcagcacctcctggcacacatagagcggcatcacgttgccccaagaaaatcacatctctacacatcagaccctttccagtccattttgccccatccacaaaatgaaaatgccactttatttactaaatctaaaaattctgttgggaggcaaaggagagttgaagaatttgcaatgaatttaacctgccaggagagggagtttaacaccaagcttccagaaacaggctgcgtggtagctacaacgtccagaaacccaggtttcaacgcggccctgcttcaagacccaaaggaaattcagcaccaggcgggtgaagtgacttacctgtgcacagctgcactcgcagacttcggagcccccacctaattctaaaatgctgtatgtccatgaacttaataacagaaggtcaggggagagacgttctgagagcaacggaaatctatcttaagataaagatgtttctgaggctgatttttcaagtcaaacttgagagagaaattcaaaggctatgttctcatatcatattcctgggtttgggaggttcattcacagcttaatcctgtcccctgaagtcacggttacgtaagtatgctgtgtcacttgctgtccccacccccaacacaggagatgcagtgtaacctgagctcctcggcttgagccactgaaaacacttacacaacgctgggacctttccaaattgacttgtttccccttaagaaagggcaagctatttgattttcttccttccacttcattcacattcatatttctgtatatacagaagagactgaaaaagataaataagattgaagggcatttgcaaattttcttcaattcttgagtaaaacaaaaaagtcaactatccaatgtcacggaaaagtaaccaaaaaaaaaaaaattatgggcctgcttagccccaatttaaaaacatcacatctcctggctgaactgagcttaaggtccttggacgggcttcatttcccacgtactggctgtttctagagccaggccccatacgctactgccacgcgcagcatactgccacacagaagggctttgggggcacatgggaaatggctctccaagaacacaggagacacatcagcagtctcttctgactactcttcttgccctctcttccttctctggactactccagctactgggcagcttcgattacggaatgatgactcacacgcattcctgtcttgtttgcatatcatgctatgactaagctccatgagatttgatttgtcttcgcatccaacgaatctaaaaaagtttgatacacagtaagagttcaaaaaagttctcaagtgagtcaacagcaaaacaagaatccataaaattatgcaaaatgatgcgattttcaaactaaagcatcaagtaactgtatcttacactctaaacacttgataaacacagaagcattacagggtttcccaactccggatccttttttttttttttttgagacagtgtttcactcttgtcgcccaggctggagtgcagtggcgcgatctcggctcactgcaacctccgcctctcgggtttaagcaattctcatgccttagcctcccaagtagctgggattacaggcacgtgccaccatgcctggctaattttgtatttttagtagagacaaggttttgccatgttggtcaggctggtctcgaactcccgacctcaggtgatccgcccgtcttggcctcccaaagtgctgggattacagacatgagccaccacgactggcctggatccttttctaaaaagtgggccaatgaagggtgggtatggtggttcacacctgtaatcccaacactttgggaggctgaggtggcaggatgctttgagcccaggagttcaataccagcctgggaaacttggtgagacctcatctctaattattaatgaacaaattaataaaaagtaggtcaatgggccgggcacggtaatcctagcactttgggaggccaaggcgggcagatcacttgaggtcaggaattcaagaccagcctgaccaaaacggcgaagccccatctctactaaaaatacaaaatcagccaggcggcgtggtggcacatgcctgtaatcccagctactcaggaggctgaggcaggagaactgcttaaacctgggaggcagaggttgcggtgagcagagatggcgccattgtactccaagaaagtaggtcaatgaagctatgggcaaactgttcaattactacctacaatgagtgctatttaacaggtatgatctcggctgggcatgctggctcatgcctgtaatcccagcactttgggaggccaaggcgggaggatgacctgaggtcaggagttc

SEQ ID NO: 59119 - DNA, 2919 bp, Homo sapiens
gttccacatatccccatcaagttcactgccttgtctataggactgacttaaaccacctctagagtcaggtgtcagaataagagcattccatcatcttcaaaaacacatgcctttcacatgagattacttgttttattgaatattaaagtcactcagcctgtccttttttccattcctgtcatgactatttataagcaccaatatttcttcactgatctgcatcccctgtgtaatcccatgagacgttctgtcactgctgcatggctcctgttgccgtcattgcctagattcacaagggacgcgttctcgcaagtactatggtcaaaaaagtcagaaggattccaggagccgtaactctaggttttttttagtcttttgtcactttactgtgctaggaccactaagatctattttcactgatatttctctaagtatgtgggtatttatgtatgcttcatacacgatatattatatataactttttaaataggccagactcagctttaaaattaacacaaagattaaaaaagcaaatagcagccaggcgcggtggctcacacctgtaatcccagcactttgggaggccaaggcggatagatcacctgaggtgaagagttcaagaccagcctggccaacatggcaaaaccccatctttactaaaatacaaaaattagccaggtgtggtggtacacacctataatcccagctactcgggaggctgagacaagagaatcacttgagcaagggaggcagaggttgcagtgagcagagatcatgccaccacactatctcaaaaaaaaaaacaaaaaggaaacagcagccgggtgtggttgctcacggccgtaatcccagcactttgggaggacaaggcgagcggatcacctgaggtcagacgttcaagaccagcctggccaacttggtgaaaccccctctctactaaaatgcaaaaattagccgggcatggcggcagctccggtaatcccagctactcagaaggctgaggcaggagaatcgcttgaatccgggaggcagaggttgcagtgagcctagatggcaccactgcactccagcctgggtgacagagcaagactccatctgggggatggggggcgggaagcaaacagcatatctttaaggataaagtacgaaagatgagtaaatattgtaatcactgtttatttaaaaggtcaatgccggccagctcagtggctcacgcccataatcccaacactttgggaggccaaggtgggcagatagttttgagctcaggagtttgagatcatcctaggaaacatggcgaaaccctgtctctgcaaaaaatacaaaaattagccaggcgtggtggtgcgtgcctgtggtcccacagagtgagaccttgtctcaaacaagtaaaaataaatggatcaatgtgaaaagcccattcagacactaaaggactgacacaagtcagtaagtatcagaaaattaactggccccttaattcaaaaggagctacaaggaagttttatttccaatttctaactgagacaaaccttacagagcaatttataaaattagcctgctaaccttaagtgttgatttgagaatatcacacaataagacactgacagtaaatacaaagtttatggtatctttccaaagtcaagagtagacatacccctttgaaaaattattctgtgcttaagaaaattatatgtatttaaaacttaaggtgtgtatgacatagtacagaatacaagttgtacctagagaagttttaaaaaggaaggacaggattaaaaactaacccagggagaaggttggggcataagacaatgttttttttagagatggaactctgagctctgatgcaactgcctgcaattatgaatgcctttgcacagctcagtctgagtgcagatttatattcctactacttagcacgcagaaaataaagagcctcccaatgttcctccatctgcaaaaaaaaaaaaaaatgttttaagggaacatggaaagctgaataatttgagttattttgttcatttacacaaaattctacaaaattcctgtgactttgtaactctaacacataccactagcttaagacacagatcttaaaaggggctgaaattactaggcctctctagtatctcccagaagaacttacttaatgggtcggcagcagtcaattatactaacgtgtaaaaagaagcaatgtgcttaatatagcatcataaaatgttagaatcagaagagactgtagcaatctagttcaactctctcattttaccaacaagaaaactgattctaaaaagtgaaatcacttgtcaaggtcatacttacttaacagtctaggactaaaaccccaatctccaggctcctgaccctaatgtaaactgatgaataaatgtttctaaattattatatacagcagtgagatcaaagagtcaatctcaaggcaagttaaaactgacctccccagccaaggtggttcacacctgcaatctcagcactttgggaggctgaggcaggaagatcacttgagcccaggagttcaaaaccagcctgggcaacacggcaaaactccatctctacaaaaaattagccaggtatggtgtcgcgtgcctgcagtccaggctatctgggaggctgaaggaggatcacctgagcccaggagattgaagctgcagtgagctgtgattgtgccactgcactccagcctggatgagttttttttttttcttgagacagagtgagaacacgtgctacaaggagggtttttggtgagaccctgtctcaaaaaaaaaaaaaaaaaaaaaaaaagaattgatttccctttccattcttcacaaaggaaaaaagttggcatattgttgcctgccccttaaacagtcagacatggcccacaccaaaagcaaaagcataccaaaactgctc

SEQ ID NO: 59120 - DNA, 4917 bp, Homo sapiens
tcaattaaccaagaaacagatgggcacggtggctcacacctgtaatcccaacactttgggaggccaaagcaggtggatcacttgaattcaagagttggagaccagcctggccaacatggtgaaaccccagctctagtaaaaatacaaacattagccaggcatgtgacagattcctgttgtcccagctacttgggaggctgaggtgggagaatcacttgaaccaggaggcaaaggttgcagtgaaccaaaattgcaccactacactctagcctgggcaacagagtgagactctgtctcaaaaaaaaaaaaattaattaaaaaaaaataagaaacgtttactgagtacatggaactccacagaattctgcaagggtcccgaaatgtgaagaccctggccttgatatatctattcaaggaagaccagaaatctacctgtaagtaataacgaagaaccaggtgcccagtatgtgaaaggttcaaaggtgcctacctttgtatgggccataagagaatcaactcatctcttatacaccatccactggctttcgaatcccagcagacagcacttaaaaagcaagaatcggccgggcacagtggctcatgcctgtaatcccagcactttgggaggccgaggtgagaggatcacttgaggtcaggagttcgagaccagcctggccaacatcgtgaaaccctgtctctactaaaaatacaaaaactagcccggtgccgtggtgtgtgcctgtaatcccagctactcgggaggctgaggcaggagaattgcttgagcctgggaagcggaggttgcaccactgcactccagcctgggcaacagagcgagatgcgagactctgtctcaaaaaaaaaaaaaaaaaaaagcaagaatcaaacatgactgagttagttcatgtcccttatgagtcacatgggatgtgacagagtgaattttagccactaggtaaaaaaaattttttttaagataaggacatcaggccaggcgtggtggctcacacctataatcccagcactttgggaggctgaggcaggcggatcacctgaggtcaggtgtgatcagcctggctggccaacgtgatgaaactccatctctactaaaaaaatacaaaaaattagccaggcatggtggcaggcacctaaaatcccagctactcgggaagctgaggcaggagaatcgcttgaacccagtaggcagaggttgcagtgagccgagatcactccattgcactccagcctaggcaacaagagtgaaattccatgtcaaaaaaaaaaaaagagataaggatatcagattctaaactcctcaataggacagaaaccagattagcttatgtcatgctgaagtgcaagctggagctgaagcaatgattgaaaaaatagggaagggcaaaatcttgatcttcaggcaaaatacctacccagggtcccacccggtttcagttttcccctttgaactaggtctagtgggaagatgtacttaactgctttctctgaaccttaaaaatcgggcacaagcctttggccaagcaattacccacttcaactttgctttaatgtagaccagccttggggccaggtgcggtagttcacacctgtaatcccagcactttgggagcccaaagcaggtggatgacttgagcccaggagttcgaaatcagcctgggcaacgtggtgaaaccccatctctaccacagatacaaaaattagccgggcgtggtggcgggcacctgtaattccagtactcaggaggctgaggcacgagaatcgcttaaacctgggaggccgagattgcagtgagctgagatcacgccactgcactctggccggggggacagattgaggctccctctcattgattgattgattgattgatggatggatagacagacagacagactagccttgctttttgccacagattccctatactaatcgaataactaagcacctgaagtcagaatacctgagttcacatgctggtaaaaggtattctgacttcaggtgcttagctgtataaccctggtcaagttacttgacctttctatgaccctcctgccgaatgcacatgacgacagcacgctcactgggttagggttgattaaatgaaataaaacacataaaaagctagcccagagcctggccacaagatgccttcaataaatgttcattgttataatttacagagaaaaaaaggccccaagtctgagaagcgacatgcctggggattcttgctaaaggttatcattaaatctaaaagtcaaacaaacacattcctgactctgggatactctcctgattcgtggataccatcgctaacagtagtgacacaaatcaaataataagaacagccagaatcataaccctaatgacagcagtggccacagcacttaatacttatagagctgctaggggccactgtcctaaaagaggaagaaggccaggctgctgaatcacacacacacaattacagaatcttctccaccctttgttttaaaaaacagttcactggcgcccaagttttgctaaaaacaggtatctaaaccgatgacggacaacgtgtaatttcttcataccaaagaggtggggctgtgcagggaggagggggtggcgctcggctcctgccagatggaaaagccacatgaagtggagaaacagccggattcaggattcacccccgaatcaaaacccgatttttgaaaggcaggaccttccaattcgggcaatcgctaggttctgcttgtaaaataacctctgaacaagtgtcatctgccttccgcgccaatcccctgccgcggtagaaggttcggattaccgggcagcggtgtgatttcggaaacccgagagcgatctggccacctccagccttccccggtctccgagaatcacagccccacttgagaggaaaacaaaagccggggcagcgggggaggccgggccagggtgccctccatgccggatcgcgggcgccgggcacccggggcctgaggaatgctcaggtgacaggcgcggcgcccggggcaacaggtcccgcccggcttcggcctcccggggtccggccgatcccacatccgccccggggcccaggagagggagcggggcgccagggagagagcggcgcctggggcggcgcaggggcaaggagtccaagctccatcttgaggcgggcggaggaagcgaaggcccggctcggcgctgacagggccgccacttttccagctccggaggagccccccagggacccccggcctccggcgccggccacccgagactcccgcggtcccctcccggacggctccggcgcgcgaggctcggccccgctcccggacgccgggcttcgacccccgacccgaccctgggcgggccccgcaggccgggaagccggcaggggagcagggggtgccgggaaagggagagggcccgcgccgccccctgctcacctcctcggacgccgccggtcgccgccacctgtcccactgcagcagcagcagccgccgcggccgccgcctcccgcctcccggctcgtcggctcggggcgggggagagcgtgacgcgccgccgccgccgcggggccgggcgggcgcgcgctgccaggagaagacgccgcgcggctcctcccagcgctccgccgccgcgcccgcccggccggcccggccggcccggcccctcgagtccgcaccggccctgcggcccgcgcccggccccgcgccgccccgccgcctctttgtctgcgcccaccgcggccccgggaggaccctggccccggcgcgcccgccgctccgccctcgaaccctcccgagccccggcttggggagcaaggtgcgagggaaaacccacaggcctgctccgaggggcttctcgtcatttctgcaaagtgttcccagaatttgcaagtcacacccaagagccccattcagcctcgacctcagcccgctctttggggctgattcatttgtttgccctccccttcccgccagacaagggtgagaaatcctttgaaacaggctgcaaggcgcttccgaagcaggttaagttggggattgggaaggatcatctctgccctcgcctccctccagggaaagaccctggatgaggcgtccctggagaaaatgctgaaaggaactgtagagcaggttaagcttgggaagaactgtatctgctccccacttccctccgggaacgaccgcgggttaaaaatcctttgaaacgatcccagggtttgctccgttcgtttgagaaaagccccttttattcgccctggctgcttggacggaagccctggttagtgtcccatcctccttcccccctgggatttcctttaaaagcttttgaaagggacaggagggaaggctgcaacagcctgctcggggctggggtagcagagggcggccagcatttcactcccatggaccatggcaaccccagaagccttacatctccagggaggaatttgcagctgtcggggaagcccaggattttgtggtggataagggggcaggggcttcctcctccttgccagtagaagagaataatcggcgggtgacccctctagctgacctttattcaaagcaccgtgctgcctggaccagcaggaagagggaactgctctggtaatgcacgaagttctgaactatgtaaatttgtctcctggcccctcctctccattcatgtctgaaatccctcgaaatgctgttacctaattcaacatcgccctaatttacaggctgcaaggtcaggtggtggtggtactcctgaaatcccatatccatattcctaatctgaaaggcgcgcctcaccccctaatctaaacagtcttcagctgtaatcagcaagctgtggaatcatagatgtcataggatgaggcacagaccacttctaatgggggagttcagctaggaacacttatgg

SEQ ID NO: 59121 - DNA, 1659 bp, Homo sapiens
ttagccatgcatggcagcatgtgcctttagccccagctccttgggaggccgggcaggaggatagcgagagcccaggtgttcgaggctatagtgagctatgatcacatcactgcactgaagcctgggcaacagagcaacaccctttctctaaaaaaaaaaagagttggaaggaaccttagtgatcactgagttcaaactcttaccctgagcaccaatctacttagacctcagccaatctctaaaaggtaatatacaagtaggctattttaacctttgaatctagtcacttgctcaacaaaatttttttttcttaggagacagggtctgtctctgacccaggctgaagttcaatgtcacgatcacagtccactgcagcctcgaccgtcctcctatctcagccttccgagcagttgggaccacgggtgtgtaccaccacaccaagctaattttgtttattttttgtagagacaggtctcgaaccttgctatgttgccaagactggtctcaaactactggcctcaacctatcctcttgtcttggcctcccaaagcattgggattacaggcgtgagccaccacatccagccctgctgcaaggttcttaactgggggtccacggaccttctggatagaattcagggaaatttgacatttccttcaattatgactgtaggcaaacattctgtttctaccacatgcctgctatgcctgtcctaatccttgactctctaaagtcatgaaccctattagatttcaactaccctcatatagtaggtgttcagtattcctccaaatgttctaaataaaaacttagtagaatgggccagtacaatgaacagagttgtaattggtttgaagaatccaagatcaggactgtggtaggaacagaaggaaacttgttccaagtctgtgagaaatttgccccaggtccaatcccacaacctgttccaatccagtttcatttgtcattctcacttatgactaatgaatttgcttccatgacggaaaacattaagaaatcactctggcatgaggtcaccctacaaaggagcaatctcagctgcccggaatgtcagcgttcagtaagggccacaccccttgccttttcagtaattcctcctattacaaaattccaaatgcagccatattgttgataggaaattttgtttaaaaaatacatttcttaggccgggcgcggtagctcgtgcctgtaatcccagcactttgggaggctgaggtggcggatcacaaggtcaggagttcaagaccagcctggccaacatggtgaaaccccatctctactaaaaatacaaaaaaattatccaggcatggtggcatgcacttgcagtcccagctactagggaggctgtggcaggagaatcgcttgaacctgggaggcagaggttgcagtgagctgagattgcgccactgagattgcgccactgcactccagcctgggtgacggagcgagactccatctcataaataaataaataaataatttttttgcggaacgtggtggttcgtggttataattctgacactgtgggaggctaaggcgggtggatctcctgagcccaggagttaaagaccagcctgggtaatgtagggagaccccatcacaatgaaaattattaacataagctaggtgtggtgacac

SEQ ID NO: 59122 - DNA, 1069 bp, Homo sapiens
cagtgagccgagattgcaccattgcactccagcctggacgacagggcaagactccgtttcaaaaaaaaaaaaaaaaaaattataagctgcaaaatcatactactacattgtattaacactaacgaattttgcacaggtattgaaaggctgtagcctaaatgtaggtcatccctgttaacttcttctgtttttcacccaccatttgagactgtcaacactttaaattccaaatttgccatctgttacattagctatctatccctctcagctttagccatgtataagttcaacaagcatgctttctatatcttcatccaacttcttgaataaacacagtggttggtcaatacaaaaacaaagttctccaaagtatgtttactgtgccccaggtcacaacgcaatcattattaaacagcaaactgaggctaaagtccaaactgctatttaccacaaaaagatgctgttatcaagtgaagacatatgactatactactttatcttttaaacgccacccagttgacataggataggaaacacctattggctgaattcaaaactgaaatgtccaaacttacactgaaagcttccttgttgtttttaatggcacaggactcttccactttgtggtcctcctctagcacaatactggatggctaatacaaagaaaaacacatattacaaccggtaaccaatttttaaccagtttaaatggaagttagtaagtttagaaattaagctaagaatgtttatgaacgacatttcatgtgggagaatggaagatgtaaaaggagagcttcttctgaagcactagcatgcactacaacttcttttttaaccagtattaattatgccgctttcaacactttaaactggcaaggcagataaccagaaagatcaaaaatatatagttttacattactggtcaatattgataatataaccctcacagacctcaagccactacaaaagtttccttgaatcaaaaataatattcagtatgaattttattgttaaatgtattttgtttgctgaatctttaaaaattgtacagaatacataaaaaccaaag

SEQ ID NO: 59123 - DNA, 1590 bp, Homo sapiens
gaggttgcagtgagccgagatcgcgccactgcactccagcctgggcaacagactgagactccattccccgaccccgtccccctaaaaaagctaacatatcagccactttcagttctctacaaattttaaaaggaaaactacccgaaccaaagttatctatctacctataaaactctacgaacgtaaaaaaaaacatactagcaaatcaagaaaaatctgcaatcttgtaactcaagtctaacagaaacttctttggcgcgttttcctcaaggcgttgcaaagcatcttcagcacagaagcgagctccgagtggaagaactctaaaattaatccccaattttaatcaagcaattaaccaattatctcagcacacccggattccttgaggcccccaactctgcattctgggaccactagcgtttgccccggtataaaaaccgatcccgcgtctaagcagccggtatttcatcacctacaactgtaacatgacggcacaatttgagcgtggctgcgaaatatgaaacctcaccacgacctcaaacagaggggggcaattaagggcttgtgtacaatctgtcaggtgagcagcctaaaataaccctaaacacggcacccgggtgggaggcaggagtgggtctggtcaggagacggcctccctgaggggaagaggtctgcgccgaggcagcctgcgcgccccgaaccctagactctcggtccgccggcgggtgacagaaagcacttggaattctggccctcctggaacttccgcccgcgccctcgccctcgcccggcgctgccccggccccacgcctggcgctgccccggccccacacccgggtgacagggcccagcgagaggaaaggatattctcggcgcggagctgctcgatggtctcctcgcactgccgaagccgctcccgtagctccgcgtcgccgaccccattttcgtcctcctcgtcgccgtcgtcgtccttgaagcgagtgtgaacgggcttcggaatcgactcctctgggtggtcgaacggctcgaagagctctagatcgccaaaatacacctctgcggccattttgggctgtggaaaagattcgagaagaggcggagccggccaccagggcttggggaagaaggttggaaggcggcaccactctctagagctctggccgcacggagccacccgctagggttttctccagacgcaggccgcgaaagctgcacacggggcggggccagtcgctagagactacaactcccggaatgcagcggggcctatcgggcttgcgattgcccggaggacggcatgctgggacgtgtggtttctaagcgactggtactcattgtctgcattgcatcctgggattggtgctttttgaaatgtgaagaaagctggagtaggtcagaatgcgctaaagcaatctgggggcagggcggggtggctcacacctgtaataccaactactcgggaggcagaggtgggaggatcacgtgagcccaggagttggagaccaccctgggcaacagagcgagacccagacactacaaaaaaatataaaaattagctgggcgattgtagtcccaagtactcggcaagct

SEQ ID NO: 59124 - DNA, 1776 bp, Homo sapiens
ttttttttttttttttttttttttttgagacggagtctcgctctgtcacccaggctggagtgcagtggcgggatctcggttcactgcaagctccgcctcccgggttcacgccattctcctgcctcagcctcccaagtagctgggactacaggcgtccgccactacgcccggctaatttttttgtatttttagtagagacagggtttcaccgttttagccgggatggtctcgatctcctgacctcgtgatccgcccgcctcggcctcccaaagtgctgggattacaggcgtgagccaccgcgcccggccaacgaagggtttaaatttaaaggaacaaggtcagtgacaagacttaactgtaacgcttctcggacttcaaattgattacatcacgggccacttcggaaaccgcgcatcagtcagaattggtagttccacaaccttttaagttgaattttcactccctttcagcaataccttcctagctcgttaatacacaataataaggtttacacggacgaacactaattgaaattatgcaactagaagcatctcattgagcgtacaaaaaaaaaaatagctacaagtcgctctcttctcccacactaccctttacagacactgcctttttgacccaatacttttcagagaccactcctgatcgtctttctcttccccagcccctttctccaccgcaaattctcaggccctaaaaaaaacttagaataaatcactagccagggtgaataagcgaaaatggaggaagttcagtgaggcgaaaggaacgtagggttggggaagagaggaggaaagttctggaaaaaaaaaggcactccctgcggctccccacccccaccaacaccgccttacttccccctccctacagcaggcagccatgatggcgggcgcagaagaaggccgcggcgccattttgtctacacacatacacacgaacaaggttctgggagccgttcacccactgttggaacgtagcagaaaaatatccctggctttaaactcagattcggtacctaccgccatagttcagagtcccggccgctagagcggcgcctccacttgtcgctttcaacagtaccggccgctccgaagcttcgcctcagactaaatcgctcgcgcgagagacccggatggcacaaaggcgaggaggcccggcgcgtcgcacagcttgctgggagaaaaaggggcggtaacaaaagtttctataacaacgcaattcgaggcggtgattgggtgttctttcataggggagtgtaaagaccgtgaagagggcggggccaagaatacacccccggaatgcgcagtcgggagaacggaatgggcggaactcagggtggggcaacttcctatttcgagtctaaagtaatcttggtctcttccggccgccgtaaaggggttgggtttagtgttctcccgccaatttaagcctgtggcatggaacctaaagactagaggcggttgtgtgagtcaggaagaggggccagatatctgagtgttcctctttagtttcttcaattgcaggtgaggacggggagctgcgctgtgtagggaactgggggtgggttcaggacgaagtagctgcagcctctgctcagttcctgttgttttccccttgacgctggcaggagagaggttggagtcggtttttgctggcggcgatgtccagcggagagcgtttaagtatggaggcctaactgacaagtgtttcatcttgctcattctctcgtattcgcgaatctgttctgcattccgccgccag

SEQ ID NO: 59125 - DNA, 1824 bp, Homo sapiens
agcaattctcatgcctcagcctccagggtagctgggattacaggctcatgccaccatgcacagctaatttttttttttttttttgtatttttagtagaggcaggatttcgctatgtggtccaggctggtctcaaaactcctggcctccagtgagctgcccaccttggccccccaaagtgttgggattacaggcgtgagccaccgtgctcagcctggtgtgccttttctttttcttttttttagagtcgaggtctcactctgtcaccaggctgaattggtgtgatcacagctcactgcagcctcaaaatcctgagctcaagcaatcctcctgcctcagcctcccaagtagctgggactacagccgtgtgccaccgtgcctggctaattttatttttgtttctttgtagagatgagatctccctgtgttgcccaggctagtctagattagaacttctgggctcaagggatcttcttgacttggcctctgaaagagctgggattacaggtatgagccactgcacccggccccatggttttttgcttgctttacttatctattggtacataacaaattagctcaagatgtaatagcctaagccatctctgatggtttctaggagtcaggaattcaggtctctgctatacatatctgggacctcagctggagtcccaaaggctggggctgggaccatctgaaggcacagtcatgtacaggtcagctgtcaggatggcttcataatttgtggttttcagtgaacagtgaaacacagggttctggttgagaaacgataaagaatgtattgggggtagagatggagagtgattagtaatggaaatggaatgtagtgatgtttgcacaattctgtgaatatgctgcaaaccattgaatggttcacttgcaatgggtgaattttataacatatgcgttatatctcaataaagctgtttacagattatgaagaatttcaaaatggtgatggcagagtatttaaaagggccaggggctcttcttagcacacggctctgtgcctgataccaggccacacgtctgtgaagcttgcccactgctctcagctgagggcctagttcaaagtctcaaccagagcagccccacggggtctccccatgagatctgggcttccgcccagcatggcgggccaaaacagagagagagagacagagaagccagtatctttttttttgaaacagggtctcactctgtcacccaggctggagtacaatggtatgatcatgactcactgtagccttgaactcctgggctcaagcgatcctcccacctcagcctcctgagtagctgggaccacaggcactcaccaccacgcccggctaattttttaatttttacttttcatagaggcagggtctccctgtgtgggccaggctggtcttgaacttctgggctcaagtgatcctcccaccttggcctcccaaagtgctgggattccaggcgtgagccccagtgtctggtcccctaccccttttatgcccagcttttaaaggcacataacatcacttccaccacattctactcattaaaagaaagtcactaagtctggcctgcattcaagggggaaggaaatcagactctgtcttttgaagagaggagtttcaaagaaattattgatatatttgaaactaccaaattggccttcatatctaggctaagtgatgtttcatggtctcctgcctagcacataggagacaaagccccatgtgaattttcttgccaggccccaacagaaaccaaggctgcatttacactgtgggaaccaactctggaagaacaagcaggctaaaaccagt

SEQ ID NO: 59126 - DNA, 666 bp, Homo sapiens
acaaagtgttgtcaacaaagctatactccacttctttacaatgtccaaagaaacttcttgctaagatgtatttttcgtcacattctgcgaacgtaaaaagggaagcaaatttagaatcaagactgtatttcagtttggatttgatttttctttttgtttgtgcttgctgtttttttggtgagaacctctgcctgcctgcctgccatgcagttctagatattttagctttttttccttggagggcaaaatcctaggggtcctttgacctagagtcacacacaggacacagatttgctttcagaatccatttttattacaatgaaggaacaaaggagcaacagcccaggagagaattctaagaatagaactaaaagcagaagtgtgtgttttcgcagattcctatcaggaggatgtatgactaatgctggtaagaattcttgcctttactcttccccaggtaactgaggggcgggggaattcaggcatgataacagaggaacaacttaagcgctctaaaccccaaaggaaatgctttcttgcctccatttctttatatgtaaaacgtgttaatataagaagtcataatattgagcacttactgccaggcgctatgcttaatgctttacatgcacttaatcattcattcaacaaacatttactgagcac

SEQ ID NO: 59127 - DNA, 2192 bp, Homo sapiens
ttagcacagaacaaaatggagtctcttatgtctacttctttctacacagacacagtaacaatctgatctttcttttccccatatattcccatactcttacatttttctttttttcattaaaaaaaattgtaggccgggcgcggtggctcacgcctgtaatcccagcactttgggaggcggaggcgggaggatcccttgagtccgggagttcgagaccagcctggacagcatagggagattcccccacctctataaacaaattaaaaattagctgggtgtggtaacgcgcgcctgtattcccaactacttgggaggtcgaggctgcagtgaaccgtgtttgtgcaactgcactccatccagcctaggtgacagagtgagaccctgtcaaaacataaagaaaaggatgaaggaagggagggaggaaggaaggaagggagggaggaaggaaggaaagaaggaaggaagggagggagggagggaaggggaagaaagagacagaaagaagagaaagaagaaagaaaagaaagaacagaaaagaaagaaaaaagaattcctttaatttagtgtatggtgttaaaacgcaaccaaacgctccatccggcgaagagagagagaaaagaagagaggaaggaaagaaggaagggagggagggagggagggagaacaccttcctttaattcagtgcatggtgttaaaatgcgaccaaacgctctatccggctgcaatctccccgcacgggagtgatttatgcagtagctggaggttagtcaggactccaggatgcaccgcagacaccgaggcgatgatcctcggactcattaatagggagtcatttgtgactcaggtgcgctctctgcgtctgcaagtcacgttcccttcggcacgcccatctcgaggattcatcctctccaacgggtgacgagcaccgcctgccggcggcccgcctctcggcctcttggccacgccccccaccggagggcaaggcgcacgctccgcaatttttctccgcccccgtcttccggcttctcgcgacatccgcccagcggcggccggaatctcgcgataaaggctcattgtctcgcgggagcgctgctggcggtcgggcgctcgggcggccctggccggggagacgagttgcatgtgttggttcagctggcgatagcggcgggagcggagccggcggggcctgtgcgaccgcctgggtaacgaccccaagtgcttctcccgctcccgagaagctcgtagagagtgtgggggaagctgagatgctgcctggcggaagggggccgggccgggcctctccacacccccgcccacaagggccccttctggcgtccccggggttgctccttcgcctcagacctggtcgcccttgtcccctcagtgctcttacattctgcgctcgttttctctcctcatccttcttacgctctggttaccccgccccctcccatgccctttttagactccccaggcccctctcatggcgtttagttgcccccacaccctgcaccccgggcttctccgatgacccaccccttgttcctaggcacttccagcctctctccattcggcgcctttgtagcccttctctcactgcagtttgcatccctcccagatcaccctcagacctttttgctccgtgtctgccgtgggtactcaccccatctttccttccccattgcttcctgtttttctctagtgagtccctctgccccatccttcatggtccatttgctgcttgcttccctgtagacctgtggagcaaggagatgttgtgcctgggattgctcatattttatgaatcgaatgcagcttgtatcccccactcaacaacagacttgaaacagctttggggtggggaggtttctgttgagaggaacactgctcttctggggtcttgattctaaaatagtgagggtgtgttattttccttgcttacaggtttgtgaaatggctgctgacatttctgaatccagcggggctgactgcaaaggagacccaaggaacagtgccaagttagatgccgattacccacttcgagtcctttattgtggaggcaagtgttggtagccacagaatgacttttactcactatacttttatgcattgtaataacagtttgacatttggtaagctttcttccccatccttttcatttggtgagtttgtactgggggagaggagtcctg

SEQ ID NO: 59128 - DNA, 1278 bp, Homo sapiens
gccaagaagtctttatgtggagtaaagttttataaaagttttacatggggtagctgggcgcggtggctcacacctgtaatctcagcactttgggaggccgaggtgggcggatcgcctgaggtcaggagtttgagaccatcctggccaacatggcgaaaccccgtctctactaaaaataccaaaaaaaaaaattagccgggcatggaggcgcatgcctgtaatcccagctactggggaggctgatgcaggagaatggcttgaacccgggaggcggtggttgcaatgagtggagatttggccactgcactccagcctgggcgacaagaacgaaactccgtctcaaaaaaaaaaaaaaaaaaaagttttacatcgagtaaaatcttcataaaaacgtgtattgacccagtaagcactttctggatttgtgtttacttctatcaaacctgcatttcatatgcggtttcctcagaacccagtttgataagctaaagcgtacaggcatttcggatcttttcaaggtaagcatatcagcatttcaaagacactggggaagcagagagcctgagcagcgccgtccccgcccccatccctcctcctctcccctccctctctccgctgagttttcatatttatagtattttgcatgtcctgatgttgatgaaaatcaggatgtagagttaatattttagacgccaggagcttatagcatgctctccaatattaattgattgtattttattaatgttgtgttttcttcatccaaaagcagatttctcatctatgtggaaggcagaaagcagacaccaatactgaatgaatacttaaccgtaaaactgaaagaggattctagttcttcataaacggcacttaattccagctgggagcagaactagaaagttaatttttaaacatctacacttcattttcaagttaaccatttttgtgctgaagaaatattttcatgtgtaagaaagtagaccttattgtacatatagaaagttggaattatgctaagaatgaaaaagacttctctgtaaagatacggactacagttaaatgctagagaagctctttaaaaatgtgaatgtcaaatagagaaagaaccctgcatagaaagtgctgttttaactatctgatttttaaaaaatctgtgcatacatttaaattctaaacaatagcttatcagagtcagctcaaaatatatgagaaacagtattctctcatggttttagcttttgactttgctgtgtaaatagacataaggtgctttgatataaa
